(19) United States
(12) Patent Application Publication
(10) Pub. No.: US 2012/0117867 A1
(43) Pub. Date: May 17, 2012

(54) Plants with Increased Yield

(75) Inventors: Janneke Hendriks, Schwielowsee (DE); Oliver Thimm, Neustadt (DE); Philip Groth, Berlin (DE); Alexandre Prokoudine, Berlin (DE); Gerhard Ritte, Potsdam (DE); Claudia König, Berlin (DE); Resham Kulkarni, Cary, NC (US); Krishna Kollipara, Durham, NC (US)

(73) Assignee: BASF Plant Science Company GmbH, Ludwigshafen (DE)

(21) Appl. No.: 13/386,273

(22) PCT Filed: Jul. 15, 2010
(86) PCT No.: PCT/EP2010/060233

§ 371 Date: Jan. 20, 2012

Related U.S. Application Data
(60) Provisional application No. 61/261,775, filed on Nov. 17, 2009.
(60) Provisional application No. 61/227,839, filed on Jul. 23, 2009.

(30) Foreign Application Priority Data
Jul. 23, 2009 (EP) 09166280.9
Nov. 17, 2009 (EP) 09176194.0

(51) Int. Cl. A01G 1/00; C12Q 1/68; C12Q 1/02; C12P 21/06; C12N 5/10; C12N 15/82; A01N 43/54; A01N 37/00; C07K 14/00; C07K 16/00; C07H 21/04; C08B 31/00; A01H 5/00; C07K 14/245; C07K 14/39; A01H 5/10; A01C 14/00; C10L 1/00

(52) U.S. Cl. 47/58.1 R; 44/307; 435/6.1; 435/6.12; 435/29; 435/69.1; 435/411; 435/412; 435/414; 435/415; 435/416; 435/417; 435/419; 435/320.1; 504/239; 504/313; 530/350; 530/387.9; 536/23.2; 536/102; 800/290; 800/298; 800/312; 800/314; 800/317; 800/317.1; 800/317.2; 800/317.3; 800/317.4; 800/320; 800/320.1; 800/320.2; 800/320.3; 800/322

(57) ABSTRACT

A method for producing a plant with increased yield as compared to a corresponding wild type plant whereby the method comprises at least the following step: increasing or generating in a plant or a part thereof one or more activities of a polypeptide selected from the group consisting of 26S proteasome-subunit, 50S ribosomal protein L36, Autophagy-related protein, B0050-protein, Branched-chain amino acid permease, Calmodulin, carbon storage regulator, FK506-binding protein, gamma-glutamyl-gamma-aminobutyrate hydrolase, GM02LC38418-protein, Heat stress transcription factor, Mannan polymerase II complex subunit, mitochondrial precursor of Lon protease homolog, MutS protein homolog, phosphate transporter subunit, Protein EFR3, pyruvate kinase, tellurite resistance protein, Xanthine permease, and YAR047C-protein.

[0001] The invention disclosed herein provides a method for producing a plant with increased yield as compared to a corresponding wild type plant comprising increasing or generating one or more activities in a plant or a part thereof. The present invention further relates to nucleic acids enhancing or improving one or more traits of a transgenic plant, and cells, progenies, seeds and pollen derived from such plants or parts, as well as methods of making and methods of using such plant cell(s) or plant(s), progenies, seed(s) or pollen. Particularly, said improved trait(s) are manifested in an increased yield, preferably by improving one or more yield-related trait(s).

### BACKGROUND OF THE INVENTION

[0002] Under field conditions, plant performance, for example in terms of growth, development, biomass accumulation and seed generation, depends on a plant's tolerance and acclimation ability to numerous environmental conditions, changes and stresses. Since the beginning of agriculture and horticulture, there was a need for improving plant traits in crop cultivation. Breeding strategies foster crop properties to withstand biotic and abiotic stresses, to improve nutrient use efficiency and to alter other intrinsic crop specific yield parameters, i.e. increasing yield by applying technical advances. Plants are sessile organisms and consequently need to cope with various environmental stresses. Biotic stresses such as plant pests and pathogens on the one hand, and abiotic environmental stresses on the other hand are major limiting factors for plant growth and productivity, thereby limiting plant cultivation and geographical distribution. Plants exposed to different stresses typically have low yields of plant material, like seeds, fruit or other produces. Crop losses and crop yield losses caused by abiotic and biotic stresses represent a significant economic and political factor and contribute to food shortages, particularly in many underdeveloped countries.

[0003] Conventional means for crop and horticultural improvements today utilize selective breeding techniques to identify plants with desirable characteristics. Advances in molecular biology have allowed to modify the germplasm of plants in a specific way. For example, the modification of a single gene, resulted in several cases in a significant increase in e.g. stress tolerance as well as other yield-related traits.

[0004] Agricultural biotechnology has attempted to meet humanity's growing needs through genetic modifications of plants that could increase crop yield, for example, by conferring better tolerance to abiotic stress responses or by increasing biomass.

[0005] Agricultural biotechnologists use measurements of other parameters that indicate the potential impact of a transgene on crop yield. For forage crops like alfalfa, silage corn, and hay, the plant biomass correlates with the total yield. For grain crops, however, other parameters have been used to estimate yield, such as plant size, as measured by total plant dry weight, above-ground dry weight, above-ground fresh weight, leaf area, stem volume, plant height, rosette diameter, leaf length, root length, root mass, tiller number, and leaf number. Plant size at an early developmental stage will typically correlate with plant size later in development. A larger plant with a greater leaf area can typically absorb more light and carbon dioxide than a smaller plant and therefore will likely gain a greater weight during the same period. There is a strong genetic component to plant size and growth rate, and so for a range of diverse genotypes plant size under one environmental condition is likely to correlate with size under another. In this way a standard environment is used to approximate the diverse and dynamic environments encountered at different locations and times by crops in the field.

[0006] Plants that exhibit tolerance of one abiotic stress often exhibit tolerance of another environmental stress. This phenomenon of cross-tolerance is not understood at a mechanistic level. Nonetheless, it is reasonable to expect that plants exhibiting enhanced tolerance to low temperature, e.g. chilling temperatures and/or freezing temperatures, due to the expression of a transgene may also exhibit tolerance to drought and/or salt and/or other abiotic stresses.

[0007] Some genes that are involved in stress responses, water use, and/or biomass in plants have been characterized, but to date, success at developing transgenic crop plants with improved yield has been limited, and no such plants have been commercialized.

[0008] Consequently, there is a need to identify genes which confer resistance to various combinations of stresses or which confer improved yield under optimal and/or suboptimal growth conditions.

[0009] Accordingly, in one embodiment, the present invention provides a method for producing a plant having an increased yield as compared to a corresponding wild type plant whereby the method comprises at least the following step: increasing or generating in a plant one or more activities of a polypeptide selected from the group consisting of 26S proteasome-subunit, 50S ribosomal protein L36, Autophagy-related protein, B0050-protein, Branched-chain amino acid permease, Calmodulin, carbon storage regulator, FK506-binding protein, gammaglutamyl-gamma-aminobutyrate hydrolase, GM02LC38418-protein, Heat stress transcription factor, Mannan polymerase II complex subunit, mitochondrial precursor of Lon protease homolog, MutS protein homolog, phosphate transporter subunit, Protein EFR3, pyruvate kinase, tellurite resistance protein, Xanthine permease, and YAR047c-protein in the sub-cellular compartment and tissue indicated herein below.

[0010] Accordingly, the invention provides a transgenic plant that over-expresses an isolated polynucleotide as identified in Table I, or a homolog thereof, in the sub-cellular compartment and tissue as indicated herein. The transgenic plant of the invention demonstrates an improved or increased harvestable yield as compared to a wild type variety of the plant.

[0011] Accordingly, the invention provides a method for producing a plant with increased yield as compared to a corresponding wild type plant comprising at least one of the steps selected from the group consisting of: (i) increasing or generating the activity of a polypeptide comprising at least one polypeptide motif or consensus sequence as depicted in column 5 or 7 of Table II or of Table IV, respectively; or (ii) increasing or generating the activity of an expression product of one or more isolated polynucleotide(s) comprising one or more polynucleotide(s) as depicted in column 5 or 7 of Table I.

[0012] The invention further provides a method for increasing yield of a crop plant, the method comprising the following steps: (i) increasing or generating of the expression of at least one polynucleotide; and/or (ii) increasing or generating the expression of an expression product encoded by at least one polynucleotide; and/or (iii) increasing or generating one or more activities of an expression product encoded by at least one polynucleotide, wherein the polynucleotide is selected from the group consisting of:
[0013] (a) an isolated polynucleotide encoding the polypeptide shown in column 5 or 7 of table II;
[0014] (b) an isolated polynucleotide shown in column 5 or 7 of table I;
[0015] (c) an isolated polynucleotide, which, as a result of the degeneracy of the genetic code, can be derived from a polypeptide sequence depicted in column 5 or 7 of table II and confers an increased yield as compared to a corresponding, e.g. non-transformed, wild type plant cell, a transgenic plant or a part thereof;
[0016] (d) an isolated polynucleotide having 30 or more, for example 50%, 60%, 70%, 80%, 85%, 90%, 95%, 97%, 98%, or 99% (percent) or more identity with the sequence of a polynucleotide shown in column 5 or 7 of table I and conferring an increased yield as compared to a corresponding, e.g. non-transformed, wild type plant cell, a transgenic plant or a part thereof;
[0017] (e) an isolated polynucleotide encoding a polypeptide having 30 or more, for example 50%, 60%, 70%, 80%, 85%, 90%, 95%, 97%, 98%, or 99% or more identity with the amino acid sequence of the polypeptide encoded by the isolated polynucleotide of (a) to (c) and having the activity represented by a polynucleotide as depicted in column 5 of table I and conferring an increased yield as compared to a corresponding, e.g. non-transformed, wild type plant cell, a transgenic plant or a part thereof;
[0018] (f) an isolated polynucleotide which hybridizes with an isolated polynucleotide of (a) to (c) under stringent hybridization conditions and confers an increased yield as compared to a corresponding, e.g. non-transformed, wild type plant cell, a transgenic plant or a part thereof;
[0019] (g) an isolated polynucleotide encoding a polypeptide which can be isolated with the aid of monoclonal or polyclonal antibodies made against a polypeptide encoded by one of the isolated polynucleotides of (a) to (e) and which has the activity represented by the polynucleotide as depicted in column 5 of table I;
[0020] (h) an isolated polynucleotide encoding a polypeptide comprising the consensus sequence or one or more polypeptide motifs as shown in column 7 of table IV and preferably having the activity represented by a polynucleotide as depicted in column 5 of table II or IV;
[0021] (i) an isolated polynucleotide encoding a polypeptide having the activity represented by a protein as depicted in column 5 of table II and conferring increased yield as compared to a corresponding, e.g. non-transformed, wild type plant cell, a transgenic plant or a part thereof;
[0022] (j) an isolated polynucleotide which is obtained by amplifying a cDNA library or a genomic library using primers derived from the polynucleotides sequences in Tables 1 or 2 and having the activity represented by a polynucleotide as depicted in column 5 of table II or IV; and
[0023] (k) an isolated polynucleotide which is obtainable by screening a suitable nucleic acid library under stringent hybridization conditions with a probe comprising a complementary sequence of a isolated polynucleotide of (a) or (b) or with a fragment thereof, having 15 nt or more, preferably 20 nt, 30 nt, 50 nt, 100 nt, 200 nt, or 500 nt, 1000 nt, 1500 nt, 2000 nt or 3000 nt or more of a polynucleotide complementary to a polynucleotide sequence characterized in (a) to (e) and encoding a polypeptide having the activity represented by a protein comprising a polypeptide as depicted in column 5 of table II.

[0024] Furthermore, the invention relates to a method for producing a transgenic plant with increased yield as compared to a corresponding, e.g. non-transformed, wild type plant, comprising transforming a plant cell or a plant cell nucleus or a plant tissue to produce such a plant, with an isolated polynucleotide selected from the group consisting of:
[0025] (a) an isolated polynucleotide encoding the polypeptide shown in column 5 or 7 of table II;
[0026] (b) an isolated polynucleotide shown in column 5 or 7 of table I;
[0027] (c) an isolated polynucleotide, which, as a result of the degeneracy of the genetic code, can be derived from a polypeptide sequence depicted in column 5 or 7 of table II and confers an increased yield as compared to a corresponding, e.g. non-transformed, wild type plant cell, a transgenic plant or a part thereof;
[0028] (d) an isolated polynucleotide having 30% or more, for example 50%, 60%, 70%, 80%, 85%, 90%, 95%, 97%, 98%, or 99% or more identity with a polynucleotide shown in column 5 or 7 of table I and confers an increased yield as compared to a corresponding, e.g. non-transformed, wild type plant cell, a transgenic plant or a part thereof;
[0029] (e) an isolated polynucleotide encoding a polypeptide having 30% or more, for example 50%, 60%, 70%, 80%, 85%, 90%, 95%, 97%, 98%, or 99% or more identity with the amino acid sequence of the polypeptide encoded by the isolated polynucleotide of (a) to (c) and having the activity represented by a polynucleotide as depicted in column 5 of table I and confers an increased yield as compared to a corresponding, e.g. non-transformed, wild type plant cell, a transgenic plant or a part thereof;
[0030] (f) an isolated polynucleotide which hybridizes with a isolated polynucleotide of (a) to (c) under stringent hybridization conditions and confers an increased yield as compared to a corresponding, e.g. non-transformed, wild type plant cell, a transgenic plant or a part thereof;
[0031] (g) an isolated polynucleotide encoding a polypeptide which can be isolated with the aid of monoclonal or polyclonal antibodies made against a polypeptide encoded by one of the isolated polynucleotides of (a) to (e) and having the activity represented by a polynucleotide as depicted in column 5 of table I;
[0032] (h) an isolated polynucleotide encoding a polypeptide comprising the consensus sequence or one or more polypeptide motifs as shown in column 7 of table IV and preferably having the activity represented by a polynucleotide as depicted in column 5 of table II or IV;
[0033] (i) an isolated polynucleotide encoding a polypeptide having the activity represented by a protein as depicted in column 5 of table II and conferring increased yield as compared to a corresponding, e.g. non-transformed, wild type plant cell, a transgenic plant or a part thereof;
[0034] (j) an isolated polynucleotide which is obtained by amplifying a cDNA library or a genomic library using primers derived from the polynucleotide sequences in Tables 1 and 2 and having the activity represented by a polynucleotide as depicted in column 5 of table II or IV; and
[0035] (k) an isolated polynucleotide which is obtainable by screening a suitable nucleic acid library under stringent hybridization conditions with a probe comprising a complementary sequence of an isolated polynucleotide of (a) or (b) or with a fragment thereof, having at least 20, 30, 50, 100, 200, 300, 500 or 1000 or more nt of a polynucleotide complementary to a polynucleotide sequence characterized in (a) to (e) and encoding a polypeptide having the activity represented by a protein comprising a polypeptide as depicted in column 5 of table II,
   and regenerating a transgenic plant from that transformed plant cell nucleus, plant cell or plant tissue with increased yield.

### DETAILED DESCRIPTION OF THE PREFERRED EMBODIMENTS

[0036] A number of yield-related phenotypes are associated with yield of plants. In accordance with the invention, therefore, the genes identified in Table 1, or homologs thereof, may be employed to enhance any yield-related phenotype. Increased yield may be determined in field trials of transgenic plants and suitable control plants. Alternatively, a transgene's ability to increase yield may be determined in a model plant. An increased yield phenotype may be determined in the field test or in a model plant by measuring any one or any combination of the following phenotypes, in comparison to a control plant: yield of dry harvestable parts of the plant, yield of dry aerial harvestable parts of the plant, yield of underground dry harvestable parts of the plant, yield of fresh weight harvestable parts of the plant, yield of aerial fresh weight harvestable parts of the plant yield of underground fresh weight harvestable parts of the plant, yield of the plant's fruit (both fresh and dried), grain dry weight, yield of seeds (both fresh and dry), and the like.

[0037] The most basic yield-related phenotype is increased yield associated with the presence of the gene or a homolog thereof as a transgene in the plant, i.e., the intrinsic yield of the plant. Intrinsic yield capacity of a plant can be, for example, manifested in a field test or in a model system by demonstrating an improvement of seed yield (e.g. in terms of increased seed/grain size, increased ear number, increased seed number per ear, improvement of seed filling, improvement of seed composition, embryo and/or endosperm improvements, and the like); modification and improvement of inherent growth and development mechanisms of a plant (such as plant height, plant growth rate, pod number, pod position on the plant, number of internodes, incidence of pod shatter, efficiency of nodulation and nitrogen fixation, efficiency of carbon assimilation, improvement of seedling vigour/early vigour, enhanced efficiency of germination (under non-stressed conditions), improvement in plant architecture,

[0038] Increased yield-related phenotypes may also be measured to determine tolerance to abiotic environmental stress. Abiotic stresses include drought, low temperature, salinity, osmotic stress, shade, high plant density, mechanical stresses, and oxidative stress, and yield-related phenotypes are encompassed by tolerance to such abiotic stresses. Additional phenotypes that can be monitored to determine enhanced tolerance to abiotic environmental stress include, without limitation, wilting; leaf browning; loss of turgor, which results in drooping of leaves or needles stems, and flowers; drooping and/or shedding of leaves or needles; the leaves are green but leaf angled slightly toward the ground compared with controls; leaf blades begun to fold (curl) inward; premature senescence of leaves or needles; loss of chlorophyll in leaves or needles and/or yellowing. Any of the yield-related phenotypes described above may be monitored in field tests or in model plants to demonstrate that a transgenic plant has increased tolerance to abiotic environmental stress. In accordance with the invention, the genes identified in Table 1, or homologs thereof, may be employed to enhance tolerance to abiotic environmental stress in a plant means that the plant, when confronted with abiotic environmental stress.

### DEFINITIONS

[0039] An “yield-increasing activity” according to the invention refers to an activity selected from the group consisting of 26S proteasome-subunit, 50S ribosomal protein L36, Autophagy-related protein, B0050-protein, Branched-chain amino acid permease, Calmodulin, carbon storage regulator, FK506-binding protein, gamma-glutamyl-gamma-aminobutyrate hydrolase, GM02LC38418-protein, Heat stress transcription factor, Mannan polymerase II complex subunit, mitochondrial precursor of Lon protease homolog, MutS protein homolog, phosphate trans-porter subunit, Protein EFR3, pyruvate kinase, tellurite resistance protein, Xanthine permease, and YAR047c-protein. A polypeptide conferring an yield-increasing activity can be encoded by a nucleic acid sequence as shown in table I, column 5 or 7, and/or comprises or consists of a polypeptide as depicted in table II, column 5 and 7, and/or can be amplified with the primer set shown in table III, column 7.

[0040] A “transgenic plant”, as used herein, refers to a plant which contains a foreign nucleotide sequence inserted into either its nuclear genome or organelle genome. It encompasses further the offspring generations i.e. the T1-, T2- and consecutively generations or BC1-, BC2- and consecutively generation as well as crossbreeds thereof with non-transgenic or other trans-genic plants.

[0041] “Improved adaptation” to environmental stress like e.g. drought, heat, nutrient depletion, freezing and/or chilling temperatures refers herein to an improved plant performance resulting in an increased yield, particularly with regard to one or more of the yield related traits as defined in more detail above.

[0042] A modification, i.e. an increase, can be caused by endogenous or exogenous factors. For example, an increase in activity in an organism or a part thereof can be caused by adding a gene product or a precursor or an activator or an agonist to the media or nutrition or can be caused by introducing said subjects into a organism, transient or stable. Furthermore such an increase can be reached by the introduction of the inventive nucleic acid sequence or the encoded protein in the correct cell compartment for example into the nucleus or cytoplasmic respectively or into plastids either by transformation and/or targeting.

[0043] For the purposes of the description of the present invention, the terms “cytoplasmic” and “non-targeted” shall indicate, that the nucleic acid of the invention is expressed without the addition of an non-natural transit peptide encoding sequence. A non-natural transit peptide encoding sequence is a sequence which is not a natural part of a nucleic acid of the invention, e.g. of the nucleic acids depicted in table I column 5 or 7, but is rather added by molecular manipulation steps as for example described in the example under “plastid targeted expression”. Therefore the terms “cytoplasmic” and “non-targeted” shall not exclude a targeted localisation to any cell compartment for the products of the inventive nucleic acid sequences by their naturally occurring sequence properties within the background of the transgenic organism. The sub-cellular location of the mature polypeptide derived from the enclosed sequences can be predicted by a skilled person for the organism (plant) by using software tools like TargetP (Emanuelsson et al., (2000), Predicting sub-cellular localization of proteins based on their N-terminal amino acid sequence, J. Mol. Biol. 300, 1005-1016.), ChloroP (Emanuelsson et al. (1999), ChloroP, a neural network-based method for predicting chloroplast transit peptides and their cleavage sites, Protein Science, 8: 978-984.) or other predictive software tools (Emanuelsson et al. (2007), Locating proteins in the cell using TargetP, SignalP, and related tools, Nature Protocols 2, 953-971).

[0044] The term “organelle” according to the invention shall mean for example “mitochondria” or “plastid”. The term “plastid” according to the invention are intended to include various forms of plastids including proplastids, chloroplasts, chromoplasts, gerontoplasts, leucoplasts, amyloplasts, elaioplasts and etioplasts, preferably chloroplasts. They all have as a common ancestor the aforementioned proplasts.

[0045] The term “introduced” in the context of this specification shall mean the insertion of a nucleic acid sequence into the organism by means of a “transfection”, “transduction” or preferably by “transformation”.

[0046] A plastid, such as a chloroplast, has been “transformed” by an exogenous (preferably foreign) nucleic acid sequence if nucleic acid sequence has been introduced into the plastid that means that this sequence has crossed the membrane or the membranes of the plastid. The foreign DNA may be integrated (covalently linked) into plastid DNA making up the genome of the plastid, or it may remain not integrated (e.g., by including a chloroplast origin of replication). “Stably” integrated DNA sequences are those, which are inherited through plastid replication, thereby transferring new plastids, with the features of the integrated DNA sequence to the progeny.

[0047] As used herein, “plant” is meant to include not only a whole plant but also a part thereof i.e., one or more cells, and tissues, including for example, leaves, stems, shoots, roots, flowers, fruits and seeds.

[0048] The term “yield” as used herein generally refers to a measurable produce from a plant, particularly a crop. Yield and yield increase (in comparison to a non-transformed starting or wild-type plant) can be measured in a number of ways, and it is understood that a skilled person will be able to apply the correct meaning in view of the particular embodiments, the particular crop concerned and the specific purpose or application concerned. The terms “improved yield” or “increased yield” can be used interchangeable.

[0049] As used herein, the term “improved yield” or the term “increased yield” means any improvement in the yield of any measured plant product, such as grain, fruit or fiber. In accordance with the invention, changes in different phenotypic traits may improve yield. For example, and without limitation, parameters such as floral organ development, root initiation, root biomass, seed number, seed weight, harvest index, tolerance to abiotic environmental stress, leaf formation, phototropism, apical dominance, and fruit development, are suitable measurements of improved yield. Increased yield includes higher fruit yields, higher seed yields, higher fresh matter production, and/or higher dry matter production.

[0050] Any increase in yield is an improved yield in accordance with the invention. For example, the improvement in yield can comprise a 0.1%, 0.5%, 1%, 3%, 5%, 10%, 15%, 20%, 30%, 40%, 50%, 60%, 70%, 80%, 90% or greater increase in any measured parameter. For example, an increase in the bu/acre yield of soybeans or corn derived from a crop comprising plants which are transgenic for the nucleotides and polypeptides of Table I, as compared with the bu/acre yield from untreated soybeans or corn cultivated under the same conditions, is an improved yield in accordance with the invention. The increased or improved yield can be achieved in the absence or presence of stress conditions.

[0051] For example, enhanced or increased “yield” refers to one or more yield parameters selected from the group consisting of biomass yield, dry biomass yield, aerial dry biomass yield, underground dry biomass yield, fresh-weight biomass yield, aerial fresh-weight biomass yield, underground fresh-weight biomass yield; enhanced yield of harvestable parts, either dry or fresh-weight or both, either aerial or underground or both; enhanced yield of crop fruit, either dry or fresh-weight or both, either aerial or underground or both; and preferably enhanced yield of seeds, either dry or fresh-weight or both, either aerial or underground or both.

[0052] “Crop yield” is defined herein as the number of bushels of relevant agricultural product (such as grain, forage, or seed) harvested per acre. Crop yield is impacted by abiotic stresses, such as drought, heat, salinity, and cold stress, and by the size (biomass) of the plant.

[0053] The yield of a plant can depend on the specific plant/crop of interest as well as its intended application (such as food production, feed production, processed food production, biofuel, biogas or alcohol production, or the like) of interest in each particular case. Thus, in one embodiment, yield can be calculated as harvest index (expressed as a ratio of the weight of the respective harvestable parts divided by the total biomass), harvestable parts weight per area (acre, square meter, or the like); and the like. The harvest index is the ratio of yield biomass to the total cumulative biomass at harvest. Harvest index is relatively stable under many environmental conditions, and so a robust correlation between plant size and grain yield is possible. As with abiotic stress tolerance, measurements of plant size in early development, under standardized conditions in a growth chamber or greenhouse, are standard practices to measure potential yield advantages conferred by the presence of a transgene.

[0054] Accordingly, the yield of a plant can be increased by improving one or more of the yield-related phenotypes or traits.

[0055] Such yield-related phenotypes or traits of a plant the improvement of which results in increased yield comprise, without limitation, the increase of the intrinsic yield capacity of a plant, improved nutrient use efficiency, and/or increased stress tolerance.

[0056] For example, yield refers to biomass yield, e.g. to dry weight biomass yield and/or fresh-weight biomass yield. Biomass yield refers to the aerial or underground parts of a plant, depending on the specific circumstances (test conditions, specific crop of interest, application of interest, and the like). In one embodiment, biomass yield refers to the aerial and underground parts. Biomass yield may be calculated as fresh-weight, dry weight or a moisture adjusted basis. Biomass yield may be calculated on a per plant basis or in relation to a specific area (e.g. biomass yield per acre/square meter/or the like).

[0057] “Yield” can also refer to seed yield which can be measured by one or more of the following parameters: number of seeds or number of filled seeds (per plant or per area (acre/square meter/or the like)); seed filling rate (ratio between number of filled seeds and total number of seeds); number of flowers per plant; seed biomass or total seeds weight (per plant or per area (acre/square meter/or the like); thousand kernel weight (TKW; extrapolated from the number of filled seeds counted and their total weight; an increase in TKW may be caused by an increased seed size, an increased seed weight, an increased embryo size, and/or an increased endosperm). Other parameters allowing to measure seed yield are also known in the art. Seed yield may be determined on a dry weight or on a fresh weight basis, or typically on a moisture adjusted basis, e.g. at 15.5 percent moisture.

[0058] For example, the term “increased yield” means that the a plant, exhibits an increased growth rate, e.g. in the absence or presence of abiotic environmental stress, compared to the corresponding wild-type plant.

[0059] An increased growth rate may be reflected inter alia by or confers an increased biomass production of the whole plant, or an increased biomass production of the aerial parts of a plant, or by an increased biomass production of the underground parts of a plant, or by an increased biomass production of parts of a plant, like stems, leaves, blossoms, fruits, and/or seeds.

[0060] A prolonged growth comprises survival and/or continued growth of the plant, at the moment when the non-transformed wild type organism shows visual symptoms of deficiency and/or death.

[0061] When the plant of the invention is a corn plant, increased yield for corn plants means, for example, increased seed yield, in particular for corn varieties used for feed or food. Increased seed yield of corn refers to an increased kernel size or weight, an increased kernel per ear, or increased ears per plant. Alternatively or in addition the cob yield may be increased, or the length or size of the cob is increased, or the kernel per cob ratio is improved.

[0062] When the plant of the invention is a soy plant, increased yield for soy plants means increased seed yield, in particular for soy varieties used for feed or food. Increased seed yield of soy refers for example to an increased kernel size or weight, an increased kernel per pod, or increased pods per plant.

[0063] When the plant of the invention is an oil seed rape (OSR) plant, increased yield for OSR plants means increased seed yield, in particular for OSR varieties used for feed or food. Increased seed yield of OSR refers to an increased seed size or weight, an increased seed number per silique, or increased siliques per plant.

[0064] When the plant of the invention is a cotton plant. Increased yield for cotton plants means increased lint yield. Increased lint yield of cotton refers in one embodiment to an increased length of lint.

[0065] Said increased yield can typically be achieved by enhancing or improving, one or more yield-related traits of the plant. Such yield-related traits of a plant comprise, without limitation, the increase of the intrinsic yield capacity of a plant, improved nutrient use efficiency, and/or increased stress tolerance, in particular increased abiotic stress tolerance.

[0066] Intrinsic yield capacity of a plant can be, for example, manifested by improving the specific (intrinsic) seed yield (e.g. in terms of increased seed/grain size, increased ear number, increased seed number per ear, improvement of seed filling, improvement of seed composition, embryo and/or endosperm improvements, or the like); modification and improvement of inherent growth and development mechanisms of a plant (such as plant height, plant growth rate, pod number, pod position on the plant, number of internodes, incidence of pod shatter, efficiency of nodulation and nitrogen fixation, efficiency of carbon assimilation, improvement of seedling vigour/early vigour, enhanced efficiency of germination (under stressed or non-stressed conditions), improvement in plant architecture, cell cycle modifications, photosynthesis modifications, various signaling pathway modifications, modification of transcriptional regulation, modification of translational regulation, modification of enzyme activities, and the like); and/or the like

[0067] The improvement or increase of stress tolerance of a plant can for example be manifested by improving or increasing a plant's tolerance against stress, particularly abiotic stress. In the present application, abiotic stress refers generally to abiotic environmental conditions a plant is typically confronted with, including, but not limited to, drought (tolerance to drought may be achieved as a result of improved water use efficiency), heat, low temperatures and cold conditions (such as freezing and chilling conditions), salinity, osmotic stress, shade, high plant density, mechanical stress, oxidative stress, and the like.

[0068] The increased plant yield can also be mediated by increasing the “nutrient use efficiency of a plant”, e.g. by improving the use efficiency of nutrients including, but not limited to, phosphorus, potassium, and nitrogen. Further, higher yields may be obtained with current or standard levels of nitrogen use

[0069] Generally, the term “increased tolerance to stress” can be defined as survival of plants, and/or higher yield production, under stress conditions as compared to a non-transformed wild type or starting plant: For example, the plant of the invention or produced according to the method of the invention is better adapted to the stress conditions.”

[0070] During its life-cycle, a plant is generally confronted with a diversity of environmental conditions. Any such conditions, which may, under certain circumstances, have an impact on plant yield, are herein referred to as “stress” condition. Environmental stresses may generally be divided into biotic and abiotic (environmental) stresses. Unfavorable nutrient conditions are sometimes also referred to as “environmental stress”. The present invention does also contemplate solutions for this kind of environmental stress, e.g. referring to increased nutrient use efficiency.

[0071] For the purposes of the description of the present invention, the terms “enhanced tolerance to abiotic stress”, “enhanced resistance to abiotic environmental stress”, “enhanced tolerance to environmental stress”, “improved adaptation to environmental stress” and other variations and expressions similar in its meaning are used interchangeably and refer, without limitation, to an improvement in tolerance to one or more abiotic environmental stress(es) as described herein and as compared to a corresponding origin or wild type plant or a part thereof.

[0072] The term abiotic stress tolerance(s) refers for example low temperature tolerance, drought tolerance or improved water use efficiency (WUE), heat tolerance, salt stress tolerance and others. Studies of a plant's response to desiccation, osmotic shock, and temperature extremes are also employed to determine the plant's tolerance or resistance to abiotic stresses. Water use efficiency (WUE) is a parameter often correlated with drought tolerance. In selecting traits for improving crops, a decrease in water use, without a change in growth would have particular merit in an irrigated agricultural system where the water input costs were high. An increase in growth without a corresponding jump in water use would have applicability to all agricultural systems. In many agricultural systems where water supply is not limiting, an increase in growth, even if it came at the expense of an increase in water use also increases yield.

[0073] Drought stress means any environmental stress which leads to a lack of water in plants or reduction of water supply to plants, including a secondary stress by low temperature and/or salt, and/or a primary stress during drought or heat, e.g. desiccation etc.

[0074] Unless otherwise specified, the terms “polynucleotides”, “nucleic acid” and “nucleic acid molecule” are interchangeably in the present context. Unless otherwise specified, the terms “peptide”, “polypeptide” and “protein” are interchangeably in the present context. The term “sequence” may relate to polynucleotides, nucleic acids, nucleic acid molecules, peptides, polypeptides and proteins, depending on the context in which the term “sequence” is used. The terms “gene(s)”, “polynucleotide”, “nucleic acid sequence”, “nucleotide sequence”, or “nucleic acid molecule(s)” as used herein refers to a polymeric form of nucleotides of any length, either ribonucleotides or deoxyribonucleotides. The terms “gene(s)”, “polynucleotide”, “nucleic acid sequence”, “nucleotide sequence”, or “nucleic acid molecule(s)” as used herein include known types of modifications, for example, methylation, “caps”, substitutions of one or more of the naturally occurring nucleotides with an analog. Preferably, the DNA or RNA sequence comprises a coding sequence encoding the herein defined polypeptide.

[0075] As also used herein, the terms “nucleic acid” and “nucleic acid molecule” are intended to include DNA molecules (e.g. cDNA or genomic DNA) and RNA molecules (e.g. mRNA) and analogs of the DNA or RNA generated using nucleotide analogs. The nucleic acid molecule can be single-stranded or double-stranded.

[0076] An “isolated” nucleic acid molecule is one that is substantially separated from other nucleic acid molecules, which are present in the natural source of the nucleic acid. That means other nucleic acid molecules are present in an amount less than 5% based on weight of the amount of the desired nucleic acid, preferably less than 2% by weight, more preferably less than 1% by weight, most preferably less than 0.5% by weight. Preferably, an “isolated” nucleic acid is free of some of the sequences that naturally flank the nucleic acid (i.e., sequences located at the 5′ and 3′ ends of the nucleic acid) in the genomic DNA of the organism from which the nucleic acid is derived. For example, in various embodiments, the isolated yield increasing, for example, low temperature resistance and/or tolerance related protein encoding nucleic acid molecule can contain less than about 5 kb, 4 kb, 3 kb, 2 kb, 1 kb, 0.5 kb or 0.1 kb of nucleotide sequences which naturally flank the nucleic acid molecule in genomic DNA of the cell from which the nucleic acid is derived. Moreover, an “isolated” nucleic acid molecule, such as a cDNA molecule, can be free from some of the other cellular material with which it is naturally associated, or culture medium when produced by recombinant techniques, or chemical precursors or other chemicals when chemically synthesized.

[0077] A “coding sequence” is a nucleotide sequence, which is transcribed into an RNA, e.g. a regulatory RNA, such as a miRNA, a ta-siRNA, cosuppression molecule, an RNAi, a ribozyme, etc. or into a mRNA which is translated into a polypeptide when placed under the control of appropriate regulatory sequences. The boundaries of the coding sequence are determined by a translation start codon at the 5′-terminus and a translation stop codon at the 3′-terminus. A coding sequence can include, but is not limited to mRNA, cDNA, recombinant nucleotide sequences or genomic DNA, while introns may be present as well under certain circumstances.

[0078] As used in the present context a nucleic acid molecule may also encompass the untranslated sequence located at the 3′ and at the 5′ end of the coding gene region, for example 2000, preferably less, e.g. 500, preferably 200, especially preferably 100, nucleotides of the sequence upstream of the 5′ end of the coding region and for example 300, preferably less, e.g. 100, preferably 50, especially preferably 20, nucleotides of the sequence downstream of the 3′ end of the coding gene region.

[0079] “Polypeptide” refers to a polymer of amino acid (amino acid sequence) and does not refer to a specific length of the molecule. Thus, peptides and oligopeptides are included within the definition of polypeptide. This term does also refer to or include post-translational modifications of the polypeptide, for example, glycosylations, acetylations, phosphorylations and the like. Included within the definition are, for example, polypeptides containing one or more analogs of an amino acid (including, for example, unnatural amino acids, etc.), polypeptides with substituted linkages, as well as other modifications known in the art, both naturally occurring and non-naturally occurring. An “isolated” polynucleotide or nucleic acid molecule is separated from other polynucleotides or nucleic acid molecules, which are present in the natural source of the nucleic acid molecule. An isolated nucleic acid molecule may be a chromosomal fragment of several kb, or preferably, a molecule only comprising the coding region of the gene. Accordingly, an isolated nucleic acid molecule of the invention may comprise chromosomal regions, which are adjacent 5′ and 3′ or further adjacent chromosomal regions, but preferably comprises no such sequences which naturally flank the nucleic acid molecule sequence in the genomic or chromosomal context in the organism from which the nucleic acid molecule originates (for example sequences which are adjacent to the regions encoding the 5′- and 3′-UTRs of the nucleic acid molecule). An “isolated” or “purified” polypeptide or biologically active portion thereof is free of some of the cellular material when produced by recombinant DNA techniques, or chemical precursors or other chemicals when chemically synthesized. The language “substantially free of cellular material” includes preparations of a protein in which the polypeptide is separated from some of the cellular components of the cells in which it is naturally or recombinant produced.

[0080] The term “table I” or “table 1” used in this specification is to be taken to specify the content of table I A and table I B. The term “table II” used in this specification is to be taken to specify the content of table II A and table II B. The term “table I A” used in this specification is to be taken to specify the content of table I A. The term “table I B” used in this specification is to be taken to specify the content of table I B. The term “table II A” used in this specification is to be taken to specify the content of table II A. The term “table II B” used in this specification is to be taken to specify the content of table II B.

[0081] The terms “comprise” or “comprising” and grammatical variations thereof when used in this specification are to be taken to specify the presence of stated features, integers, steps or components or groups thereof, but not to preclude the presence or addition of one or more other features, integers, steps, components or groups thereof.

[0082] In accordance with the invention, a protein or polypeptide has the “activity of a protein as shown in table II, column 3” if its de novo activity, or its increased expression directly or indirectly leads to and confers increased yield, e.g. to an increased yield-related trait, for example enhanced tolerance to abiotic environmental stress, for example an increased drought tolerance and/or low temperature tolerance and/or an increased nutrient use efficiency, intrinsic yield and/or another increased yield-related trait as compared to a corresponding, e.g. non-transformed, wild type plant and the protein has the above mentioned activities of a protein as shown in table II, column 3.

[0083] Throughout the specification the activity or preferably the biological activity of such a protein or polypeptide or an nucleic acid molecule or sequence encoding such protein or polypeptide is identical or similar if it still has the biological or enzymatic activity of a protein as shown in table II, column 3, or which has 10% or more of the original enzymatic activity, preferably 20%, 30%, 40%, 50%, particularly preferably 60%, 70%, 80% most particularly preferably 90%, 95%, 98%, 99% or more in comparison to a protein as shown in table II, column 3 of S. cerevisiae or E. coli or Synechocystis sp. or A. thaliana.

[0084] In another embodiment the biological or enzymatic activity of a protein as shown in table II, column 3, has 100% or more of the original enzymatic activity, preferably 110%, 120%, 130%, 150%, particularly preferably 150%, 200%, 300% or more in comparison to a protein as shown in table II, column 3 of S. cerevisiae or E. coli or Synechocystis sp. or A. thaliana.

[0085] The terms “increased”, “raised”, “extended”, “enhanced”, “improved” or “amplified” relate to a corresponding change of a property in a plant, an organism, a part of an organism such as a tissue, seed, root, leave, flower etc. or in a cell and are interchangeable. Preferably, the overall activity in the volume is increased or enhanced in cases if the increase or enhancement is related to the increase or enhancement of an activity of a gene product, independent whether the amount of gene product or the specific activity of the gene product or both is increased or enhanced or whether the amount, stability or translation efficacy of the nucleic acid sequence or gene encoding for the gene product is increased or enhanced.

[0086] The terms “increase” relate to a corresponding change of a property an organism or in a part of a plant, an organism, such as a tissue, seed, root, leave, flower etc. or in a cell. Preferably, the overall activity in the volume is increased in cases the increase relates to the increase of an activity of a gene product, independent whether the amount of gene product or the specific activity of the gene product or both is increased or generated or whether the amount, stability or translation efficacy of the nucleic acid sequence or gene encoding for the gene product is increased. The terms “increase” include the change of said property in only parts of the subject of the present invention, for example, the modification can be found in compartment of a cell, like a organelle, or in a part of a plant, like tissue, seed, root, leave, flower etc. but is not detectable if the overall subject, i.e. complete cell or plant, is tested. Accordingly, the term “increase” means that the specific activity of an enzyme as well as the amount of a compound or metabolite, e.g. of a polypeptide, a nucleic acid molecule of the invention or an encoding mRNA or DNA, can be increased in a volume. The term “increase” includes, that a compound or an activity, especially an activity, is introduced into a cell, the cytoplasm or a subcellular compartment or organelle de novo or that the compound or the activity, especially an activity, has not been detected before, in other words it is “generated”. Accordingly, in the following, the term “increasing” also comprises the term “generating” or “stimulating”. The increased activity manifests itself in increased yield, e.g. an increased yield-related trait, for example enhanced tolerance to abiotic environmental stress, for example an increased drought tolerance and/or low temperature tolerance and/or an increased nutrient use efficiency, intrinsic yield and/or another increased yield-related trait as compared to a corresponding, e.g. non-transformed, wild type plant cell, plant or part thereof.

[0087] Under “change of a property” it is understood that the activity, expression level or amount of a gene product or the metabolite content is changed in a specific volume relative to a corresponding volume of a control, reference or wild type, including the de novo creation of the activity or expression.

[0088] “Amount of protein or mRNA” is understood as meaning the molecule number of polypeptides or mRNA molecules in an organism, especially a plant, a tissue, a cell or a cell compartment. “Increase” in the amount of a protein means the quantitative increase of the molecule number of said protein in an organism, especially a plant, a tissue, a cell or a cell compartment such as an organelle like a plastid or mitochondria or part thereof—for example by one of the methods described herein below—in comparison to a wild type, control or reference.

[0089] The increase in molecule number amounts preferably to 1% or more, preferably to 10% or more, more preferably to 30% or more, especially preferably to 50%, 70% or more, very especially preferably to 100%, most preferably to 500% or more. However, a de novo expression is also regarded as subject of the present invention.

[0090] The terms “wild type”, “control” or “reference” are exchangeable and can be a cell or a part of organisms such as an organelle like a chloroplast or a tissue, or an organism, in particular a plant, which was not modified or treated according to the herein described process according to the invention. Accordingly, the cell or a part of organisms such as an organelle like a chloroplast or a tissue, or an organism, in particular a plant used as wild type, control or reference corresponds to the cell, organism, plant or part thereof as much as possible and is in any other property but in the result of the process of the invention as identical to the subject matter of the invention as possible. Thus, the wild type, control or reference is treated identically or as identical as possible, saying that only conditions or properties might be different which do not influence the quality of the tested property.

[0091] Preferably, any comparison is carried out under analogous conditions. The term “analogous conditions” means that all conditions such as, for example, culture or growing conditions, soil, nutrient, water content of the soil, temperature, humidity or surrounding air or soil, assay conditions (such as buffer composition, temperature, substrates, pathogen strain, concentrations and the like) are kept identical between the experiments to be compared.

[0092] The “reference”, “control”, or “wild type” is preferably a subject, e.g. an organelle, a cell, a tissue, an organism, in particular a plant, which was not modified or treated according to the herein described process of the invention and is in any other property as similar to the subject matter of the invention as possible. The reference, control or wild type is in its genome, transcriptome, proteome or metabolome as similar as possible to the subject of the present invention. Preferably, the term “reference-” “control-” or “wild type-”-organelle, -cell, -tissue or -organism, in particular plant, relates to an organelle, cell, tissue or organism, in particular plant, which is nearly genetically identical to the organelle, cell, tissue or organism, in particular plant, of the present invention or a part thereof preferably 90% or more, e.g. 95%, more preferred are 98%, even more preferred are 99.00%, in particular 99.10%, 99.30%, 99.50%, 99.70%, 99.90%, 99.99%, 99.999% or more. Most preferable the “reference”, “control”, or “wild type” is a subject, e.g. an organelle, a cell, a tissue, an organism, in particular a plant, which is genetically identical to the organism, in particular plant, cell, a tissue or organelle used according to the process of the invention except that the responsible or activity conferring nucleic acid molecules or the gene product encoded by them are amended, manipulated, exchanged or introduced according to the inventive process. In case, a control, reference or wild type differing from the subject of the present invention only by not being subject of the process of the invention can not be provided, a control, reference or wild type can be an organism in which the cause for the modulation of an activity conferring the enhanced tolerance to abiotic environmental stress and/or increased yield as compared to a corresponding, e.g. non-transformed, wild type plant cell, plant or part thereof or expression of the nucleic acid molecule of the invention as described herein has been switched back or off, e.g. by knocking out the expression of responsible gene product, e.g. by antisense or RNAi or miRNA inhibition, by inactivation of an activator or agonist, by activation of an inhibitor or antagonist, by inhibition through adding inhibitory antibodies, by adding active compounds as e.g. hormones, by introducing negative dominant mutants, etc. A gene production can for example be knocked out by introducing inactivating point mutations, which lead to an enzymatic activity inhibition or a destabilization or an inhibition of the ability to bind to cofactors etc. Accordingly, preferred reference subject is the starting subject of the present process of the invention. Preferably, the reference and the subject matter of the invention are compared after standardization and normalization, e.g. to the amount of total RNA, DNA, or protein or activity or expression of reference genes, like housekeeping genes, such as ubiquitin, actin or ribosomal proteins.

[0093] The term “expression” refers to the transcription and/or translation of a codogenic gene segment or gene. As a rule, the resulting product is an mRNA or a protein.

[0094] The increase or modulation according to this invention can be constitutive, e.g. due to a stable permanent transgenic expression or to a stable mutation in the corresponding endogenous gene encoding the nucleic acid molecule of the invention or to a modulation of the expression or of the behavior of a gene conferring the expression of the polypeptide of the invention, or transient, e.g. due to an transient transformation or temporary addition of a modulator such as a agonist or antagonist or inducible, e.g. after transformation with a inducible construct carrying the nucleic acid molecule of the invention under control of a inducible promoter and adding the inducer, e.g. tetracycline or as described herein below.

[0095] Less influence on the regulation of a gene or its gene product is understood as meaning a reduced regulation of the enzymatic activity leading to an increased specific or cellular activity of the gene or its product. An increase of the enzymatic activity is understood as meaning an enzymatic activity, which is increased by 10% or more, advantageously 20%, 30% or 40% or more, especially advantageously by 50%, 60% or 70% or more in comparison with the starting organism. This leads to increased yield, e.g. an increased yield-related trait, for example enhanced tolerance to abiotic environmental stress, for example an increased drought tolerance and/or low temperature tolerance and/or an increased nutrient use efficiency, intrinsic yield and/or another mentioned yield-related trait as compared to a corresponding, e.g. non-transformed, wild type plant or part thereof.

[0096] The increase in activity of the polypeptide amounts in a cell, a tissue, an organelle, an organ or an organism, preferably a plant, or a part thereof preferably to 5% or more, preferably to 20% or to 50%, especially preferably to 70%, 80%, 90% or more, very especially preferably are to 100%, 150% or 200%, most preferably are to 250% or more in comparison to the control, reference or wild type. In one embodiment the term increase means the increase in amount in relation to the weight of the organism or part thereof (w/w).

[0097] By “vectors” is meant with the exception of plasmids all other vectors known to those skilled in the art such as by way of example phages, viruses such as SV40, CMV, baculovirus, adenovirus, transposons, IS elements, phasmids, phagemids, cosmids, linear or circular DNA. These vectors can be replicated autonomously in the host organism or be chromosomally replicated, chromosomal replication being preferred. As used herein, the term “vector” refers to a nucleic acid molecule capable of transporting another nucleic acid to which it has been linked. One type of vector is a “plasmid”, which refers to a circular double stranded DNA loop into which additional DNA segments can be ligated. Another type of vector is a viral vector, wherein additional DNA segments can be ligated into the viral genome. Certain vectors are capable of autonomous replication in a host cell into which they are introduced (e.g. bacterial vectors having a bacterial origin of replication and episomal mammalian vectors). Other vectors (e.g. non-episomal mammalian vectors) are integrated into the genome of a host cell or a organelle upon introduction into the host cell, and thereby are replicated along with the host or organelle genome. Moreover, certain vectors are capable of directing the expression of genes to which they are operatively linked. Such vectors are referred to herein as “expression vectors.” In general, expression vectors of utility in recombinant DNA techniques are often in the form of plasmids. In the present specification, “plasmid” and “vector” can be used interchangeably as the plasmid is the most commonly used form of vector. However, the invention is intended to include such other forms of expression vectors, such as viral vectors (e.g., replication defective retroviruses, adenoviruses, and adeno-associated viruses), which serve equivalent functions.

[0098] As used herein, “operatively linked” is intended to mean that the nucleotide sequence of interest is linked to the regulatory sequence(s) in a manner which allows for expression of the nucleotide sequence (e.g. in an in vitro transcription/translation system or in a host cell when the vector is introduced into the host cell). The term “regulatory sequence” is intended to include promoters, enhancers, and other expression control elements (e.g. polyadenylation signals). Such regulatory sequences are described, for example, in Goeddel, Gene Expression Technology: Methods in Enzymology 185, Academic Press, San Diego, Calif. (1990), and Gruber and Crosby, in: Methods in Plant Molecular Biology and Biotechnology, eds. Glick and Thompson, Chapter 7, 89-108, CRC Press; Boca Raton, Fla., including the references therein. Regulatory sequences include those that direct constitutive expression of a nucleotide sequence in many types of host cells and those that direct expression of the nucleotide sequence only in certain host cells or under certain conditions.

[0099] “Transformation” is defined herein as a process for introducing heterologous DNA into a plant cell, plant tissue, or plant. It may occur under natural or artificial conditions using various methods well known in the art. Transformation may rely on any known method for the insertion of foreign nucleic acid sequences into a prokaryotic or eukaryotic host cell. The method is selected based on the host cell being transformed and may include, but is not limited to, viral infection, electroporation, lipofection, and particle bombardment. Such “transformed” cells include stably transformed cells in which the inserted DNA is capable of replication either as an autonomously replicating plasmid or as part of the host chromosome. They also include cells which transiently express the inserted DNA or RNA for limited periods of time. Trans-formed plant cells, plant tissue, or plants are understood to encompass not only the end product of a transformation process, but also transgenic progeny thereof.

[0100] The terms “transformed,” “transgenic,” and “recombinant” refer to a host organism such as a bacterium or a plant into which a heterologous nucleic acid molecule has been introduced. The nucleic acid molecule can be stably integrated into the genome of the host or the nucleic acid molecule can also be present as an extra-chromosomal molecule. Such an extra-chromosomal molecule can be auto-replicating. Transformed cells, tissues, or plants are understood to encompass not only the end product of a transformation process, but also transgenic progeny thereof. A “non-transformed”, “non-transgenic” or “non-recombinant” host refers to a wild-type organism, e.g. a bacterium or plant, which does not contain the heterologous nucleic acid molecule.

[0101] The terms “host organism”, “host cell”, “recombinant (host) organism” and “trans-genic (host) cell” are used here interchangeably. Of course these terms relate not only to the particular host organism or the particular target cell but also to the descendants or potential descendants of these organisms or cells. Since, due to mutation or environmental effects certain modifications may arise in successive generations, these descendants need not necessarily be identical with the parental cell but nevertheless are still encompassed by the term as used here.

[0102] For the purposes of the invention “transgenic” or “recombinant” means with regard for example to a nucleic acid sequence, an expression cassette (=gene construct, nucleic acid construct) or a vector containing the nucleic acid sequence according to the invention or an organism transformed by said nucleic acid sequences, expression cassette or vector according to the invention all those constructions produced by genetic engineering methods in which either
[0103] (a) the nucleic acid sequence depicted in table I, column 5 or 7 or its derivatives or parts thereof; or
[0104] (b) a genetic control sequence functionally linked to the nucleic acid sequence described under (a), for example a 3′- and/or 5′-genetic control sequence such as a promoter or terminator, or
[0105] (c) (a) and (b);
   are not found in their natural, genetic environment or have been modified by genetic engineering methods, wherein the modification may by way of example be a substitution, addition, deletion, inversion or insertion of one or more nucleotide residues.

[0106] “Natural genetic environment” means the natural genomic or chromosomal locus in the organism of origin or inside the host organism or presence in a genomic library. In the case of a genomic library the natural genetic environment of the nucleic acid sequence is preferably retained at least in part. The environment borders the nucleic acid sequence at least on one side and has a sequence length of at least 50 bp, preferably at least 500 bp, particularly preferably at least 1,000 bp, most particularly preferably at least 5,000 bp. A naturally occurring expression cassette—for example the naturally occurring combination of the natural promoter of the nucleic acid sequence according to the invention with the corresponding gene—turns into a transgenic expression cassette when the latter is modified by unnatural, synthetic (“artificial”) methods such as by way of example a mutagenation. Appropriate methods are described by way of example in U.S. Pat. No. 5,565,350 or WO 00/15815.

[0107] The term “transgenic plants” used in accordance with the invention also refers to the progeny of a transgenic plant, for example the T₁, T₂, T₃ and subsequent plant generations or the BC₁, BC₂, BC₃ and subsequent plant generations. Thus, the transgenic plants according to the invention can be raised and selfed or crossed with other individuals in order to obtain further transgenic plants according to the invention. Transgenic plants may also be obtained by propagating transgenic plant cells vegetatively. The present invention also relates to transgenic plant material, which can be derived from a transgenic plant population according to the invention. Such material includes plant cells and certain tissues, organs and parts of plants in all their manifestations, such as seeds, leaves, anthers, fibers, tubers, roots, root hairs, stems, embryo, calli, cotelydons, petioles, harvested material, plant tissue, reproductive tissue and cell cultures, which are derived from the actual transgenic plant and/or can be used for bringing about the transgenic plant. Any transformed plant obtained according to the invention can be used in a conventional breeding scheme or in in vitro plant propagation to produce more transformed plants with the same characteristics and/or can be used to introduce the same characteristic in other varieties of the same or related species. Such plants are also part of the invention. Seeds obtained from the transformed plants genetically also contain the same characteristic and are part of the invention. As mentioned before, the present invention is in principle applicable to any plant and crop that can be transformed with any of the transformation method known to those skilled in the art.

[0108] The term “homology” means that the respective nucleic acid molecules or encoded proteins are functionally and/or structurally equivalent. The nucleic acid molecules that are homologous to the nucleic acid molecules described above and that are derivatives of said nucleic acid molecules are, for example, variations of said nucleic acid molecules which represent modifications having the same biological function, in particular encoding proteins with the same or substantially the same biological function. They may be naturally occurring variations, such as sequences from other plant varieties or species, or mutations. These mutations may occur naturally or may be obtained by mutagenesis techniques. The allelic variations may be naturally occurring allelic variants as well as synthetically produced or genetically engineered variants. Structurally equivalents can, for example, be identified by testing the binding of said polypeptide to antibodies or computer based predictions. Structurally equivalent have the similar immunological characteristic, e.g. comprise similar epitopes.

[0109] As used herein, the terms “gene” and “recombinant gene” refer to nucleic acid molecules comprising an open reading frame encoding the polypeptide of the invention or comprising the nucleic acid molecule of the invention or encoding the polypeptide used in the process of the present invention, preferably from a crop plant or from a microorganism useful for the method of the invention. Such natural variations can typically result in 1 to 5% variance in the nucleotide sequence of the gene. Any and all such nucleotide variations and resulting amino acid polymorphisms in genes encoding a polypeptide of the invention or comprising a the nucleic acid molecule of the invention that are the result of natural variation and that do not alter the functional activity as described are intended to be within the scope of the invention.

### Specific Embodiments

[0110] Accordingly, this invention provides measures and methods to produce plants with increased yield, e.g. genes conferring an increased yield-related trait, for example enhanced tolerance to abiotic environmental stress, for example an increased drought tolerance and/or low temperature tolerance and/or an increased nutrient use efficiency, intrinsic yield and/or another increased yield-related trait, upon expression or over-expression. Accordingly, the present invention provides genes derived from plants. In particular, gene from plants are described in column 5 as well as in column 7 of tables I or II.

[0111] Accordingly, the present invention provides transgenic plants showing one or more improved yield-related traits as compared to the corresponding origin or the wild type plant and methods for producing such transgenic plants with increased yield. One or more enhanced yield-related phenotypes are increased in accordance with the invention by increasing or generating one or more activities in the transgenic plant, wherein the activity is selected from the group consisting of 26S proteasome-subunit, 50S ribosomal protein L36, Autophagy-related protein, B0050-protein, Branched-chain amino acid permease, Calmodulin, carbon storage regulator, FK506-binding protein, gamma-glutamyl-gamma-aminobutyrate hydrolase, GM02LC38418-protein, Heat stress transcription factor, Mannan polymerase II complex subunit, mitochondrial precursor of Lon protease homolog, MutS protein homolog, phosphate transporter subunit, Protein EFR3, pyruvate kinase, tellurite resistance protein, Xanthine permease, and YAR047c-protein in a subcellular compartment and/or tissue of said plant indicated herein, e.g. in Table I, column 6.

[0112] The nucleic acid molecule of the present invention or used in accordance with the present invention, encodes a protein conferring an activity selected from the group consisting of 26S proteasome-subunit, 50S ribosomal protein L36, Autophagy-related protein, 60050-protein, Branched-chain amino acid permease, Calmodulin, carbon storage regulator, FK506-binding protein, gamma-glutamyl-gamma-aminobutyrate hydrolase, GM02LC38418-protein, Heat stress transcription factor, Mannan polymerase II complex subunit, mitochondrial precursor of Lon protease homolog, MutS protein homolog, phosphate transporter subunit, Protein EFR3, pyruvate kinase, tellurite resistance protein, Xanthine permease, and YAR047c-protein, i.e. conferring an “yield-increasing activity”. Accordingly, in one embodiment, the present invention relates to a nucleic acid molecule that encodes a polypeptide with an yield-increasing activity which is encoded by a nucleic acid sequence as shown in table I, column 5 or 7, and/or which is a protein comprising or consisting of a polypeptide as depicted in table II, column 5 and 7, and/or that can be amplified with the primer set shown in table III, column 7.

[0113] The increase or generation of one or more said “activities” is for example conferred by the increase of activity or of amount in a cell or a part thereof of one or more expression products of said nucleic acid molecule, e.g. proteins, or by de novo expression, i.e. by the generation of said “activity” in the plant.

[0114] In one embodiment, one or more of said yield-increasing activities are increased by increasing the amount and/or the specific activity of one or more proteins listed in Table I, column 5 or 7 in a compartment of a cell indicated in Table I, column 6.

[0115] Accordingly to present invention, the yield of the plant of the invention is increased by improving one or more of the yield-related traits as defined herein. Said increased yield in accordance with the present invention can typically be achieved by enhancing or improving, in comparison to an origin or wild-type plant, one or more yield-related traits of said plant. Such yield-related traits of a plant the improvement of which results in increased yield comprise, without limitation, the increase of the intrinsic yield capacity of a plant, improved nutrient use efficiency, and/or increased stress tolerance.

[0116] In one embodiment, throughout the description, increased yield refers to an increased intrinsic yield.

[0117] The transgenic plants of the present invention demonstrate increased intrinsic yield, as compared to a corresponding non-modified, e.g. a non-transformed, wild type plant is conferred if the activity of a polypeptide comprising the polypeptide shown in SEQ ID NO. 23, or encoded by a nucleic acid molecule comprising the nucleic acid molecule shown in SEQ ID NO. 22, or a homolog of said nucleic acid molecule or polypeptide, is increased or generated. For example, the activity of a corresponding nucleic acid molecule or a polypeptide derived from Arabidopsis thaliana is increased or generated, preferably comprising the nucleic acid molecule shown in SEQ ID NO. 22 or polypeptide shown in SEQ ID NO. 23, respectively, or a homolog thereof. E.g. an increased tolerance to abiotic environmental stress, in particular increased intrinsic yield, compared to a corresponding non-modified, e.g. a non-transformed, wild type plant is conferred if the activity “pyruvate kinase” or if the activity of a nucleic acid molecule or a polypeptide comprising the nucleic acid or polypeptide or the consensus sequence or the polypeptide motif, depicted in table I, II or IV, column 7, respective same line as SEQ ID NO.: 22 or SEQ ID NO.: 23, respectively, is increased or generated in a plant or part thereof. Preferably, the increase occurs plastidic. Particularly, an increase of yield from 1.1-fold to 1.344-fold, for example plus at least 100% thereof, under standard conditions, e.g. in the absence of nutrient deficiency and/or stress conditions is conferred compared to a corresponding control, e.g. an non-modified, e.g. non-transformed, wild type plant.

[0118] The transgenic plants of the present invention demonstrate increased intrinsic yield, as compared to a corresponding non-modified, e.g. a non-transformed, wild type plant is conferred if the activity of a polypeptide comprising the polypeptide shown in SEQ ID NO. 1031, or encoded by a nucleic acid molecule comprising the nucleic acid molecule shown in SEQ ID NO. 1030, or a homolog of said nucleic acid molecule or polypeptide, is increased or generated. For example, the activity of a corresponding nucleic acid molecule or a polypeptide derived from Azotobacter vinelandii is increased or generated, preferably comprising the nucleic acid molecule shown in SEQ ID NO. 1030 or polypeptide shown in SEQ ID NO. 1031, respectively, or a homolog thereof. E.g. an increased tolerance to abiotic environmental stress, in particular increased intrinsic yield, compared to a corresponding non-modified, e.g. a non-transformed, wild type plant is conferred if the activity “505 ribosomal protein L36” or if the activity of a nucleic acid molecule or a polypeptide comprising the nucleic acid or polypeptide or the consensus sequence or the polypeptide motif, depicted in table I, II or IV, column 7, respective same line as SEQ ID NO.: 1030 or SEQ ID NO.: 1031, respectively, is increased or generated in a plant or part thereof. Preferably, the increase occurs cytoplasmic. Particularly, an increase of yield from 1.1-fold to 1.367-fold, for example plus at least 100% thereof, under standard conditions, e.g. in the absence of nutrient deficiency and/or stress conditions is conferred compared to a corresponding control, e.g. an non-modified, e.g. non-transformed, wild type plant.

[0119] The transgenic plants of the present invention demonstrate increased intrinsic yield, as compared to a corresponding non-modified, e.g. a non-transformed, wild type plant is conferred if the activity of a polypeptide comprising the polypeptide shown in SEQ ID NO. 1784, or encoded by a nucleic acid molecule comprising the nucleic acid molecule shown in SEQ ID NO. 1783, or a homolog of said nucleic acid molecule or polypeptide, is increased or generated. For example, the activity of a corresponding nucleic acid molecule or a polypeptide derived from Escherichia coli is increased or generated, preferably comprising the nucleic acid molecule shown in SEQ ID NO. 1783 or polypeptide shown in SEQ ID NO. 1784, respectively, or a homolog thereof. E.g. an increased tolerance to abiotic environmental stress, in particular increased intrinsic yield, compared to a corresponding non-modified, e.g. a non-transformed, wild type plant is conferred if the activity “gamma-glutamyl-gamma-aminobutyrate hydrolase” or if the activity of a nucleic acid molecule or a polypeptide comprising the nucleic acid or polypeptide or the consensus sequence or the polypeptide motif, depicted in table I, II or IV, column 7, respective same line as SEQ ID NO.: 1783 or SEQ ID NO.: 1784, respectively, is increased or generated in a plant or part thereof. Preferably, the increase occurs cytoplasmic. Particularly, an increase of yield from 1.1-fold to 1.480-fold, for example plus at least 100% thereof, under standard conditions, e.g. in the absence of nutrient deficiency and/or stress conditions is conferred compared to a corresponding control, e.g. an non-modified, e.g. non-transformed, wild type plant.

[0120] The transgenic plants of the present invention demonstrate increased intrinsic yield, as compared to a corresponding non-modified, e.g. a non-transformed, wild type plant is conferred if the activity of a polypeptide comprising the polypeptide shown in SEQ ID NO. 1959, or encoded by a nucleic acid molecule comprising the nucleic acid molecule shown in SEQ ID NO. 1958, or a homolog of said nucleic acid molecule or polypeptide, is increased or generated. For example, the activity of a corresponding nucleic acid molecule or a polypeptide derived from Escherichia coli is increased or generated, preferably comprising the nucleic acid molecule shown in SEQ ID NO. 1958 or polypeptide shown in SEQ ID NO. 1959, respectively, or a homolog thereof, e.g. a nucleic acid molecule which differs form said Seq ID No. 1958 by exchanging the stop codon TAA by TGA. E.g. an increased tolerance to abiotic environmental stress, in particular increased intrinsic yield, compared to a corresponding non-modified, e.g. a non-transformed, wild type plant is conferred if the activity “tellurite resistance protein” or if the activity of a nucleic acid molecule or a polypeptide comprising the nucleic acid or polypeptide or the consensus sequence or the polypeptide motif, depicted in table I, II or IV, column 7, respective same line as SEQ ID NO.: 1958 or SEQ ID NO.: 1959, respectively, is increased or generated in a plant or part thereof. Preferably, the increase occurs cytoplasmic. Particularly, an increase of yield from 1.1-fold to 1.402-fold, for example plus at least 100% thereof, under standard conditions, e.g. in the absence of nutrient deficiency and/or stress conditions is conferred compared to a corresponding control, e.g. an non-modified, e.g. non-transformed, wild type plant. The nucleic acid molecule can differ form said Seq ID No. 1958 for example by exchanging the stop codon TAA by TGA.

[0121] The transgenic plants of the present invention demonstrate increased intrinsic yield, as compared to a corresponding non-modified, e.g. a non-transformed, wild type plant is conferred if the activity of a polypeptide comprising the polypeptide shown in SEQ ID NO. 2022, or encoded by a nucleic acid molecule comprising the nucleic acid molecule shown in SEQ ID NO. 2021, or a homolog of said nucleic acid molecule or polypeptide, is increased or generated. For example, the activity of a corresponding nucleic acid molecule or a polypeptide derived from Escherichia coli is increased or generated, preferably comprising the nucleic acid molecule shown in SEQ ID NO. 2021 or polypeptide shown in SEQ ID NO. 2022, respectively, or a homolog thereof. E.g. an increased tolerance to abiotic environmental stress, in particular increased intrinsic yield, compared to a corresponding non-modified, e.g. a non-transformed, wild type plant is conferred if the activity “carbon storage regulator” or if the activity of a nucleic acid molecule or a polypeptide comprising the nucleic acid or polypeptide or the consensus sequence or the polypeptide motif, depicted in table I, II or IV, column 7, respective same line as SEQ ID NO.: 2021 or SEQ ID NO.: 2022, respectively, is increased or generated in a plant or part thereof. Preferably, the increase occurs cytoplasmic. Particularly, an increase of yield from 1.1-fold to 1.468-fold, for example plus at least 100% thereof, under standard conditions, e.g. in the absence of nutrient deficiency and/or stress conditions is conferred compared to a corresponding control, e.g. an non-modified, e.g. non-transformed, wild type plant.

[0122] The transgenic plants of the present invention demonstrate increased intrinsic yield, as compared to a corresponding non-modified, e.g. a non-transformed, wild type plant is conferred if the activity of a polypeptide comprising the polypeptide shown in SEQ ID NO. 2375, or encoded by a nucleic acid molecule comprising the nucleic acid molecule shown in SEQ ID NO. 2374, or a homolog of said nucleic acid molecule or polypeptide, is increased or generated. For example, the activity of a corresponding nucleic acid molecule or a polypeptide derived from Escherichia coli is increased or generated, preferably comprising the nucleic acid molecule shown in SEQ ID NO. 2374 or polypeptide shown in SEQ ID NO. 2375, respectively, or a homolog thereof. E.g. an increased tolerance to abiotic environmental stress, in particular increased intrinsic yield, compared to a corresponding non-modified, e.g. a non-transformed, wild type plant is conferred if the activity “Xanthine permease” or if the activity of a nucleic acid molecule or a polypeptide comprising the nucleic acid or polypeptide or the consensus sequence or the polypeptide motif, depicted in table I, II or IV, column 7, respective same line as SEQ ID NO.: 2374 or SEQ ID NO.: 2375, respectively, is increased or generated in a plant or part thereof. Preferably, the increase occurs cytoplasmic. Particularly, an increase of yield from 1.1-fold to 1.514-fold, for example plus at least 100% thereof, under standard conditions, e.g. in the absence of nutrient deficiency and/or stress conditions is conferred compared to a corresponding control, e.g. an non-modified, e.g. non-transformed, wild type plant.

[0123] The transgenic plants of the present invention demonstrate increased intrinsic yield, as compared to a corresponding non-modified, e.g. a non-transformed, wild type plant is conferred if the activity of a polypeptide comprising the polypeptide shown in SEQ ID NO. 2676, or encoded by a nucleic acid molecule comprising the nucleic acid molecule shown in SEQ ID NO. 2675, or a homolog of said nucleic acid molecule or polypeptide, is increased or generated. For example, the activity of a corresponding nucleic acid molecule or a polypeptide derived from Escherichia coli is increased or generated, preferably comprising the nucleic acid molecule shown in SEQ ID NO. 2675 or polypeptide shown in SEQ ID NO. 2676, respectively, or a homolog thereof. E.g. an increased tolerance to abiotic environmental stress, in particular increased intrinsic yield, compared to a corresponding non-modified, e.g. a non-transformed, wild type plant is conferred if the activity “phosphate transporter subunit” or if the activity of a nucleic acid molecule or a polypeptide comprising the nucleic acid or polypeptide or the consensus sequence or the polypeptide motif, depicted in table I, II or IV, column 7, respective same line as SEQ ID NO.: 2675 or SEQ ID NO.: 2676, respectively, is increased or generated in a plant or part thereof. Preferably, the increase occurs cytoplasmic. Particularly, an increase of yield from 1.1-fold to 1.326-fold, for example plus at least 100% thereof, under standard conditions, e.g. in the absence of nutrient deficiency and/or stress conditions is conferred compared to a corresponding control, e.g. an non-modified, e.g. non-transformed, wild type plant.

[0124] The transgenic plants of the present invention demonstrate increased intrinsic yield, as compared to a corresponding non-modified, e.g. a non-transformed, wild type plant is conferred if the activity of a polypeptide comprising the polypeptide shown in SEQ ID NO. 3154, or encoded by a nucleic acid molecule comprising the nucleic acid molecule shown in SEQ ID NO. 3153, or a homolog of said nucleic acid molecule or polypeptide, is increased or generated. For example, the activity of a corresponding nucleic acid molecule or a polypeptide derived from Saccharomyces cerevisiae is increased or generated, preferably comprising the nucleic acid molecule shown in SEQ ID NO. 3153 or polypeptide shown in SEQ ID NO. 3154, respectively, or a homolog thereof. E.g. an increased tolerance to abiotic environmental stress, in particular increased intrinsic yield, compared to a corresponding non-modified, e.g. a non-transformed, wild type plant is conferred if the activity “YAR047c-protein” or if the activity of a nucleic acid molecule or a polypeptide comprising the nucleic acid or polypeptide or the consensus sequence or the polypeptide motif, depicted in table I, II or IV, column 7, respective same line as SEQ ID NO.: 3153 or SEQ ID NO.: 3154, respectively, is increased or generated in a plant or part thereof. Preferably, the increase occurs plastidic. Particularly, an increase of yield from 1.1-fold to 1.220-fold, for example plus at least 100% thereof, under standard conditions, e.g. in the absence of nutrient deficiency and/or stress conditions is conferred compared to a corresponding control, e.g. an non-modified, e.g. non-transformed, wild type plant.

[0125] The transgenic plants of the present invention demonstrate increased intrinsic yield, as compared to a corresponding non-modified, e.g. a non-transformed, wild type plant is conferred if the activity of a polypeptide comprising the polypeptide shown in SEQ ID NO. 3158, or encoded by a nucleic acid molecule comprising the nucleic acid molecule shown in SEQ ID NO. 3157, or a homolog of said nucleic acid molecule or polypeptide, is increased or generated. For example, the activity of a corresponding nucleic acid molecule or a polypeptide derived from Saccharomyces cerevisiae is increased or generated, preferably comprising the nucleic acid molecule shown in SEQ ID NO. 3157 or polypeptide shown in SEQ ID NO. 3158, respectively, or a homolog thereof. E.g. an increased tolerance to abiotic environmental stress, in particular increased intrinsic yield, compared to a corresponding non-modified, e.g. a non-transformed, wild type plant is conferred if the activity “mitochondrial precursor of Lon protease homolog” or if the activity of a nucleic acid molecule or a polypeptide comprising the nucleic acid or polypeptide or the consensus sequence or the polypeptide motif, depicted in table I, II or IV, column 7, respective same line as SEQ ID NO.: 3157 or SEQ ID NO.: 3158, respectively, is increased or generated in a plant or part thereof. Preferably, the increase occurs cytoplasmic. Particularly, an increase of yield from 1.1-fold to 1.337-fold, for example plus at least 100% thereof, under standard conditions, e.g. in the absence of nutrient deficiency and/or stress conditions is conferred compared to a corresponding control, e.g. an non-modified, e.g. non-transformed, wild type plant.

[0126] The transgenic plants of the present invention demonstrate increased intrinsic yield, as compared to a corresponding non-modified, e.g. a non-transformed, wild type plant is conferred if the activity of a polypeptide comprising the polypeptide shown in SEQ ID NO. 3269, or encoded by a nucleic acid molecule comprising the nucleic acid molecule shown in SEQ ID NO. 3268, or a homolog of said nucleic acid molecule or polypeptide, is increased or generated. For example, the activity of a corresponding nucleic acid molecule or a polypeptide derived from Saccharomyces cerevisiae is increased or generated, preferably comprising the nucleic acid molecule shown in SEQ ID NO. 3268 or polypeptide shown in SEQ ID NO. 3269, respectively, or a homolog thereof, e.g. a nucleic acid molecule which differs form said Seq ID No. 3268 by exchanging the stop codon TAG by TAA. E.g. an increased tolerance to abiotic environmental stress, in particular increased intrinsic yield, compared to a corresponding non-modified, e.g. a non-transformed, wild type plant is conferred if the activity “Calmodulin” or if the activity of a nucleic acid molecule or a polypeptide comprising the nucleic acid or polypeptide or the consensus sequence or the polypeptide motif, depicted in table I, II or IV, column 7, respective same line as SEQ ID NO.: 3268 or SEQ ID NO.: 3269, respectively, is increased or generated in a plant or part thereof. Preferably, the increase occurs cytoplasmic. Particularly, an increase of yield from 1.1-fold to 1.203-fold, for example plus at least 100% thereof, under standard conditions, e.g. in the absence of nutrient deficiency and/or stress conditions is conferred compared to a corresponding control, e.g. an non-modified, e.g. non-transformed, wild type plant. The nucleic acid molecule can differ form said Seq ID No. 3268 by exchanging the stop codon TAG by TAA.

[0127] The transgenic plants of the present invention demonstrate increased intrinsic yield, as compared to a corresponding non-modified, e.g. a non-transformed, wild type plant is conferred if the activity of a polypeptide comprising the polypeptide shown in SEQ ID NO. 3883, or encoded by a nucleic acid molecule comprising the nucleic acid molecule shown in SEQ ID NO. 3882, or a homolog of said nucleic acid molecule or polypeptide, is increased or generated. For example, the activity of a corresponding nucleic acid molecule or a polypeptide derived from Saccharomyces cerevisiae is increased or generated, preferably comprising the nucleic acid molecule shown in SEQ ID NO. 3882 or polypeptide shown in SEQ ID NO. 3883, respectively, or a homolog thereof. E.g. an increased tolerance to abiotic environmental stress, in particular increased intrinsic yield, compared to a corresponding non-modified, e.g. a non-transformed, wild type plant is conferred if the activity “Branched-chain amino acid permease” or if the activity of a nucleic acid molecule or a polypeptide comprising the nucleic acid or polypeptide or the consensus sequence or the polypeptide motif, depicted in table I, II or IV, column 7, respective same line as SEQ ID NO.: 3882 or SEQ ID NO.: 3883, respectively, is increased or generated in a plant or part thereof.

[0128] It was found that the increase occurs by cytoplasmic as well as plastidic expression of an expression cassette comprising the nucleic acid molecule as shown in SEQ ID No.: 3882.

[0129] Particularly, an increase of yield from 1.1-fold to 1.522-fold, for example plus at least 100% thereof, under standard conditions, e.g. in the absence of nutrient deficiency and/or stress conditions is conferred as result of a non-targeted expression of a nucleic acid molecule shown in SEQ ID NO. 3882 as compared to a corresponding control, e.g. an non-modified, e.g. non-transformed, wild type plant.

[0130] Particularly, an increase of yield from 1.1-fold to 1.232-fold, for example plus at least 100% thereof, under standard conditions (intrinsic yield), e.g. in the absence of nutrient deficiency and/or stress conditions is conferred as result of a targeted expression of a nucleic acid molecule shown in SEQ ID NO. 3882 functionally linked to sequence encoding a transit peptide or otherwise expressed in the cell's plastids as compared to a corresponding control, e.g. an non-modified, e.g. non-transformed, wild type plant.

[0131] It was observed that increasing or generating the activity of a gene shown in Table VIIId, e.g. expressing a polypeptide derived from the nucleic acid molecule shown in Table VIIId in A. thaliana, conferred an increase in intrinsic yield, e.g. an increased biomass under standard conditions, like increased biomass under non-deficiency or non-stress conditions, compared to the reference or wild type control. Thus, in one embodiment, a nucleic acid molecule indicated in Table VIIId or its homolog as indicated in Table I or its expression product is used in the method of the present invention to increase intrinsic yield, e.g. to increase yield under standard conditions, e.g. increase biomass under non-deficiency or non-stress conditions, of the plant compared to the wild type control.

[0132] The transgenic plants of the present invention demonstrate increased intrinsic yield, as compared to a corresponding non-modified, e.g. a non-transformed, wild type plant is conferred if the activity of a polypeptide comprising the polypeptide shown in SEQ ID NO. 3949, or encoded by a nucleic acid molecule comprising the nucleic acid molecule shown in SEQ ID NO. 3948, or a homolog of said nucleic acid molecule or polypeptide, is increased or generated. For example, the activity of a corresponding nucleic acid molecule or a polypeptide derived from Saccharomyces cerevisiae is increased or generated, preferably comprising the nucleic acid molecule shown in SEQ ID NO. 3948 or polypeptide shown in SEQ ID NO. 3949, respectively, or a homolog thereof. E.g. an increased tolerance to abiotic environmental stress, in particular increased intrinsic yield, compared to a corresponding non-modified, e.g. a non-transformed, wild type plant is conferred if the activity “Mannan polymerase II complex subunit” or if the activity of a nucleic acid molecule or a polypeptide comprising the nucleic acid or polypeptide or the consensus sequence or the polypeptide motif, depicted in table I, II or IV, column 7, respective same line as SEQ ID NO.: 3948 or SEQ ID NO.: 3949, respectively, is increased or generated in a plant or part thereof. Preferably, the increase occurs cytoplasmic. Particularly, an increase of yield from 1.1-fold to 1.172-fold, for example plus at least 100% thereof, under standard conditions, e.g. in the absence of nutrient deficiency and/or stress conditions is conferred compared to a corresponding control, e.g. an non-modified, e.g. non-transformed, wild type plant.

[0133] The transgenic plants of the present invention demonstrate increased intrinsic yield, as compared to a corresponding non-modified, e.g. a non-transformed, wild type plant is conferred if the activity of a polypeptide comprising the polypeptide shown in SEQ ID NO. 3993, or encoded by a nucleic acid molecule comprising the nucleic acid molecule shown in SEQ ID NO. 3992, or a homolog of said nucleic acid molecule or polypeptide, is increased or generated. For example, the activity of a corresponding nucleic acid molecule or a polypeptide derived from Saccharomyces cerevisiae is increased or generated, preferably comprising the nucleic acid molecule shown in SEQ ID NO. 3992 or polypeptide shown in SEQ ID NO. 3993, respectively, or a homolog thereof. E.g. an increased tolerance to abiotic environmental stress, in particular increased intrinsic yield, compared to a corresponding non-modified, e.g. a non-transformed, wild type plant is conferred if the activity “MutS protein homolog” or if the activity of a nucleic acid molecule or a polypeptide comprising the nucleic acid or polypeptide or the consensus sequence or the polypeptide motif, depicted in table I, II or IV, column 7, respective same line as SEQ ID NO.: 3992 or SEQ ID NO.: 3993, respectively, is increased or generated in a plant or part thereof. Preferably, the increase occurs cytoplasmic. Particularly, an increase of yield from 1.1-fold to 1.178-fold, for example plus at least 100% thereof, under standard conditions, e.g. in the absence of nutrient deficiency and/or stress conditions is conferred compared to a corresponding control, e.g. an non-modified, e.g. non-transformed, wild type plant.

[0134] The transgenic plants of the present invention demonstrate increased intrinsic yield, as compared to a corresponding non-modified, e.g. a non-transformed, wild type plant is conferred if the activity of a polypeptide comprising the polypeptide shown in SEQ ID NO. 4293, or encoded by a nucleic acid molecule comprising the nucleic acid molecule shown in SEQ ID NO. 4292, or a homolog of said nucleic acid molecule or polypeptide, is increased or generated. For example, the activity of a corresponding nucleic acid molecule or a polypeptide derived from Saccharomyces cerevisiae is increased or generated, preferably comprising the nucleic acid molecule shown in SEQ ID NO. 4292 or polypeptide shown in SEQ ID NO. 4293, respectively, or a homolog thereof. E.g. an increased tolerance to abiotic environmental stress, in particular increased intrinsic yield, compared to a corresponding non-modified, e.g. a non-transformed, wild type plant is conferred if the activity “Protein EFR3” or if the activity of a nucleic acid molecule or a polypeptide comprising the nucleic acid or polypeptide or the consensus sequence or the polypeptide motif, depicted in table I, II or IV, column 7, respective same line as SEQ ID NO.: 4292 or SEQ ID NO.: 4293, respectively, is increased or generated in a plant or part thereof. Preferably, the increase occurs cytoplasmic. Particularly, an increase of yield from 1.1-fold to 1.358-fold, for example plus at least 100% thereof, under standard conditions, e.g. in the absence of nutrient deficiency and/or stress conditions is conferred compared to a corresponding control, e.g. an non-modified, e.g. non-transformed, wild type plant.

[0135] The transgenic plants of the present invention demonstrate increased intrinsic yield, as compared to a corresponding non-modified, e.g. a non-transformed, wild type plant is conferred if the activity of a polypeptide comprising the polypeptide shown in SEQ ID NO. 4323, or encoded by a nucleic acid molecule comprising the nucleic acid molecule shown in SEQ ID NO. 4322, or a homolog of said nucleic acid molecule or polypeptide, is increased or generated. For example, the activity of a corresponding nucleic acid molecule or a polypeptide derived from Saccharomyces cerevisiae is increased or generated, preferably comprising the nucleic acid molecule shown in SEQ ID NO. 4322 or polypeptide shown in SEQ ID NO. 4323, respectively, or a homolog thereof. E.g. an increased tolerance to abiotic environmental stress, in particular increased intrinsic yield, compared to a corresponding non-modified, e.g. a non-transformed, wild type plant is conferred if the activity “FK506-binding protein” or if the activity of a nucleic acid molecule or a polypeptide comprising the nucleic acid or polypeptide or the consensus sequence or the polypeptide motif, depicted in table I, II or IV, column 7, respective same line as SEQ ID NO.: 4322 or SEQ ID NO.: 4323, respectively, is increased or generated in a plant or part thereof. Preferably, the increase occurs cytoplasmic. Particularly, an increase of yield from 1.1-fold to 1.164-fold, for example plus at least 100% thereof, under standard conditions, e.g. in the absence of nutrient deficiency and/or stress conditions is conferred compared to a corresponding control, e.g. an non-modified, e.g. non-transformed, wild type plant.

[0136] The transgenic plants of the present invention demonstrate increased intrinsic yield, as compared to a corresponding non-modified, e.g. a non-transformed, wild type plant is conferred if the activity of a polypeptide comprising the polypeptide shown in SEQ ID NO. 4779, or encoded by a nucleic acid molecule comprising the nucleic acid molecule shown in SEQ ID NO. 4778, or a homolog of said nucleic acid molecule or polypeptide, is increased or generated. For example, the activity of a corresponding nucleic acid molecule or a polypeptide derived from Saccharomyces cerevisiae is increased or generated, preferably comprising the nucleic acid molecule shown in SEQ ID NO. 4778 or polypeptide shown in SEQ ID NO. 4779, respectively, or a homolog thereof. E.g. an increased tolerance to abiotic environmental stress, in particular increased intrinsic yield, compared to a corresponding non-modified, e.g. a non-transformed, wild type plant is conferred if the activity “Autophagy-related protein” or if the activity of a nucleic acid molecule or a polypeptide comprising the nucleic acid or polypeptide or the consensus sequence or the polypeptide motif, depicted in table I, II or IV, column 7, respective same line as SEQ ID NO.: 4778 or SEQ ID NO.: 4779, respectively, is increased or generated in a plant or part thereof. Preferably, the increase occurs cytoplasmic. Particularly, an increase of yield from 1.1-fold to 1.399-fold, for example plus at least 100% thereof, under standard conditions, e.g. in the absence of nutrient deficiency and/or stress conditions is conferred compared to a corresponding control, e.g. an non-modified, e.g. non-transformed, wild type plant.

[0137] The transgenic plants of the present invention demonstrate increased intrinsic yield, as compared to a corresponding non-modified, e.g. a non-transformed, wild type plant is conferred if the activity of a polypeptide comprising the polypeptide shown in SEQ ID NO. 4805 or SEQ ID NO. 4837, or encoded by a nucleic acid molecule comprising the nucleic acid molecule shown in SEQ ID NO. 4804 or SEQ ID NO. 4836, or a homolog of said nucleic acid molecule or polypeptide, is increased or generated. For example, the activity of a corresponding nucleic acid molecule or a polypeptide derived from Arabidopsis thaliana is increased or generated, preferably comprising the nucleic acid molecule shown in SEQ ID NO. 4804 or 4836, or polypeptide shown in SEQ ID NO. 4805 or SEQ ID NO. 4837, respectively, or a homolog thereof. E.g. an increased tolerance to abiotic environmental stress, in particular increased intrinsic yield, compared to a corresponding non-modified, e.g. a non-transformed, wild type plant is conferred if the activity “Heat stress transcription factor” or if the activity of a nucleic acid molecule or a polypeptide comprising the nucleic acid or polypeptide or the consensus sequence or the polypeptide motif, depicted in table I, II or IV, column 7, respective same line as SEQ ID NO.: 4804 or SEQ ID NO. 4836 or SEQ ID NO.: 4805 or SEQ ID NO. 4837, respectively, is increased or generated in a plant or part thereof. Preferably, the increase occurs cytoplasmic. Particularly, an increase of yield from 1.1-fold to 1.217-fold, for example plus at least 100% thereof, under standard conditions, e.g. in the absence of nutrient deficiency and/or stress conditions is conferred compared to a corresponding control, e.g. an non-modified, e.g. non-transformed, wild type plant. In one example, a polynucleotide, e.g. a expression cassette comprising SEQ ID NO.: 4836, or encoding for SEQ ID NO. 4837, or a homolog thereof as described herein, e.g. having an identity of 70%, 80%, 90%, 95% 97%, or 99% to SEQ ID NO. 4836 or SEQ ID NO. 4837 is used as described herein.

[0138] The transgenic plants of the present invention demonstrate increased intrinsic yield, as compared to a corresponding non-modified, e.g. a non-transformed, wild type plant is conferred if the activity of a polypeptide comprising the polypeptide shown in SEQ ID NO. 4843, or encoded by a nucleic acid molecule comprising the nucleic acid molecule shown in SEQ ID NO. 4842, or a homolog of said nucleic acid molecule or polypeptide, is increased or generated. For example, the activity of a corresponding nucleic acid molecule or a polypeptide derived from Escherichia coli is increased or generated, preferably comprising the nucleic acid molecule shown in SEQ ID NO. 4842 or polypeptide shown in SEQ ID NO. 4843, respectively, or a homolog thereof. E.g. an increased tolerance to abiotic environmental stress, in particular increased intrinsic yield, compared to a corresponding non-modified, e.g. a non-transformed, wild type plant is conferred if the activity “B0050-protein” or if the activity of a nucleic acid molecule or a polypeptide comprising the nucleic acid or polypeptide or the consensus sequence or the polypeptide motif, depicted in table I, II or IV, column 7, respective same line as SEQ ID NO.: 4842 or SEQ ID NO.: 4843, respectively, is increased or generated in a plant or part thereof. Preferably, the increase occurs cytoplasmic. Particularly, an increase of yield from 1.1-fold to 1.134-fold, for example plus at least 100% thereof, under standard conditions, e.g. in the absence of nutrient deficiency and/or stress conditions is conferred compared to a corresponding control, e.g. an non-modified, e.g. non-transformed, wild type plant.

[0139] The transgenic plants of the present invention demonstrate increased intrinsic yield, as compared to a corresponding non-modified, e.g. a non-transformed, wild type plant is conferred if the activity of a polypeptide comprising the polypeptide shown in SEQ ID NO. 5242, or encoded by a nucleic acid molecule comprising the nucleic acid molecule shown in SEQ ID NO. 5241, or a homolog of said nucleic acid molecule or polypeptide, is increased or generated. For example, the activity of a corresponding nucleic acid molecule or a polypeptide derived from Glycine max is increased or generated, preferably comprising the nucleic acid molecule shown in SEQ ID NO. 5241 or polypeptide shown in SEQ ID NO. 5242, respectively, or a homolog thereof. E.g. an increased tolerance to abiotic environmental stress, in particular increased intrinsic yield, compared to a corresponding non-modified, e.g. a non-transformed, wild type plant is conferred if the activity “GM02LC38418-protein” or if the activity of a nucleic acid molecule or a polypeptide comprising the nucleic acid or polypeptide or the consensus sequence or the polypeptide motif, depicted in table I, II or IV, column 7, respective same line as SEQ ID NO.: 5241 or SEQ ID NO.: 5242, respectively, is increased or generated in a plant or part thereof. Preferably, the increase occurs cytoplasmic. Particularly, an increase of yield from 1.1-fold to 1.369-fold, for example plus at least 100% thereof, under standard conditions, e.g. in the absence of nutrient deficiency and/or stress conditions is conferred compared to a corresponding control, e.g. an non-modified, e.g. non-transformed, wild type plant.

[0140] The transgenic plants of the present invention demonstrate increased intrinsic yield, as compared to a corresponding non-modified, e.g. a non-transformed, wild type plant is conferred if the activity of a polypeptide comprising the polypeptide shown in SEQ ID NO. 5275, or encoded by a nucleic acid molecule comprising the nucleic acid molecule shown in SEQ ID NO. 5274, or a homolog of said nucleic acid molecule or polypeptide, is increased or generated. For example, the activity of a corresponding nucleic acid molecule or a polypeptide derived from Saccharomyces cerevisiae is increased or generated, preferably comprising the nucleic acid molecule shown in SEQ ID NO. 5274 or polypeptide shown in SEQ ID NO. 5275, respectively, or a homolog thereof. E.g. an increased tolerance to abiotic environmental stress, in particular increased intrinsic yield, compared to a corresponding non-modified, e.g. a non-transformed, wild type plant is conferred if the activity “26S proteasome-subunit” or if the activity of a nucleic acid molecule or a polypeptide comprising the nucleic acid or polypeptide or the consensus sequence or the polypeptide motif, depicted in table I, II or IV, column 7, respective same line as SEQ ID NO.: 5274 or SEQ ID NO.: 5275, respectively, is increased or generated in a plant or part thereof. Preferably, the increase occurs cytoplasmic. Particularly, an increase of yield from 1.1-fold to 1.215-fold, for example plus at least 100% thereof, under standard conditions, e.g. in the absence of nutrient deficiency and/or stress conditions is conferred compared to a corresponding control, e.g. an non-modified, e.g. non-transformed, wild type plant.

[0141] The transgenic plants of the present invention demonstrate increased intrinsic yield, as compared to a corresponding non-modified, e.g. a non-transformed, wild type plant is conferred if the activity of a polypeptide comprising the polypeptide shown in SEQ ID NO. 5975, or encoded by a nucleic acid molecule comprising the nucleic acid molecule shown in SEQ ID NO. 5974, or a homolog of said nucleic acid molecule or polypeptide, is increased or generated. For example, the activity of a corresponding nucleic acid molecule or a polypeptide derived from Saccharomyces cerevisiae is increased or generated, preferably comprising the nucleic acid molecule shown in SEQ ID NO. 5974 or polypeptide shown in SEQ ID NO. 5975, respectively, or a homolog thereof. E.g. an increased tolerance to abiotic environmental stress, in particular increased intrinsic yield, compared to a corresponding non-modified, e.g. a non-transformed, wild type plant is conferred if the activity “mitochondrial precursor of Lon protease homolog” or if the activity of a nucleic acid molecule or a polypeptide comprising the nucleic acid or polypeptide or the consensus sequence or the polypeptide motif, depicted in table I, II or IV, column 7, respective same line as SEQ ID NO.: 5974 or SEQ ID NO.: 5975, respectively, is increased or generated in a plant or part thereof. Preferably, the increase occurs cytoplasmic. Particularly, an increase of yield from 1.1-fold to 1.337-fold, for example plus at least 100% thereof, under standard conditions, e.g. in the absence of nutrient deficiency and/or stress conditions is conferred compared to a corresponding control, e.g. an non-modified, e.g. non-transformed, wild type plant.

[0142] The transgenic plants of the present invention demonstrate increased intrinsic yield, as compared to a corresponding non-modified, e.g. a non-transformed, wild type plant is conferred if the activity of a polypeptide comprising the polypeptide shown in SEQ ID NO. 6080, or encoded by a nucleic acid molecule comprising the nucleic acid molecule shown in SEQ ID NO. 6079, or a homolog of said nucleic acid molecule or polypeptide, is increased or generated. For example, the activity of a corresponding nucleic acid molecule or a polypeptide derived from Saccharomyces cerevisiae is increased or generated, preferably comprising the nucleic acid molecule shown in SEQ ID NO. 6079 or polypeptide shown in SEQ ID NO. 6080, respectively, or a homolog thereof. E.g. an increased tolerance to abiotic environmental stress, in particular increased intrinsic yield, compared to a corresponding non-modified, e.g. a non-transformed, wild type plant is conferred if the activity “Branched-chain amino acid permease” or if the activity of a nucleic acid molecule or a polypeptide comprising the nucleic acid or polypeptide or the consensus sequence or the polypeptide motif, depicted in table I, II or IV, column 7, respective same line as SEQ ID NO.: 6079 or SEQ ID NO.: 6080, respectively, is increased or generated in a plant or part thereof.

[0143] It was found that the increase occurs by cytoplasmic as well as plastidic expression of an expression cassette comprising the nucleic acid molecule as shown in SEQ ID No.: 3882. Preferably, the increase occurs cytoplasmic. Particularly, an increase of yield from 1.1-fold to 1.522-fold, for example plus at least 100% thereof, under standard conditions, e.g. in the absence of nutrient deficiency and/or stress conditions is conferred as result of a non-targeted expression of a nucleic acid molecule shown in SEQ ID NO. 6079 as compared to a corresponding control, e.g. an non-modified, e.g. non-transformed, wild type plant. Preferably, the increase occurs plastidic. Particularly, an increase of yield from 1.1-fold to 1.232-fold, for example plus at least 100% thereof, under standard conditions, e.g. in the absence of nutrient deficiency and/or stress conditions is conferred as result of a targeted expression of a nucleic acid molecule shown in SEQ ID NO. 6079 functionally linked to sequence encoding a transit peptide as compared to a corresponding control, e.g. an non-modified, e.g. non-transformed, wild type plant.

[0144] The transgenic plants of the present invention demonstrate increased intrinsic yield, as compared to a corresponding non-modified, e.g. a non-transformed, wild type plant is conferred if the activity of a polypeptide comprising the polypeptide shown in SEQ ID NO. 6146, or encoded by a nucleic acid molecule comprising the nucleic acid molecule shown in SEQ ID NO. 6145, or a homolog of said nucleic acid molecule or polypeptide, is increased or generated. For example, the activity of a corresponding nucleic acid molecule or a polypeptide derived from Saccharomyces cerevisiae is increased or generated, preferably comprising the nucleic acid molecule shown in SEQ ID NO. 6145 or polypeptide shown in SEQ ID NO. 6146, respectively, or a homolog thereof. E.g. an increased tolerance to abiotic environmental stress, in particular increased intrinsic yield, compared to a corresponding non-modified, e.g. a non-transformed, wild type plant is conferred if the activity “Mannan polymerase II complex subunit” or if the activity of a nucleic acid molecule or a polypeptide comprising the nucleic acid or polypeptide or the consensus sequence or the polypeptide motif, depicted in table I, II or IV, column 7, respective same line as SEQ ID NO.: 6145 or SEQ ID NO.: 6146, respectively, is increased or generated in a plant or part thereof. Preferably, the increase occurs cytoplasmic. Particularly, an increase of yield from 1.1-fold to 1.172-fold, for example plus at least 100% thereof, under standard conditions, e.g. in the absence of nutrient deficiency and/or stress conditions is conferred compared to a corresponding control, e.g. an non-modified, e.g. non-transformed, wild type plant.

[0145] The transgenic plants of the present invention demonstrate increased intrinsic yield, as compared to a corresponding non-modified, e.g. a non-transformed, wild type plant is conferred if the activity of a polypeptide comprising the polypeptide shown in SEQ ID NO. 5942, or encoded by a nucleic acid molecule comprising the nucleic acid molecule shown in SEQ ID NO. 5941, or a homolog of said nucleic acid molecule or polypeptide, is increased or generated. For example, the activity of a corresponding nucleic acid molecule or a polypeptide derived from Glycine max is increased or generated, preferably comprising the nucleic acid molecule shown in SEQ ID NO. 5941 or polypeptide shown in SEQ ID NO. 5942, respectively, or a homolog thereof. E.g. an increased tolerance to abiotic environmental stress, in particular increased intrinsic yield, compared to a corresponding non-modified, e.g. a non-transformed, wild type plant is conferred if the activity “GM02LC38418-protein” or if the activity of a nucleic acid molecule or a polypeptide comprising the nucleic acid or polypeptide or the consensus sequence or the polypeptide motif, depicted in table I, II or IV, column 7, respective same line as SEQ ID NO.: 5941 or SEQ ID NO.: 5942, respectively, is increased or generated in a plant or part thereof. Preferably, the increase occurs cytoplasmic. Particularly, an increase of yield from 1.1-fold to 1.369-fold, for example plus at least 100% thereof, under standard conditions, e.g. in the absence of nutrient deficiency and/or stress conditions is conferred compared to a corresponding control, e.g. an non-modified, e.g. non-transformed, wild type plant.

[0146] It was further observed that increasing or generating the activity of a gene shown in Table VIIIc, e.g. a nucleic acid molecule derived from the nucleic acid molecule shown in Table VIIIc in A. thaliana conferred increased stress tolerance, e.g. increased cycling drought tolerance, compared to the wild type control. Thus, in one embodiment, a nucleic acid molecule indicated in Table VIIIc or its homolog as indicated in Table I or the expression product is used in the method of the present invention to increase stress tolerance, e.g. increase cycling drought tolerance, of a plant compared to the wild type control.

[0147] A plant's tolerance to drought may be measured by monitoring any of the phenotypes described above in a field during a drought, or in a model system in a drought assay such as a cycling drought or water use efficiency assay. Experimental designs of cycling drought assays and water use efficiency assays are known, for example, as set forth in Example 1. Exemplary cycling drought and water use efficiency assays are set forth in Example 1 below. An increased drought tolerance may be demonstrated, for example, by survival of a transgenic corn, soy, oilseed rape, or cotton plant produced in accordance with the present invention under water-limiting conditions which would stunt or destroy a control plant of the respective species.

[0148] Water use efficiency (WUE) is a parameter often correlated with drought tolerance. An increase in biomass at low water availability may be due to relatively improved efficiency of growth or reduced water consumption. In selecting traits for improving crops, a decrease in water use, without a change in growth would have particular merit in an irrigated agricultural system where the water input costs were high. An increase in growth without a corresponding jump in water use would have applicability to all agricultural systems. In many agricultural systems where water supply is not limiting, an increase in growth, even if it came at the expense of an increase in water use also increases yield.

[0149] When soil water is depleted or if water is not available during periods of drought, crop yields are restricted. Plant water deficit develops if transpiration from leaves exceeds the supply of water from the roots. The available water supply is related to the amount of water held in the soil and the ability of the plant to reach that water with its root system. Transpiration of water from leaves is linked to the fixation of carbon dioxide by photosynthesis through the stomata. The two processes are positively correlated so that high carbon dioxide influx through photosynthesis is closely linked to water loss by transpiration. As water transpires from the leaf, leaf water potential is reduced and the stomata tend to close in a hydraulic process limiting the amount of photosynthesis. Since crop yield is dependent on the fixation of carbon dioxide in photosynthesis, water uptake and transpiration are contributing factors to crop yield. Plants which are able to use less water to fix the same amount of carbon dioxide or which are able to function normally at a lower water potential have the potential to conduct more photosynthesis and thereby to produce more biomass and economic yield in many agricultural systems.

[0150] For example, increased tolerance to drought conditions can be determined and quantified according to the following method: Transformed plants are grown individually in pots in a growth chamber (York Industriekälte GmbH, Mannheim, Germany). Germination is induced. In case the plants are Arabidopsis thaliana sown seeds are kept at 4° C., in the dark, for 3 days in order to induce germination. Subsequently conditions are changed for 3 days to 20° C./6° C. day/night temperature with a 16/8 h day-night cycle at 150 μE/m²s. Subsequently the plants are grown under standard growth conditions. In case the plants are Arabidopsis thaliana, the standard growth conditions are: photoperiod of 16 h light and 8 h dark, 20° C., 60% relative humidity, and a photon flux density of 200 μE. Plants are grown and cultured until they develop leaves. In case the plants are Arabidopsis thaliana they are watered daily until they were approximately 3 weeks old. Starting at that time drought was imposed by withholding water. After the non-transformed wild type plants show visual symptoms of injury, the evaluation starts and plants are scored for symptoms of drought symptoms and biomass production comparison to wild type and neighboring plants for 5-6 days in succession. The tolerance to drought, e.g. the tolerance to cycling drought can be determined according to the method described in the examples. The tolerance to drought can be a tolerance to cycling drought.

[0151] Accordingly, in one embodiment, the present invention relates to a method for increasing the yield, comprising the following steps:

(a) determining, whether the water supply in the area for planting is optimal or suboptimal for the growth of an origin or wild type plant, e.g. a crop, and/or determining the visual symptoms of injury of plants growing in the area for planting; and
(b1) growing the plant of the invention in said soil, if the water supply is suboptimal for the growth of an origin or wild type plant or visual symptoms for drought can be found at a standard, origin or wild type plant growing in the area; or
(b2) growing the plant of the invention in the soil and comparing the yield with the yield of a standard, an origin or a wild type plant and selecting and growing the plant, which shows a higher yield or the highest yield, if the water supply is optimal for the origin or wild type plant.

[0152] Visual symptoms of injury stating for one or any combination of two, three or more of the following features: wilting; leaf browning; loss of turgor, which results in drooping of leaves or needles stems, and flowers; drooping and/or shedding of leaves or needles; the leaves are green but leaf angled slightly toward the ground compared with controls; leaf blades begun to fold (curl) inward; premature senescence of leaves or needles; loss of chlorophyll in leaves or needles and/or yellowing.

[0153] The transgenic plants of the present invention demonstrate increased tolerance to abiotic environmental stress, in particular increased drought tolerance, compared to a corresponding non-modified, e.g. a non-transformed, wild type plant is conferred if the activity of a polypeptide comprising the polypeptide shown in SEQ ID NO. 3883, or encoded by a nucleic acid molecule comprising the nucleic acid molecule shown in SEQ ID NO. 3882, or a homolog of said nucleic acid molecule or polypeptide, is increased or generated. For example, the activity of a corresponding nucleic acid molecule or a polypeptide derived from Saccharomyces cerevisiae is increased or generated, preferably comprising the nucleic acid molecule shown in SEQ ID NO. 3882 or polypeptide shown in SEQ ID NO. 3883, respectively, or a homolog thereof. E.g. an increased tolerance to abiotic environmental stress, in particular increased cycling drought, compared to a corresponding non-modified, e.g. a non-transformed, wild type plant is conferred if the activity “Branched-chain amino acid permease” or if the activity of a nucleic acid molecule or a polypeptide comprising the nucleic acid or polypeptide or the consensus sequence or the polypeptide motif, depicted in table I, II or IV, column 7, respective same line as SEQ ID NO.: 3882 or SEQ ID NO.: 3883, respectively, is increased or generated in a plant or part thereof. Preferably, the increase occurs plastidic. Particularly, an increase of yield from 1.05-fold to 1.351-fold, for example plus at least 100% thereof, under standard conditions, e.g. under abiotic stress conditions, e.g. under drought conditions, in particular cycling drought conditions is conferred compared to a corresponding control, e.g. a non-modified, e.g. non-transformed, wild type plant.

[0154] The transgenic plants of the present invention demonstrate increased tolerance to abiotic environmental stress, in particular increased drought tolerance, compared to a corresponding non-modified, e.g. a non-transformed, wild type plant is conferred if the activity of a polypeptide comprising the polypeptide shown in SEQ ID NO. 6080, or encoded by a nucleic acid molecule comprising the nucleic acid molecule shown in SEQ ID NO. 6079, or a homolog of said nucleic acid molecule or polypeptide, is increased or generated. For example, the activity of a corresponding nucleic acid molecule or a polypeptide derived from Saccharomyces cerevisiae is increased or generated, preferably comprising the nucleic acid molecule shown in SEQ ID NO. 6079 or polypeptide shown in SEQ ID NO. 6080, respectively, or a homolog thereof. E.g. an increased tolerance to abiotic environmental stress, in particular increased cycling drought, compared to a corresponding non-modified, e.g. a non-transformed, wild type plant is conferred if the activity “Branched-chain amino acid permease” or if the activity of a nucleic acid molecule or a polypeptide comprising the nucleic acid or polypeptide or the consensus sequence or the polypeptide motif, depicted in table I, II or IV, column 7, respective same line as SEQ ID NO.: 6079 or SEQ ID NO.: 6080, respectively, is increased or generated in a plant or part thereof. Preferably, the increase occurs plastidic. Particularly, an increase of yield from 1.05-fold to 1.351-fold, for example plus at least 100% thereof, under standard conditions, e.g. under abiotic stress conditions, e.g. under drought conditions, in particular cycling drought conditions is conferred compared to a corresponding control, e.g. a non-modified, e.g. non-transformed, wild type plant.

[0155] Another yield-related phenotype is increased nutrient use efficiency. The genes identified in Table I, or homologs thereof, may be used to enhance nutrient use efficiency in transgenic plants. Such transgenic plants may demonstrate enhanced yield, as measured by any of the phenotypes described above, with current commercial levels of fertilizer application. Alternatively or additionally, transgenic plants with improved nutrient use efficiency may demonstrate equivalent yield or improved yield with reduced fertilizer input.

[0156] A particularly important nutrient for plants is nitrogen. In accordance with the invention, transgenic plants comprising a gene identified in Table I, or a homolog thereof, demonstrate increased nitrogen use efficiency (NUE), that is increased harvestable yield per unit of input nitrogen fertilizer. An increased nitrogen use efficiency may be determined by measuring any of the yield-related phenotypes described above, in plants which have been grown under conditions of controlled nitrogen soil concentrations, both in the field and in model systems. An exemplary nitrogen use efficiency assay is set forth in Example 1 below. An increased nitrogen use efficiency of a transgenic corn, soy, oilseed rape, or cotton plant in accordance with the present invention may be demonstrated, for example, by an improved or increased protein content of the respective seed, in particular in corn seed used as feed. Increased nitrogen use efficiency relates also to an increased kernel size or a higher kernel number per plant.

[0157] It was observed that increasing or generating the activity of a gene shown in Table VIIIa, e.g. a nucleic acid molecule derived from the nucleic acid molecule shown in Table VIIIa in A. thaliana conferred increased nutrient use efficiency, e.g. an increased the nitrogen use efficiency, compared with the wild type control. Thus, in one embodiment, a nucleic acid molecule indicated in Table VIIIa or its homolog as indicated in Table I or the expression product is used in the method of the present invention to increased nutrient use efficiency, e.g. to increased the nitrogen use efficiency, of the plant compared with the wild type control.

[0158] For example, enhanced nitrogen use efficiency of the plant can be determined and quantified according to the following method: Transformed plants are grown in pots in a growth chamber (Svalöf Weibull, Svalöv, Sweden). In case the plants are Arabidopsis thaliana seeds thereof are sown in pots containing a 1:1 (v:v) mixture of nutrient depleted soil (“Einheitserde Typ 0”, 30% clay, Tantau, Wansdorf Germany) and sand. Germination is induced by a four day period at 4° C., in the dark. Subsequently the plants are grown under standard growth conditions. In case the plants are Arabidopsis thaliana, the standard growth conditions are: photoperiod of 16 h light and 8 h dark, 20° C., 60% relative humidity, and a photon flux density of 200 μE. In case the plants are Arabidopsis thaliana they are watered every second day with a N-depleted nutrient solution and after 9 to 10 days the plants are individualized. After a total time of 29 to 31 days the plants are harvested and rated by the fresh weight of the aerial parts of the plants, preferably the rosettes.

[0159] The nitrogen use efficiency for example be determined according to the method described herein. Further, the present invention relates also to a method for increasing the yield, comprising the following steps: (a) measuring the nitrogen content in the soil, and (b) determining, whether the nitrogen-content in the soil is optimal or suboptimal for the growth of an origin or wild type plant, e.g. a crop, and (c1) growing the plant of the invention in said soil, if the nitrogen-content is suboptimal for the growth of the origin or wild type plant, or (c2) growing the plant of the invention in the soil and comparing the yield with the yield of a standard, an origin or a wild type plant, selecting and growing the plant, which shows higher or the highest yield, if the nitrogen-content is optimal for the origin or wild type plant.

[0160] Plants (over)expressing nitrogen use efficiency-improving genes can be used for the enhancement of yield of said plants and improve, e.g. reduce nitrogen fertilizer utilization or make it more efficient.

[0161] Accordingly, in a further embodiment, an increased nutrient use efficiency compared to a corresponding non-modified, e.g. a non-transformed, wild type plant is conferred if the activity of a polypeptide comprising the polypeptide shown in SEQ ID NO. 1959, or encoded by a nucleic acid molecule comprising the nucleic acid molecule shown in SEQ ID NO. 1958, or a homolog of said nucleic acid molecule or polypeptide, is increased or generated. For example, the activity of a corresponding nucleic acid molecule or a polypeptide derived from Escherichia coli is increased or generated, preferably comprising the nucleic acid molecule shown in SEQ ID NO. 1958 or polypeptide shown in SEQ ID NO. 1959, respectively, or a homolog thereof, e.g. a nucleic acid molecule which differs form said Seq ID No. 1958 by exchanging the stop codon TAA by TGA. E.g. an increased tolerance to abiotic environmental stress, in particular increased nutrient use efficiency as compared to a corresponding non-modified, e.g. a non-transformed, wild type plant cell, a plant or a part thereof is conferred if the activity “tellurite resistance protein or” if the activity of a nucleic acid molecule or a polypeptide comprising the nucleic acid or polypeptide or the consensus sequence or the polypeptide motif, as depicted in table I, II or IV, column 7 respective same line as SEQ ID NO. 1958 or SEQ ID NO. 1959, respectively, is increased or generated in a plant or part thereof. Preferably, the increase occurs cytoplasmic. Accordingly, in one embodiment an increased nitrogen use efficiency is conferred. Particularly, an increase of yield from 1.1-fold to 1.338-fold, for example plus at least 100% thereof, under conditions of nitrogen deficiency is conferred compared to a corresponding non-modified, e.g. non-transformed, wild type plant. The nucleic acid molecule can differ form said Seq ID No. 1958 by exchanging the stop codon TAA by TGA.

[0162] Generally, adaptation to low temperature may be divided into chilling tolerance, and freezing tolerance. Improved or enhanced “freezing tolerance” or variations thereof refers herein to improved adaptation to temperatures near or below zero, namely preferably temperatures 4° C. or below, more preferably 3° C. or 2° C. or below, and particularly preferred at or 0 (zero)° C. or −4° C. or below, or even extremely low temperatures down to −10° C. or lower; hereinafter called “freezing temperature”. Further, an increased tolerance to low temperature may be demonstrated, for example, by an early vigor and allows the early planting and sowing of a corn, soy, oilseed rape, or cotton plant produced according to the method of the present invention.

[0163] It was observed that increasing or generating the activity of a gene shown in Table VIIIb, e.g. a nucleic acid molecule derived from the nucleic acid molecule shown in Table VIII(b) in A. thaliana conferred increased stress tolerance, e.g. increased low temperature tolerance, compared to the wild type control. Thus, in one embodiment, a nucleic acid molecule indicated in Table VIII(b) or its homolog as indicated in Table I or the expression product is used in the method of the present invention to increase stress tolerance, e.g. increase low temperature, of a plant compared to the wild type control.

[0164] The ratios indicated above particularly refer to an increased yield actually measured as increase of biomass, especially as fresh weight biomass of aerial parts.

[0165] Enhanced tolerance to low temperature may, for example, be determined according to the following method: Transformed plants are grown in pots in a growth chamber (e.g. York, Mannheim, Germany). In case the plants are Arabidopsis thaliana seeds thereof are sown in pots containing a 3.5:1 (v:v) mixture of nutrient rich soil (GS90, Tantau, Wansdorf, Germany) and sand. Plants are grown under standard growth conditions. In case the plants are Arabidopsis thaliana, the standard growth conditions are: photoperiod of 16 h light and 8 h dark, 20° C., 60% relative humidity, and a photon flux density of 200 μmol/m²s. Plants are grown and cultured. In case the plants are Arabidopsis thaliana they are watered every second day. After 9 to 10 days the plants are individualized. Cold (e.g. chilling at 11-12° C.) is applied 14 days after sowing until the end of the experiment. After a total growth period of 29 to 31 days the plants are harvested and rated by the fresh weight of the aerial parts of the plants, in the case of Arabidopsis preferably the rosettes.

[0166] In a further embodiment, an increased tolerance to abiotic environmental stress, in particular increased low temperature tolerance, compared to a corresponding non-modified, e.g. a non-transformed, wild type plant is conferred if the activity of a polypeptide comprising the polypeptide shown in SEQ ID NO. 1959, or encoded by a nucleic acid molecule comprising the nucleic acid molecule shown in SEQ ID NO. 1958, or a homolog of said nucleic acid molecule or polypeptide, is increased or generated. For example, the activity of a corresponding nucleic acid molecule or a polypeptide derived from Escherichia coli is increased or generated, preferably comprising the nucleic acid molecule shown in SEQ ID NO. 1958 or polypeptide shown in SEQ ID NO. 1959, respectively, or a homolog thereof, e.g. a nucleic acid molecule which differs form said Seq ID No. 1958 by exchanging the stop codon TAA by TGA. E.g. an increased tolerance to abiotic environmental stress, in particular increased low temperature tolerance, compared to a corresponding non-modified, e.g. a non-transformed, wild type plant is conferred if the activity “tellurite resistance protein” or if the activity of a nucleic acid molecule or a polypeptide comprising the nucleic acid or polypeptide or the consensus sequence or the polypeptide motif, depicted in table I, II or IV, column 7, respective same line as SEQ ID NO.: 1958 or SEQ ID NO.: 1959, respectively, is increased or generated in a plant or part thereof. Preferably, the increase occurs cytoplasmic. Particularly, an increase of yield from 1.1-fold to 1.610-fold, for example plus at least 100% thereof, under conditions of low temperature is conferred compared to a corresponding non-modified, e.g. non-transformed, wild type plant. The nucleic acid molecule can differ form said Seq ID No. 1958 by exchanging the stop codon TAA by TGA. In a further embodiment, an increased tolerance to abiotic environmental stress, in particular increased low temperature tolerance, compared to a corresponding non-modified, e.g. a non-transformed, wild type plant is conferred if the activity of a polypeptide comprising the polypeptide shown in SEQ ID NO. 3883, or encoded by a nucleic acid molecule comprising the nucleic acid molecule shown in SEQ ID NO. 3882, or a homolog of said nucleic acid molecule or polypeptide, is increased or generated. For example, the activity of a corresponding nucleic acid molecule or a polypeptide derived from Saccharomyces cerevisiae is increased or generated, preferably comprising the nucleic acid molecule shown in SEQ ID NO. 3882 or polypeptide shown in SEQ ID NO. 3883, respectively, or a homolog thereof. E.g. an increased tolerance to abiotic environmental stress, in particular increased low temperature tolerance, compared to a corresponding non-modified, e.g. a non-transformed, wild type plant is conferred if the activity “Branched-chain amino acid permease” or if the activity of a nucleic acid molecule or a polypeptide comprising the nucleic acid or polypeptide or the consensus sequence or the polypeptide motif, depicted in table I, II or IV, column 7, respective same line as SEQ ID NO.: 3882 or SEQ ID NO.: 3883, respectively, is increased or generated in a plant or part thereof. Preferably, the increase occurs cytoplasmic. Particularly, an increase of yield from 1.1-fold to 1.206-fold, for example plus at least 100% thereof, under conditions of low temperature is conferred compared to a corresponding non-modified, e.g. non-transformed, wild type plant.

[0167] In a further embodiment, an increased tolerance to abiotic environmental stress, in particular increased low temperature tolerance, compared to a corresponding non-modified, e.g. a non-transformed, wild type plant is conferred if the activity of a polypeptide comprising the polypeptide shown in SEQ ID NO. 6080, or encoded by a nucleic acid molecule comprising the nucleic acid molecule shown in SEQ ID NO. 6079, or a homolog of said nucleic acid molecule or polypeptide, is increased or generated. For example, the activity of a corresponding nucleic acid molecule or a polypeptide derived from Saccharomyces cerevisiae is increased or generated, preferably comprising the nucleic acid molecule shown in SEQ ID NO. 6079 or polypeptide shown in SEQ ID NO. 6080, respectively, or a homolog thereof. E.g. an increased tolerance to abiotic environmental stress, in particular increased low temperature tolerance, compared to a corresponding non-modified, e.g. a non-transformed, wild type plant is conferred if the activity “Branched-chain amino acid permease” or if the activity of a nucleic acid molecule or a polypeptide comprising the nucleic acid or polypeptide or the consensus sequence or the polypeptide motif, depicted in table I, II or IV, column 7, respective same line as SEQ ID NO.: 6079 or SEQ ID NO.: 6080, respectively, is increased or generated in a plant or part thereof. Preferably, the increase occurs cytoplasmic. Particularly, an increase of yield from 1.1-fold to 1.206-fold, for example plus at least 100% thereof, under conditions of low temperature is conferred compared to a corresponding non-modified, e.g. non-transformed, wild type plant.

[0168] Surprisingly it was found, that the transgenic expression of the nucleic acid molecule of the invention derived from an organism indicated in column 4, in a plant such as A. thaliana, for example, conferred increased yield.

[0169] Accordingly, in one embodiment, an increased yield as compared to a correspondingly non-modified, e.g. a non-transformed, wild type plant is conferred according to method of the invention, by increasing or generating the activity of a polypeptide comprising the yield-related polypeptide shown in SEQ ID NO.: 23, or encoded by the yield-related nucleic acid molecule (or gene) comprising the nucleic acid shown in SEQ ID NO.: 22, or a homolog of said nucleic acid molecule or polypeptide, e.g. derived from Arabidopsis thaliana. Thus, in one embodiment, the activity “pyruvate kinase” or the activity of a nucleic acid molecule or a polypeptide comprising the nucleic acid or polypeptide or the consensus sequence or the polypeptide motif, depicted in table I, II or IV, column 7, respective same line as SEQ ID NO.: 22, or SEQ ID NO.: 23, respectively, is increased or generated in a plant cell, plant or part thereof. Preferably, the increase occurs plastidic.

[0170] Accordingly, in one embodiment, an increased yield as compared to a correspondingly non-modified, e.g. a non-transformed, wild type plant is conferred according to method of the invention, by increasing or generating the activity of a polypeptide comprising the yield-related polypeptide shown in SEQ ID NO.: 1031, or encoded by the yield-related nucleic acid molecule (or gene) comprising the nucleic acid shown in SEQ ID NO.: 1030, or a homolog of said nucleic acid molecule or polypeptide, e.g. derived from Azotobacter vinelandii. Thus, in one embodiment, the activity “505 ribosomal protein L36” or the activity of a nucleic acid molecule or a polypeptide comprising the nucleic acid or polypeptide or the consensus sequence or the polypeptide motif, depicted in table I, II or IV, column 7, respective same line as SEQ ID NO.: 1030, or SEQ ID NO.: 1031, respectively, is increased or generated in a plant cell, plant or part thereof. Preferably, the increase occurs cytoplasmic.

[0171] Accordingly, in one embodiment, an increased yield as compared to a correspondingly non-modified, e.g. a non-transformed, wild type plant is conferred according to method of the invention, by increasing or generating the activity of a polypeptide comprising the yield-related polypeptide shown in SEQ ID NO.: 1784, or encoded by the yield-related nucleic acid molecule (or gene) comprising the nucleic acid shown in SEQ ID NO.: 1783, or a homolog of said nucleic acid molecule or polypeptide, e.g. derived from Escherichia coli. Thus, in one embodiment, the activity “gamma-glutamyl-gamma-aminobutyrate hydrolase” or the activity of a nucleic acid molecule or a polypeptide comprising the nucleic acid or polypeptide or the consensus sequence or the polypeptide motif, depicted in table I, II or IV, column 7, respective same line as SEQ ID NO.: 1783, or SEQ ID NO.: 1784, respectively, is increased or generated in a plant cell, plant or part thereof. Preferably, the increase occurs cytoplasmic.

[0172] Accordingly, in one embodiment, an increased yield as compared to a correspondingly non-modified, e.g. a non-transformed, wild type plant is conferred according to method of the invention, by increasing or generating the activity of a polypeptide comprising the yield-related polypeptide shown in SEQ ID NO.: 1959, or encoded by the yield-related nucleic acid molecule (or gene) comprising the nucleic acid shown in SEQ ID NO.: 1958, or a homolog of said nucleic acid molecule or polypeptide, e.g. derived from Escherichia coli. Thus, in one embodiment, the activity “tellurite resistance protein” or the activity of a nucleic acid molecule or a polypeptide comprising the nucleic acid or polypeptide or the consensus sequence or the polypeptide motif, depicted in table I, II or IV, column 7, respective same line as SEQ ID NO.: 1958, or SEQ ID NO.: 1959, respectively, is increased or generated in a plant cell, plant or part thereof. Preferably, the increase occurs cytoplasmic.

[0173] Accordingly, in one embodiment, an increased yield as compared to a correspondingly non-modified, e.g. a non-transformed, wild type plant is conferred according to method of the invention, by increasing or generating the activity of a polypeptide comprising the yield-related polypeptide shown in SEQ ID NO.: 2022, or encoded by the yield-related nucleic acid molecule (or gene) comprising the nucleic acid shown in SEQ ID NO.: 2021, or a homolog of said nucleic acid molecule or polypeptide, e.g. derived from Escherichia coli. Thus, in one embodiment, the activity “carbon storage regulator” or the activity of a nucleic acid molecule or a polypeptide comprising the nucleic acid or polypeptide or the consensus sequence or the polypeptide motif, depicted in table I, II or IV, column 7, respective same line as SEQ ID NO.: 2021, or SEQ ID NO.: 2022, respectively, is increased or generated in a plant cell, plant or part thereof. Preferably, the increase occurs cytoplasmic.

[0174] Accordingly, in one embodiment, an increased yield as compared to a correspondingly non-modified, e.g. a non-transformed, wild type plant is conferred according to method of the invention, by increasing or generating the activity of a polypeptide comprising the yield-related polypeptide shown in SEQ ID NO.: 2375, or encoded by the yield-related nucleic acid molecule (or gene) comprising the nucleic acid shown in SEQ ID NO.: 2374, or a homolog of said nucleic acid molecule or polypeptide, e.g. derived from Escherichia coli. Thus, in one embodiment, the activity “Xanthine permease” or the activity of a nucleic acid molecule or a polypeptide comprising the nucleic acid or polypeptide or the consensus sequence or the polypeptide motif, depicted in table I, II or IV, column 7, respective same line as SEQ ID NO.: 2374, or SEQ ID NO.: 2375, respectively, is increased or generated in a plant cell, plant or part thereof. Preferably, the increase occurs cytoplasmic.

[0175] Accordingly, in one embodiment, an increased yield as compared to a correspondingly non-modified, e.g. a non-transformed, wild type plant is conferred according to method of the invention, by increasing or generating the activity of a polypeptide comprising the yield-related polypeptide shown in SEQ ID NO.: 2676, or encoded by the yield-related nucleic acid molecule (or gene) comprising the nucleic acid shown in SEQ ID NO.: 2675, or a homolog of said nucleic acid molecule or polypeptide, e.g. derived from Escherichia coli. Thus, in one embodiment, the activity “phosphate transporter subunit” or the activity of a nucleic acid molecule or a polypeptide comprising the nucleic acid or polypeptide or the consensus sequence or the polypeptide motif, depicted in table I, II or IV, column 7, respective same line as SEQ ID NO.: 2675, or SEQ ID NO.: 2676, respectively, is increased or generated in a plant cell, plant or part thereof. Preferably, the increase occurs cytoplasmic.

[0176] Accordingly, in one embodiment, an increased yield as compared to a correspondingly non-modified, e.g. a non-transformed, wild type plant is conferred according to method of the invention, by increasing or generating the activity of a polypeptide comprising the yield-related polypeptide shown in SEQ ID NO.: 3154, or encoded by the yield-related nucleic acid molecule (or gene) comprising the nucleic acid shown in SEQ ID NO.: 3153, or a homolog of said nucleic acid molecule or polypeptide, e.g. derived from Saccharomyces cerevisiae. Thus, in one embodiment, the activity “YAR047c-protein” or the activity of a nucleic acid molecule or a polypeptide comprising the nucleic acid or polypeptide or the consensus sequence or the polypeptide motif, depicted in table I, II or IV, column 7, respective same line as SEQ ID NO.: 3153, or SEQ ID NO.: 3154, respectively, is increased or generated in a plant cell, plant or part thereof. Preferably, the increase occurs plastidic.

[0177] Accordingly, in one embodiment, an increased yield as compared to a correspondingly non-modified, e.g. a non-transformed, wild type plant is conferred according to method of the invention, by increasing or generating the activity of a polypeptide comprising the yield-related polypeptide shown in SEQ ID NO.: 3158, or encoded by the yield-related nucleic acid molecule (or gene) comprising the nucleic acid shown in SEQ ID NO.: 3157, or a homolog of said nucleic acid molecule or polypeptide, e.g. derived from Saccharomyces cerevisiae. Thus, in one embodiment, the activity “mitochondrial precursor of Lon protease homolog” or the activity of a nucleic acid molecule or a polypeptide comprising the nucleic acid or polypeptide or the consensus sequence or the polypeptide motif, depicted in table I, II or IV, column 7, respective same line as SEQ ID NO.: 3157, or SEQ ID NO.: 3158, respectively, is increased or generated in a plant cell, plant or part thereof. Preferably, the increase occurs cytoplasmic.

[0178] Accordingly, in one embodiment, an increased yield as compared to a correspondingly non-modified, e.g. a non-transformed, wild type plant is conferred according to method of the invention, by increasing or generating the activity of a polypeptide comprising the yield-related polypeptide shown in SEQ ID NO.: 3269, or encoded by the yield-related nucleic acid molecule (or gene) comprising the nucleic acid shown in SEQ ID NO.: 3268, or a homolog of said nucleic acid molecule or polypeptide, e.g. derived from Saccharomyces cerevisiae, e.g. a nucleic acid molecule which differs form said Seq ID No. 3268 by exchanging the stop codon TAG by TAA. Thus, in one embodiment, the activity “Calmodulin” or the activity of a nucleic acid molecule or a polypeptide comprising the nucleic acid or polypeptide or the consensus sequence or the polypeptide motif, depicted in table I, II or IV, column 7, respective same line as SEQ ID NO.: 3268, or SEQ ID NO.: 3269, respectively, is increased or generated in a plant cell, plant or part thereof. Preferably, the increase occurs cytoplasmic. The nucleic acid molecule can differ form said Seq ID No. 3268 by exchanging the stop codon TAG by TAA.

[0179] Accordingly, in one embodiment, an increased yield as compared to a correspondingly non-modified, e.g. a non-transformed, wild type plant is conferred according to method of the invention, by increasing or generating the activity of a polypeptide comprising the yield-related polypeptide shown in SEQ ID NO.: 3883, or encoded by the yield-related nucleic acid molecule (or gene) comprising the nucleic acid shown in SEQ ID NO.: 3882, or a homolog of said nucleic acid molecule or polypeptide, e.g. derived from Saccharomyces cerevisiae. Thus, in one embodiment, the activity “Branched-chain amino acid permease” or the activity of a nucleic acid molecule or a polypeptide comprising the nucleic acid or polypeptide or the consensus sequence or the polypeptide motif, depicted in table I, II or IV, column 7, respective same line as SEQ ID NO.: 3882, or SEQ ID NO.: 3883, respectively, is increased or generated in a plant cell, plant or part thereof. It was found that the yield increase occurs by cytoplasmic as well as plastidic expression of an expression cassette comprising the nucleic acid molecule as shown in SEQ ID No.: 3882.

[0180] Accordingly, in one embodiment, an increased yield as compared to a correspondingly non-modified, e.g. a non-transformed, wild type plant is conferred according to method of the invention, by increasing or generating the activity of a polypeptide comprising the yield-related polypeptide shown in SEQ ID NO.: 3949, or encoded by the yield-related nucleic acid molecule (or gene) comprising the nucleic acid shown in SEQ ID NO.: 3948, or a homolog of said nucleic acid molecule or polypeptide, e.g. derived from Saccharomyces cerevisiae. Thus, in one embodiment, the activity “Mannan polymerase II complex subunit” or the activity of a nucleic acid molecule or a polypeptide comprising the nucleic acid or polypeptide or the consensus sequence or the polypeptide motif, depicted in table I, II or IV, column 7, respective same line as SEQ ID NO.: 3948, or SEQ ID NO.: 3949, respectively, is increased or generated in a plant cell, plant or part thereof. Preferably, the increase occurs cytoplasmic.

[0181] Accordingly, in one embodiment, an increased yield as compared to a correspondingly non-modified, e.g. a non-transformed, wild type plant is conferred according to method of the invention, by increasing or generating the activity of a polypeptide comprising the yield-related polypeptide shown in SEQ ID NO.: 3993, or encoded by the yield-related nucleic acid molecule (or gene) comprising the nucleic acid shown in SEQ ID NO.: 3992, or a homolog of said nucleic acid molecule or polypeptide, e.g. derived from Saccharomyces cerevisiae. Thus, in one embodiment, the activity “MutS protein homolog” or the activity of a nucleic acid molecule or a polypeptide comprising the nucleic acid or polypeptide or the consensus sequence or the polypeptide motif, depicted in table I, II or IV, column 7, respective same line as SEQ ID NO.: 3992, or SEQ ID NO.: 3993, respectively, is increased or generated in a plant cell, plant or part thereof. Preferably, the increase occurs cytoplasmic.

[0182] Accordingly, in one embodiment, an increased yield as compared to a correspondingly non-modified, e.g. a non-transformed, wild type plant is conferred according to method of the invention, by increasing or generating the activity of a polypeptide comprising the yield-related polypeptide shown in SEQ ID NO.: 4293, or encoded by the yield-related nucleic acid molecule (or gene) comprising the nucleic acid shown in SEQ ID NO.: 4292, or a homolog of said nucleic acid molecule or polypeptide, e.g. derived from Saccharomyces cerevisiae. Thus, in one embodiment, the activity “Protein EFR3” or the activity of a nucleic acid molecule or a polypeptide comprising the nucleic acid or polypeptide or the consensus sequence or the polypeptide motif, depicted in table I, II or IV, column 7, respective same line as SEQ ID NO.: 4292, or SEQ ID NO.: 4293, respectively, is increased or generated in a plant cell, plant or part thereof. Preferably, the increase occurs cytoplasmic.

[0183] Accordingly, in one embodiment, an increased yield as compared to a correspondingly non-modified, e.g. a non-transformed, wild type plant is conferred according to method of the invention, by increasing or generating the activity of a polypeptide comprising the yield-related polypeptide shown in SEQ ID NO.: 4323, or encoded by the yield-related nucleic acid molecule (or gene) comprising the nucleic acid shown in SEQ ID NO.: 4322, or a homolog of said nucleic acid molecule or polypeptide, e.g. derived from Saccharomyces cerevisiae. Thus, in one embodiment, the activity “FK506-binding protein” or the activity of a nucleic acid molecule or a polypeptide comprising the nucleic acid or polypeptide or the consensus sequence or the polypeptide motif, depicted in table I, II or IV, column 7, respective same line as SEQ ID NO.: 4322, or SEQ ID NO.: 4323, respectively, is increased or generated in a plant cell, plant or part thereof. Preferably, the increase occurs cytoplasmic.

[0184] Accordingly, in one embodiment, an increased yield as compared to a correspondingly non-modified, e.g. a non-transformed, wild type plant is conferred according to method of the invention, by increasing or generating the activity of a polypeptide comprising the yield-related polypeptide shown in SEQ ID NO.: 4779, or encoded by the yield-related nucleic acid molecule (or gene) comprising the nucleic acid shown in SEQ ID NO.: 4778, or a homolog of said nucleic acid molecule or polypeptide, e.g. derived from Saccharomyces cerevisiae. Thus, in one embodiment, the activity “Autophagy-related protein” or the activity of a nucleic acid molecule or a polypeptide comprising the nucleic acid or polypeptide or the consensus sequence or the polypeptide motif, depicted in table I, II or IV, column 7, respective same line as SEQ ID NO.: 4778, or SEQ ID NO.: 4779, respectively, is increased or generated in a plant cell, plant or part thereof. Preferably, the increase occurs cytoplasmic.

[0185] Accordingly, in one embodiment, an increased yield as compared to a correspondingly non-modified, e.g. a non-transformed, wild type plant is conferred according to method of the invention, by increasing or generating the activity of a polypeptide comprising the yield-related polypeptide shown in SEQ ID NO.: 4805 or SEQ ID NO. 4837, or encoded by the yield-related nucleic acid molecule (or gene) comprising the nucleic acid shown in SEQ ID NO.: 4804 or SEQ ID NO. 4836, or a homolog of said nucleic acid molecule or polypeptide, e.g. derived from Arabidopsis thaliana. Thus, in one embodiment, the activity “Heat stress transcription factor” or the activity of a nucleic acid molecule or a polypeptide comprising the nucleic acid or polypeptide or the consensus sequence or the polypeptide motif, depicted in table I, II or IV, column 7, respective same line as SEQ ID NO.: 4804 or SEQ ID NO. 4836, or SEQ ID NO.: 4805 or SEQ ID NO. 4837, respectively, is increased or generated in a plant cell, plant or part thereof. Preferably, the increase occurs cytoplasmic.

[0186] Accordingly, in one embodiment, an increased yield as compared to a correspondingly non-modified, e.g. a non-transformed, wild type plant is conferred according to method of the invention, by increasing or generating the activity of a polypeptide comprising the yield-related polypeptide shown in SEQ ID NO.: 4843, or encoded by the yield-related nucleic acid molecule (or gene) comprising the nucleic acid shown in SEQ ID NO.: 4842, or a homolog of said nucleic acid molecule or polypeptide, e.g. derived from Escherichia coli. Thus, in one embodiment, the activity “B0050-protein” or the activity of a nucleic acid molecule or a polypeptide comprising the nucleic acid or polypeptide or the consensus sequence or the polypeptide motif, depicted in table I, II or IV, column 7, respective same line as SEQ ID NO.: 4842, or SEQ ID NO.: 4843, respectively, is increased or generated in a plant cell, plant or part thereof. Preferably, the increase occurs cytoplasmic.

[0187] Accordingly, in one embodiment, an increased yield as compared to a correspondingly non-modified, e.g. a non-transformed, wild type plant is conferred according to method of the invention, by increasing or generating the activity of a polypeptide comprising the yield-related polypeptide shown in SEQ ID NO.: 5242, or encoded by the yield-related nucleic acid molecule (or gene) comprising the nucleic acid shown in SEQ ID NO.: 5241, or a homolog of said nucleic acid molecule or polypeptide, e.g. derived from Glycine max. Thus, in one embodiment, the activity “GM02LC38418-protein” or the activity of a nucleic acid molecule or a polypeptide comprising the nucleic acid or polypeptide or the consensus sequence or the polypeptide motif, depicted in table I, II or IV, column 7, respective same line as SEQ ID NO.: 5241, or SEQ ID NO.: 5242, respectively, is increased or generated in a plant cell, plant or part thereof. Preferably, the increase occurs cytoplasmic.

[0188] Accordingly, in one embodiment, an increased yield as compared to a correspondingly non-modified, e.g. a non-transformed, wild type plant is conferred according to method of the invention, by increasing or generating the activity of a polypeptide comprising the yield-related polypeptide shown in SEQ ID NO.: 5275, or encoded by the yield-related nucleic acid molecule (or gene) comprising the nucleic acid shown in SEQ ID NO.: 5274, or a homolog of said nucleic acid molecule or polypeptide, e.g. derived from Saccharomyces cerevisiae. Thus, in one embodiment, the activity “26S proteasome-subunit” or the activity of a nucleic acid molecule or a polypeptide comprising the nucleic acid or polypeptide or the consensus sequence or the polypeptide motif, depicted in table I, II or IV, column 7, respective same line as SEQ ID NO.: 5274, or SEQ ID NO.: 5275, respectively, is increased or generated in a plant cell, plant or part thereof. Preferably, the increase occurs cytoplasmic.

[0189] Accordingly, in one embodiment, an increased yield as compared to a correspondingly non-modified, e.g. a non-transformed, wild type plant is conferred according to method of the invention, by increasing or generating the activity of a polypeptide comprising the yield-related polypeptide shown in SEQ ID NO.: 5975, or encoded by the yield-related nucleic acid molecule (or gene) comprising the nucleic acid shown in SEQ ID NO.: 5974, or a homolog of said nucleic acid molecule or polypeptide, e.g. derived from Saccharomyces cerevisiae. Thus, in one embodiment, the activity “mitochondrial precursor of Lon protease homolog” or the activity of a nucleic acid molecule or a polypeptide comprising the nucleic acid or polypeptide or the consensus sequence or the polypeptide motif, depicted in table I, II or IV, column 7, respective same line as SEQ ID NO.: 5974, or SEQ ID NO.: 5975, respectively, is increased or generated in a plant cell, plant or part thereof. Preferably, the increase occurs cytoplasmic.

[0190] Accordingly, in one embodiment, an increased yield as compared to a correspondingly non-modified, e.g. a non-transformed, wild type plant is conferred according to method of the invention, by increasing or generating the activity of a polypeptide comprising the yield-related polypeptide shown in SEQ ID NO.: 6080, or encoded by the yield-related nucleic acid molecule (or gene) comprising the nucleic acid shown in SEQ ID NO.: 6079, or a homolog of said nucleic acid molecule or polypeptide, e.g. derived from Saccharomyces cerevisiae. Thus, in one embodiment, the activity “Branched-chain amino acid permease” or the activity of a nucleic acid molecule or a polypeptide comprising the nucleic acid or polypeptide or the consensus sequence or the polypeptide motif, depicted in table I, II or IV, column 7, respective same line as SEQ ID NO.: 6079, or SEQ ID NO.: 6080, respectively, is increased or generated in a plant cell, plant or part thereof. It was found that the yield increase occurs by cytoplasmic as well as plastidic expression of an expression cassette comprising the nucleic acid molecule as shown in SEQ ID No.: 6079.

[0191] Accordingly, in one embodiment, an increased yield as compared to a correspondingly non-modified, e.g. a non-transformed, wild type plant is conferred according to method of the invention, by increasing or generating the activity of a polypeptide comprising the yield-related polypeptide shown in SEQ ID NO.: 6146, or encoded by the yield-related nucleic acid molecule (or gene) comprising the nucleic acid shown in SEQ ID NO.: 6145, or a homolog of said nucleic acid molecule or polypeptide, e.g. derived from Saccharomyces cerevisiae. Thus, in one embodiment, the activity “Mannan polymerase II complex subunit” or the activity of a nucleic acid molecule or a polypeptide comprising the nucleic acid or polypeptide or the consensus sequence or the polypeptide motif, depicted in table I, II or IV, column 7, respective same line as SEQ ID NO.: 6145, or SEQ ID NO.: 6146, respectively, is increased or generated in a plant cell, plant or part thereof. Preferably, the increase occurs cytoplasmic.

[0192] Accordingly, in one embodiment, an increased yield as compared to a correspondingly non-modified, e.g. a non-transformed, wild type plant is conferred according to method of the invention, by increasing or generating the activity of a polypeptide comprising the yield-related polypeptide shown in SEQ ID NO.: 5942, or encoded by the yield-related nucleic acid molecule (or gene) comprising the nucleic acid shown in SEQ ID NO.: 5941, or a homolog of said nucleic acid molecule or polypeptide, e.g. derived from Glycine max. Thus, in one embodiment, the activity “GM02LC38418-protein” or the activity of a nucleic acid molecule or a polypeptide comprising the nucleic acid or polypeptide or the consensus sequence or the polypeptide motif, depicted in table I, II or IV, column 7, respective same line as SEQ ID NO.: 5941, or SEQ ID NO.: 5942, respectively, is increased or generated in a plant cell, plant or part thereof. Preferably, the increase occurs cytoplasmic.

[0193] Thus, in one embodiment, the present invention provides a method for producing a plant showing increased or improved yield as compared to the corresponding origin or wild type plant, by increasing or generating one or more activities selected from the group consisting of 26S proteasome-subunit, 50S ribosomal protein L36, Autophagy-related protein, B0050-protein, Branched-chain amino acid permease, Calmodulin, carbon storage regulator, FK506-binding protein, gamma-glutamyl-gamma-aminobutyrate hydrolase, GM02LC38418-protein, Heat stress transcription factor, Mannan polymerase II complex subunit, mitochondrial precursor of Lon protease homolog, MutS protein homolog, phosphate transporter subunit, Protein EFR3, pyruvate kinase, tellurite resistance protein, Xanthine permease, and YAR047c-protein, e.g. which is conferred by one or more polynucleotide(s) selected from the group as shown in table I, column 5 or 7 or by one or more protein(s), each comprising a polypeptide encoded by one or more nucleic acid sequence(s) selected from the group as shown in table I, column 5 or 7, or by one or more protein(s) each comprising a polypeptide selected from the group as depicted in table II, column 5 and 7, or a protein having a sequence corresponding to the consensus sequence shown in table IV, column 7 in the and (b) optionally, growing the plant cell, plant or part thereof under conditions which permit the development of the plant cell, the plant or the part thereof, and (c) regenerating a plant with increased yield, e.g. with an increased yield-related trait, for example enhanced tolerance to abiotic environmental stress, for example an increased drought tolerance and/or low temperature tolerance and/or an increased nutrient use efficiency, intrinsic yield and/or another increased yield-related trait as compared to a corresponding, e.g. non-transformed, wild type plant or a part thereof.

[0194] Accordingly, in one further embodiment, the said method for producing a plant or a part thereof for the regeneration of said plant, the plant showing an increased yield, said method comprises (i) growing the plant or part thereof together with a, e.g. non-transformed, wild type plant under conditions of abiotic environmental stress or deficiency; and (ii) selecting a plant with increased yield as compared to a corresponding, e.g. non-transformed, wild type plant, for example after the, e.g. non-transformed, wild type plant shows visual symptoms of deficiency and/or death.

[0195] Further, the present invention relates to a method for producing a plant with increased yield as compared to a corresponding origin or wild type plant, e.g. a transgenic plant, which comprises: (a) increasing or generating, in a plant cell nucleus, a plant cell, a plant or a part thereof, one or more activities selected from the group consisting of 26S proteasome-subunit, 50S ribosomal protein L36, Autophagy-related protein, B0050-protein, Branched-chain amino acid permease, Calmodulin, carbon storage regulator, FK506-binding protein, gammaglutamyl-gamma-aminobutyrate hydrolase, GM02LC38418-protein, Heat stress transcription factor, Mannan polymerase II complex subunit, mitochondrial precursor of Lon protease homolog, MutS protein homolog, phosphate transporter subunit, Protein EFR3, pyruvate kinase, tellurite resistance protein, Xanthine permease, and YAR047c-protein, e.g. by the methods mentioned herein; and (b) cultivating or growing the plant cell, the plant or the part thereof under conditions which permit the development of the plant cell, the plant or the part thereof; and (c) recovering a plant from said plant cell nucleus, said plant cell, or said plant part, which shows increased yield as compared to a corresponding, e.g. non-transformed, origin or wild type plant; and (d) optionally, selecting the plant or a part thereof, showing increased yield, for example showing an increased or improved yield-related trait, e.g. an improved nutrient use efficiency and/or abiotic stress resistance, as compared to a corresponding, e.g. non-transformed, wild type plant cell, e.g. which shows visual symptoms of deficiency and/or death.

[0196] Furthermore, the present invention also relates to a method for the identification of a plant with an increased yield comprising screening a population of one or more plant cell nuclei, plant cells, plant tissues or plants or parts thereof for said “activity”, comparing the level of activity with the activity level in a reference; identifying one or more plant cell nuclei, plant cells, plant tissues or plants or parts thereof with the activity increased compared to the reference, optionally producing a plant from the identified plant cell nuclei, cell or tissue.

[0197] In one further embodiment, the present invention also relates to a method for the identification of a plant with an increased yield comprising screening a population of one or more plant cell nuclei, plant cells, plant tissues or plants or parts thereof for the expression level of an nucleic acid coding for an polypeptide conferring said activity, comparing the level of expression with a reference; identifying one or more plant cell nuclei, plant cells, plant tissues or plants or parts thereof with the expression level increased compared to the reference, optionally producing a plant from the identified plant cell nuclei, cell or tissue.

[0198] Accordingly, in a preferred embodiment, the present invention provides a method for producing a transgenic cell for the regeneration or production of a plant with increased yield, e.g. tolerance to abiotic environmental stress and/or another increased yield-related trait, as compared to a corresponding, e.g. non-transformed, wild type cell by increasing or generating one or more activities selected from the group consisting of 26S proteasome-subunit, 50S ribosomal protein L36, Autophagy-related protein, B0050-protein, Branched-chain amino acid permease, Calmodulin, carbon storage regulator, FK506-binding protein, gamma-glutamyl-gamma-aminobutyrate hydrolase, GM02LC38418-protein, Heat stress transcription factor, Mannan polymerase II complex subunit, mitochondrial precursor of Lon protease homolog, MutS protein homolog, phosphate transporter subunit, Protein EFR3, pyruvate kinase, tellurite resistance protein, Xanthine permease, and YAR047c-protein. The cell can be for example a host cell, e.g. a transgenic host cell. A host cell can be for example a microorganism, e.g. derived from fungi or bacteria, or a plant cell particular useful for transformation. Furthermore, in one embodiment, the present invention provides a transgenic plant showing one or more increased yield-related trait as compared to the corresponding, e.g. non-transformed, origin or wild type plant cell or plant, having an increased or newly generated one or more “activities” selected from the above mentioned group of “activities” in the sub-cellular compartment and tissue indicated herein of said plant.

[0199] In one embodiment the increase in activity of the polypeptide amounts in an organelle such as a plastid. In another embodiment the increase in activity of the polypeptide amounts in the cytoplasm.

[0200] The specific activity of a polypeptide encoded by a nucleic acid molecule of the present invention or of the polypeptide of the present invention can be tested as described in the examples. In particular, the expression of a protein in question in a cell, e.g. a plant cell in comparison to a control is an easy test and can be performed as described in the state of the art.

[0201] The sequence of AT5G63680 from Arabidopsis thaliana, e.g. as shown in column 5 of table I, is published: sequences from S. cerevisiae have been published in Goffeau et al., Science 274 (5287), 546 (1996), sequences from E. coli have been published in Blattner et al., Science 277 (5331), 1453 (1997). Its activity is described as pyruvate kinase. Accordingly, in one embodiment, the process of the present invention for producing a plant with increased yield comprises increasing or generating the activity of a gene product conferring the activity “pyruvate kinase” from Arabidopsis thaliana or its functional equivalent or its homolog, e.g. the increase of

(a) a gene product of a gene comprising the nucleic acid molecule as shown in column 5 of table I, and being depicted in the same respective line as said AT5G63680 or a functional equivalent or a homologue thereof as shown depicted in column 7 of table I, preferably a homologue or functional equivalent as shown depicted in column 7 of table I B, and being depicted in the same respective line as said AT5G63680, e.g. plastidic; or
(b) a polypeptide comprising a polypeptide, a consensus sequence or a polypeptide motif as shown depicted in column 5 of table II or column 7 of table IV, and being depicted in the same respective line as said AT5G63680 or a functional equivalent or a homologue thereof as depicted in column 7 of table II, preferably a homologue or functional equivalent as depicted in column 7 of table II B, and being depicted in the same respective line as said AT5G63680, e.g. plastidic.

[0202] The sequence of AVINDRAFT_{—}2380 from Azotobacter vinelandii, e.g. as shown in column 5 of table I, is published: sequences from S. cerevisiae have been published in Goffeau et al., Science 274 (5287), 546 (1996), sequences from E. coli have been published in Blattner et al., Science 277 (5331), 1453 (1997). Its activity is described as 50S ribosomal protein L36. Accordingly, in one embodiment, the process of the present invention for producing a plant with increased yield comprises increasing or generating the activity of a gene product conferring the activity “50S ribosomal protein L36” from Azotobacter vinelandii or its functional equivalent or its homolog, e.g. the increase of

(a) a gene product of a gene comprising the nucleic acid molecule as shown in column 5 of table I, and being depicted in the same respective line as said AVINDRAFT_{—}2380 or a functional equivalent or a homologue thereof as shown depicted in column 7 of table I, preferably a homologue or functional equivalent as shown depicted in column 7 of table I B, and being depicted in the same respective line as said AVINDRAFT_{—}2380, e.g. cytoplasmic; or
(b) a polypeptide comprising a polypeptide, a consensus sequence or a polypeptide motif as shown depicted in column 5 of table II or column 7 of table IV, and being depicted in the same respective line as said AVINDRAFT_{—}2380 or a functional equivalent or a homologue thereof as depicted in column 7 of table II, preferably a homologue or functional equivalent as depicted in column 7 of table II B, and being depicted in the same respective line as said AVINDRAFT_{—}2380, e.g. cytoplasmic.

[0203] The sequence of B1298 from Escherichia coli, e.g. as shown in column 5 of table I, is published: sequences from S. cerevisiae have been published in Goffeau et al., Science 274 (5287), 546 (1996), sequences from E. coli have been published in Blattner et al., Science 277 (5331), 1453 (1997). Its activity is described as gamma-glutamyl-gamma-aminobutyrate hydrolase.

[0204] Accordingly, in one embodiment, the process of the present invention for producing a plant with increased yield comprises increasing or generating the activity of a gene product conferring the activity “gamma-glutamyl-gamma-aminobutyrate hydrolase” from Escherichia coli or its functional equivalent or its homolog, e.g. the increase of

(a) a gene product of a gene comprising the nucleic acid molecule as shown in column 5 of table I, and being depicted in the same respective line as said B1298 or a functional equivalent or a homologue thereof as shown depicted in column 7 of table I, preferably a homologue or functional equivalent as shown depicted in column 7 of table I B, and being depicted in the same respective line as said B1298, e.g. cytoplasmic; or
(b) a polypeptide comprising a polypeptide, a consensus sequence or a polypeptide motif as shown depicted in column 5 of table II or column 7 of table IV, and being depicted in the same respective line as said B1298 or a functional equivalent or a homologue thereof as depicted in column 7 of table II, preferably a homologue or functional equivalent as depicted in column 7 of table II B, and being depicted in the same respective line as said B1298, e.g. cytoplasmic.

[0205] The sequence of B1430 from Escherichia coli, e.g. as shown in column 5 of table I, is published: sequences from S. cerevisiae have been published in Goffeau et al., Science 274 (5287), 546 (1996), sequences from E. coli have been published in Blattner et al., Science 277 (5331), 1453 (1997). Its activity is described as tellurite resistance protein. Accordingly, in one embodiment, the process of the present invention for producing a plant with increased yield comprises increasing or generating the activity of a gene product conferring the activity “tellurite resistance protein” from Escherichia coli or its functional equivalent or its homolog, e.g. the increase of

(a) a gene product of a gene comprising the nucleic acid molecule as shown in column 5 of table I, and being depicted in the same respective line as said B1430 or a functional equivalent or a homologue thereof as shown depicted in column 7 of table I, preferably a homologue or functional equivalent as shown depicted in column 7 of table I B, and being depicted in the same respective line as said B1430, e.g. cytoplasmic; or
(b) a polypeptide comprising a polypeptide, a consensus sequence or a polypeptide motif as shown depicted in column 5 of table II or column 7 of table IV, and being depicted in the same respective line as said B1430 or a functional equivalent or a homologue thereof as depicted in column 7 of table II, preferably a homologue or functional equivalent as depicted in column 7 of table II B, and being depicted in the same respective line as said B1430, e.g. cytoplasmic.

[0206] The sequence of B2696 from Escherichia coli, e.g. as shown in column 5 of table I, is published: sequences from S. cerevisiae have been published in Goffeau et al., Science 274 (5287), 546 (1996), sequences from E. coli have been published in Blattner et al., Science 277 (5331), 1453 (1997). Its activity is described as carbon storage regulator. Accordingly, in one embodiment, the process of the present invention for producing a plant with increased yield comprises increasing or generating the activity of a gene product conferring the activity “carbon storage regulator” from Escherichia coli or its functional equivalent or its homolog, e.g. the increase of

(a) a gene product of a gene comprising the nucleic acid molecule as shown in column 5 of table I, and being depicted in the same respective line as said B2696 or a functional equivalent or a homologue thereof as shown depicted in column 7 of table I, preferably a homologue or functional equivalent as shown depicted in column 7 of table I B, and being depicted in the same respective line as said B2696, e.g. cytoplasmic; or
(b) a polypeptide comprising a polypeptide, a consensus sequence or a polypeptide motif as shown depicted in column 5 of table II or column 7 of table IV, and being depicted in the same respective line as said B2696 or a functional equivalent or a homologue thereof as depicted in column 7 of table II, preferably a homologue or functional equivalent as depicted in column 7 of table II B, and being depicted in the same respective line as said B2696, e.g. cytoplasmic.

[0207] The sequence of B2882 from Escherichia coli, e.g. as shown in column 5 of table I, is published: sequences from S. cerevisiae have been published in Goffeau et al., Science 274 (5287), 546 (1996), sequences from E. coli have been published in Blattner et al., Science 277 (5331), 1453 (1997). Its activity is described as Xanthine permease.

[0208] Accordingly, in one embodiment, the process of the present invention for producing a plant with increased yield comprises increasing or generating the activity of a gene product conferring the activity “Xanthine permease” from Escherichia coli or its functional equivalent or its homolog, e.g. the increase of

(a) a gene product of a gene comprising the nucleic acid molecule as shown in column 5 of table I, and being depicted in the same respective line as said B2882 or a functional equivalent or a homologue thereof as shown depicted in column 7 of table I, preferably a homologue or functional equivalent as shown depicted in column 7 of table I B, and being depicted in the same respective line as said B2882, e.g. cytoplasmic; or
(b) a polypeptide comprising a polypeptide, a consensus sequence or a polypeptide motif as shown depicted in column 5 of table II or column 7 of table IV, and being depicted in the same respective line as said B2882 or a functional equivalent or a homologue thereof as depicted in column 7 of table II, preferably a homologue or functional equivalent as depicted in column 7 of table II B, and being depicted in the same respective line as said B2882, e.g. cytoplasmic.

[0209] The sequence of B3728 from Escherichia coli, e.g. as shown in column 5 of table I, is published: sequences from S. cerevisiae have been published in Goffeau et al., Science 274 (5287), 546 (1996), sequences from E. coli have been published in Blattner et al., Science 277 (5331), 1453 (1997). Its activity is described as phosphate transporter subunit.

[0210] Accordingly, in one embodiment, the process of the present invention for producing a plant with increased yield comprises increasing or generating the activity of a gene product conferring the activity “phosphate transporter subunit” from Escherichia coli or its functional equivalent or its homolog, e.g. the increase of

(a) a gene product of a gene comprising the nucleic acid molecule as shown in column 5 of table I, and being depicted in the same respective line as said B3728 or a functional equivalent or a homologue thereof as shown depicted in column 7 of table I, preferably a homologue or functional equivalent as shown depicted in column 7 of table I B, and being depicted in the same respective line as said B3728, e.g. cytoplasmic; or
(b) a polypeptide comprising a polypeptide, a consensus sequence or a polypeptide motif as shown depicted in column 5 of table II or column 7 of table IV, and being depicted in the same respective line as said B3728 or a functional equivalent or a homologue thereof as depicted in column 7 of table II, preferably a homologue or functional equivalent as depicted in column 7 of table II B, and being depicted in the same respective line as said B3728, e.g. cytoplasmic.

[0211] The sequence of YAR047c from Saccharomyces cerevisiae, e.g. as shown in column 5 of table I, is published: sequences from S. cerevisiae have been published in Goffeau et al., Science 274 (5287), 546 (1996), sequences from E. coli have been published in Blattner et al., Science 277 (5331), 1453 (1997). Its activity is described as YAR047c-protein.

[0212] Accordingly, in one embodiment, the process of the present invention for producing a plant with increased yield comprises increasing or generating the activity of a gene product conferring the activity “YAR047c-protein” from Saccharomyces cerevisiae or its functional equivalent or its homolog, e.g. the increase of

(a) a gene product of a gene comprising the nucleic acid molecule as shown in column 5 of table I, and being depicted in the same respective line as said YAR047c or a functional equivalent or a homologue thereof as shown depicted in column 7 of table I, preferably a homologue or functional equivalent as shown depicted in column 7 of table I B, and being depicted in the same respective line as said YAR047c, e.g. plastidic; or
(b) a polypeptide comprising a polypeptide, a consensus sequence or a polypeptide motif as shown depicted in column 5 of table II or column 7 of table IV, and being depicted in the same respective line as said YAR047c or a functional equivalent or a homologue thereof as depicted in column 7 of table II, preferably a homologue or functional equivalent as depicted in column 7 of table II B, and being depicted in the same respective line as said YAR047c, e.g. plastidic.

[0213] The sequence of YBL022C from Saccharomyces cerevisiae, e.g. as shown in column 5 of table I, is published: sequences from S. cerevisiae have been published in Goffeau et al., Science 274 (5287), 546 (1996), sequences from E. coli have been published in Blattner et al., Science 277 (5331), 1453 (1997). Its activity is described as mitochondrial precursor of Lon protease homolog.

[0214] Accordingly, in one embodiment, the process of the present invention for producing a plant with increased yield comprises increasing or generating the activity of a gene product conferring the activity “mitochondrial precursor of Lon protease homolog” from Saccharomyces cerevisiae or its functional equivalent or its homolog, e.g. the increase of

(a) a gene product of a gene comprising the nucleic acid molecule as shown in column 5 of table I, and being depicted in the same respective line as said YBL022C or a functional equivalent or a homologue thereof as shown depicted in column 7 of table I, preferably a homologue or functional equivalent as shown depicted in column 7 of table I B, and being depicted in the same respective line as said YBL022C, e.g. cytoplasmic; or
(b) a polypeptide comprising a polypeptide, a consensus sequence or a polypeptide motif as shown depicted in column 5 of table II or column 7 of table IV, and being depicted in the same respective line as said YBL022C or a functional equivalent or a homologue thereof as depicted in column 7 of table II, preferably a homologue or functional equivalent as depicted in column 7 of table II B, and being depicted in the same respective line as said YBL022C, e.g. cytoplasmic.

[0215] The sequence of YBR109c from Saccharomyces cerevisiae, e.g. as shown in column 5 of table I, is published: sequences from S. cerevisiae have been published in Goffeau et al., Science 274 (5287), 546 (1996), sequences from E. coli have been published in Blattner et al., Science 277 (5331), 1453 (1997). Its activity is described as Calmodulin.

[0216] Accordingly, in one embodiment, the process of the present invention for producing a plant with increased yield comprises increasing or generating the activity of a gene product conferring the activity “Calmodulin” from Saccharomyces cerevisiae or its functional equivalent or its homolog, e.g. the increase of

(a) a gene product of a gene comprising the nucleic acid molecule as shown in column 5 of table I, and being depicted in the same respective line as said YBR109c or a functional equivalent or a homologue thereof as shown depicted in column 7 of table I, preferably a homologue or functional equivalent as shown depicted in column 7 of table I B, and being depicted in the same respective line as said YBR109c, e.g. cytoplasmic; or
(b) a polypeptide comprising a polypeptide, a consensus sequence or a polypeptide motif as shown depicted in column 5 of table II or column 7 of table IV, and being depicted in the same respective line as said YBR109c or a functional equivalent or a homologue thereof as depicted in column 7 of table II, preferably a homologue or functional equivalent as depicted in column 7 of table II B, and being depicted in the same respective line as said YBR109c, e.g. cytoplasmic.

[0217] The sequence of YDR046c from Saccharomyces cerevisiae, e.g. as shown in column 5 of table I, is published: sequences from S. cerevisiae have been published in Goffeau et al., Science 274 (5287), 546 (1996), sequences from E. coli have been published in Blattner et al., Science 277 (5331), 1453 (1997). Its activity is described as Branched-chain amino acid permease.

[0218] Accordingly, in one embodiment, the process of the present invention for producing a plant with increased yield comprises increasing or generating the activity of a gene product conferring the activity “Branched-chain amino acid permease” from Saccharomyces cerevisiae or its functional equivalent or its homolog, e.g. the increase of

(a) a gene product of a gene comprising the nucleic acid molecule as shown in column 5 of table I, and being depicted in the same respective line as said YDR046c or a functional equivalent or a homologue thereof as shown depicted in column 7 of table I, preferably a homologue or functional equivalent as shown depicted in column 7 of table I B, and being depicted in the same respective line as said YDR046c, e.g. cytoplasmic; or
(b) a polypeptide comprising a polypeptide, a consensus sequence or a polypeptide motif as shown depicted in column 5 of table II or column 7 of table IV, and being depicted in the same respective line as said YDR046c or a functional equivalent or a homologue thereof as depicted in column 7 of table II, preferably a homologue or functional equivalent as depicted in column 7 of table II B, and being depicted in the same respective line as said YDR046c, e.g. cytoplasmic.

[0219] The sequence of YEL036C from Saccharomyces cerevisiae, e.g. as shown in column 5 of table I, is published: sequences from S. cerevisiae have been published in Goffeau et al., Science 274 (5287), 546 (1996), sequences from E. coli have been published in Blattner et al., Science 277 (5331), 1453 (1997). Its activity is described as Mannan polymerase II complex subunit.

[0220] Accordingly, in one embodiment, the process of the present invention for producing a plant with increased yield comprises increasing or generating the activity of a gene product conferring the activity “Mannan polymerase II complex subunit” from Saccharomyces cerevisiae or its functional equivalent or its homolog, e.g. the increase of

(a) a gene product of a gene comprising the nucleic acid molecule as shown in column 5 of table I, and being depicted in the same respective line as said YEL036C or a functional equivalent or a homologue thereof as shown depicted in column 7 of table I, preferably a homologue or functional equivalent as shown depicted in column 7 of table I B, and being depicted in the same respective line as said YEL036C, e.g. cytoplasmic; or
(b) a polypeptide comprising a polypeptide, a consensus sequence or a polypeptide motif as shown depicted in column 5 of table II or column 7 of table IV, and being depicted in the same respective line as said YEL036C or a functional equivalent or a homologue thereof as depicted in column 7 of table II, preferably a homologue or functional equivalent as depicted in column 7 of table II B, and being depicted in the same respective line as said YEL036C, e.g. cytoplasmic.

[0221] The sequence of YHR120W from Saccharomyces cerevisiae, e.g. as shown in column 5 of table I, is published: sequences from S. cerevisiae have been published in Goffeau et al., Science 274 (5287), 546 (1996), sequences from E. coli have been published in Blattner et al., Science 277 (5331), 1453 (1997). Its activity is described as MutS protein homolog. Accordingly, in one embodiment, the process of the present invention for producing a plant with increased yield comprises increasing or generating the activity of a gene product conferring the activity “MutS protein homolog” from Saccharomyces cerevisiae or its functional equivalent or its homolog, e.g. the increase of

(a) a gene product of a gene comprising the nucleic acid molecule as shown in column 5 of table I, and being depicted in the same respective line as said YHR120W or a functional equivalent or a homologue thereof as shown depicted in column 7 of table I, preferably a homologue or functional equivalent as shown depicted in column 7 of table I B, and being depicted in the same respective line as said YHR120W, e.g. cytoplasmic; or
(b) a polypeptide comprising a polypeptide, a consensus sequence or a polypeptide motif as shown depicted in column 5 of table II or column 7 of table IV, and being depicted in the same respective line as said YHR120W or a functional equivalent or a homologue thereof as depicted in column 7 of table II, preferably a homologue or functional equivalent as depicted in column 7 of table II B, and being depicted in the same respective line as said YHR120W, e.g. cytoplasmic.

[0222] The sequence of YMR212c from Saccharomyces cerevisiae, e.g. as shown in column 5 of table I, is published: sequences from S. cerevisiae have been published in Goffeau et al., Science 274 (5287), 546 (1996), sequences from E. coli have been published in Blattner et al., Science 277 (5331), 1453 (1997). Its activity is described as Protein EFR3. Accordingly, in one embodiment, the process of the present invention for producing a plant with increased yield comprises increasing or generating the activity of a gene product conferring the activity “Protein EFR3” from Saccharomyces cerevisiae or its functional equivalent or its homolog, e.g. the increase of

(a) a gene product of a gene comprising the nucleic acid molecule as shown in column 5 of table I, and being depicted in the same respective line as said YMR212c or a functional equivalent or a homologue thereof as shown depicted in column 7 of table I, preferably a homologue or functional equivalent as shown depicted in column 7 of table I B, and being depicted in the same respective line as said YMR212c, e.g. cytoplasmic; or
(b) a polypeptide comprising a polypeptide, a consensus sequence or a polypeptide motif as shown depicted in column 5 of table II or column 7 of table IV, and being depicted in the same respective line as said YMR212c or a functional equivalent or a homologue thereof as depicted in column 7 of table II, preferably a homologue or functional equivalent as depicted in column 7 of table II B, and being depicted in the same respective line as said YMR212c, e.g. cytoplasmic.

[0223] The sequence of YNL135C from Saccharomyces cerevisiae, e.g. as shown in column 5 of table I, is published: sequences from S. cerevisiae have been published in Goffeau et al., Science 274 (5287), 546 (1996), sequences from E. coli have been published in Blattner et al., Science 277 (5331), 1453 (1997). Its activity is described as FK506-binding protein. Accordingly, in one embodiment, the process of the present invention for producing a plant with increased yield comprises increasing or generating the activity of a gene product conferring the activity “FK506-binding protein” from Saccharomyces cerevisiae or its functional equivalent or its homolog, e.g. the increase of

(a) a gene product of a gene comprising the nucleic acid molecule as shown in column 5 of table I, and being depicted in the same respective line as said YNL135C or a functional equivalent or a homologue thereof as shown depicted in column 7 of table I, preferably a homologue or functional equivalent as shown depicted in column 7 of table I B, and being depicted in the same respective line as said YNL135C, e.g. cytoplasmic; or
(b) a polypeptide comprising a polypeptide, a consensus sequence or a polypeptide motif as shown depicted in column 5 of table II or column 7 of table IV, and being depicted in the same respective line as said YNL135C or a functional equivalent or a homologue thereof as depicted in column 7 of table II, preferably a homologue or functional equivalent as depicted in column 7 of table II B, and being depicted in the same respective line as said YNL135C, e.g. cytoplasmic.

[0224] The sequence of YPR185W from Saccharomyces cerevisiae, e.g. as shown in column 5 of table I, is published: sequences from S. cerevisiae have been published in Goffeau et al., Science 274 (5287), 546 (1996), sequences from E. coli have been published in Blattner et al., Science 277 (5331), 1453 (1997). Its activity is described as Autophagy-related protein. Accordingly, in one embodiment, the process of the present invention for producing a plant with increased yield comprises increasing or generating the activity of a gene product conferring the activity “Autophagy-related protein” from Saccharomyces cerevisiae or its functional equivalent or its homolog, e.g. the increase of

(a) a gene product of a gene comprising the nucleic acid molecule as shown in column 5 of table I, and being depicted in the same respective line as said YPR185W or a functional equivalent or a homologue thereof as shown depicted in column 7 of table I, preferably a homologue or functional equivalent as shown depicted in column 7 of table I B, and being depicted in the same respective line as said YPR185W, e.g. cytoplasmic; or
(b) a polypeptide comprising a polypeptide, a consensus sequence or a polypeptide motif as shown depicted in column 5 of table II or column 7 of table IV, and being depicted in the same respective line as said YPR185W or a functional equivalent or a homologue thereof as depicted in column 7 of table II, preferably a homologue or functional equivalent as depicted in column 7 of table II B, and being depicted in the same respective line as said YPR185W, e.g. cytoplasmic.

[0225] The sequence of AT5G54070 from Arabidopsis thaliana, e.g. as shown in column 5 of table I, is published: sequences from S. cerevisiae have been published in Goffeau et al., Science 274 (5287), 546 (1996), sequences from E. coli have been published in Blattner et al., Science 277 (5331), 1453 (1997). Its activity is described as Heat stress transcription factor. Accordingly, in one embodiment, the process of the present invention for producing a plant with increased yield comprises increasing or generating the activity of a gene product conferring the activity “Heat stress transcription factor” from Arabidopsis thaliana or its functional equivalent or its homolog, e.g. the increase of

(a) a gene product of a gene comprising the nucleic acid molecule as shown in column 5 of table I, and being depicted in the same respective line as said AT5G54070 or a functional equivalent or a homologue thereof as shown depicted in column 7 of table I, preferably a homologue or functional equivalent as shown depicted in column 7 of table I B, and being depicted in the same respective line as said AT5G54070, e.g. cytoplasmic; or
(b) a polypeptide comprising a polypeptide, a consensus sequence or a polypeptide motif as shown depicted in column 5 of table II or column 7 of table IV, and being depicted in the same respective line as said AT5G54070 or a functional equivalent or a homologue thereof as depicted in column 7 of table II, preferably a homologue or functional equivalent as depicted in column 7 of table II B, and being depicted in the same respective line as said AT5G54070, e.g. cytoplasmic.

[0226] Accordingly, in one embodiment, the process of the present invention for producing a plant with increased yield comprises increasing or generating

(a) a gene product of a gene comprising the nucleic acid molecule as shown in e.g. SEQ ID NO.: 4804 or 4836, or a functional equivalent or a homologue thereof as shown depicted in column 7 of table I, e.g. cytoplasmic; or
(b) a polypeptide comprising a polypeptide, a consensus sequence or a polypeptide motif as shown in e.g. SEQ ID NO.: 4805 or 4837, or a functional equivalent or a homologue thereof as depicted in column 7 of table II, preferably a homologue or functional equivalent as depicted in column 7 of table II B, and being depicted in the same respective line as said AT5G54070, e.g. cytoplasmic.

[0227] The sequence of B0050 from Escherichia coli, e.g. as shown in column 5 of table I, is published: sequences from S. cerevisiae have been published in Goffeau et al., Science 274 (5287), 546 (1996), sequences from E. coli have been published in Blattner et al., Science 277 (5331), 1453 (1997). Its activity is described as B0050-protein.

[0228] Accordingly, in one embodiment, the process of the present invention for producing a plant with increased yield comprises increasing or generating the activity of a gene product conferring the activity “B0050-protein” from Escherichia coli or its functional equivalent or its homolog, e.g. the increase of

(a) a gene product of a gene comprising the nucleic acid molecule as shown in column 5 of table I, and being depicted in the same respective line as said B0050 or a functional equivalent or a homologue thereof as shown depicted in column 7 of table I, preferably a homologue or functional equivalent as shown depicted in column 7 of table I B, and being depicted in the same respective line as said B0050, e.g. cytoplasmic; or
(b) a polypeptide comprising a polypeptide, a consensus sequence or a polypeptide motif as shown depicted in column 5 of table II or column 7 of table IV, and being depicted in the same respective line as said B0050 or a functional equivalent or a homologue thereof as depicted in column 7 of table II, preferably a homologue or functional equivalent as depicted in column 7 of table II B, and being depicted in the same respective line as said B0050, e.g. cytoplasmic.

[0229] The sequence of GM02LC38418 from Glycine max, e.g. as shown in column 5 of table I, is published: sequences from S. cerevisiae have been published in Goffeau et al., Science 274 (5287), 546 (1996), sequences from E. coli have been published in Blattner et al., Science 277 (5331), 1453 (1997). Its activity is described as GM02LC38418-protein. Accordingly, in one embodiment, the process of the present invention for producing a plant with increased yield comprises increasing or generating the activity of a gene product conferring the activity “GM02LC38418-protein” from Glycine max or its functional equivalent or its homolog, e.g. the increase of

(a) a gene product of a gene comprising the nucleic acid molecule as shown in column 5 of table I, and being depicted in the same respective line as said GM02LC38418 or a functional equivalent or a homologue thereof as shown depicted in column 7 of table I, preferably a homologue or functional equivalent as shown depicted in column 7 of table I B, and being depicted in the same respective line as said GM02LC38418, e.g. cytoplasmic; or
(b) a polypeptide comprising a polypeptide, a consensus sequence or a polypeptide motif as shown depicted in column 5 of table II or column 7 of table IV, and being depicted in the same respective line as said GM02LC38418 or a functional equivalent or a homologue thereof as depicted in column 7 of table II, preferably a homologue or functional equivalent as depicted in column 7 of table II B, and being depicted in the same respective line as said GM02LC38418, e.g. cytoplasmic.

[0230] The sequence of YDL007W from Saccharomyces cerevisiae, e.g. as shown in column 5 of table I, is published: sequences from S. cerevisiae have been published in Goffeau et al., Science 274 (5287), 546 (1996), sequences from E. coli have been published in Blattner et al., Science 277 (5331), 1453 (1997). Its activity is described as 26S proteasome-subunit. Accordingly, in one embodiment, the process of the present invention for producing a plant with increased yield comprises increasing or generating the activity of a gene product conferring the activity “26S proteasome-subunit” from Saccharomyces cerevisiae or its functional equivalent or its homolog, e.g. the increase of

(a) a gene product of a gene comprising the nucleic acid molecule as shown in column 5 of table I, and being depicted in the same respective line as said YDL007W or a functional equivalent or a homologue thereof as shown depicted in column 7 of table I, preferably a homologue or functional equivalent as shown depicted in column 7 of table I B, and being depicted in the same respective line as said YDL007W, e.g. cytoplasmic; or
(b) a polypeptide comprising a polypeptide, a consensus sequence or a polypeptide motif as shown depicted in column 5 of table II or column 7 of table IV, and being depicted in the same respective line as said YDL007W or a functional equivalent or a homologue thereof as depicted in column 7 of table II, preferably a homologue or functional equivalent as depicted in column 7 of table II B, and being depicted in the same respective line as said YDL007W, e.g. cytoplasmic.

[0231] The sequence of YBL022C_{—}2 from Saccharomyces cerevisiae, e.g. as shown in column 5 of table I, is published: sequences from S. cerevisiae have been published in Goffeau et al., Science 274 (5287), 546 (1996), sequences from E. coli have been published in Blattner et al., Science 277 (5331), 1453 (1997). Its activity is described as mitochondrial precursor of Lon protease homolog.

[0232] Accordingly, in one embodiment, the process of the present invention for producing a plant with increased yield comprises increasing or generating the activity of a gene product conferring the activity “mitochondrial precursor of Lon protease homolog” from Saccharomyces cerevisiae or its functional equivalent or its homolog, e.g. the increase of

(a) a gene product of a gene comprising the nucleic acid molecule as shown in column 5 of table I, and being depicted in the same respective line as said YBL022C_{—}2 or a functional equivalent or a homologue thereof as shown depicted in column 7 of table I, preferably a homologue or functional equivalent as shown depicted in column 7 of table I B, and being depicted in the same respective line as said YBL022C_{—}2, e.g. cytoplasmic; or
(b) a polypeptide comprising a polypeptide, a consensus sequence or a polypeptide motif as shown depicted in column 5 of table II or column 7 of table IV, and being depicted in the same respective line as said YBL022C_{—}2 or a functional equivalent or a homologue thereof as depicted in column 7 of table II, preferably a homologue or functional equivalent as depicted in column 7 of table II B, and being depicted in the same respective line as said YBL022C_{—}2, e.g. cytoplasmic.

[0233] The sequence of YDR046C_{—}2 from Saccharomyces cerevisiae, e.g. as shown in column 5 of table I, is published: sequences from S. cerevisiae have been published in Goffeau et al., Science 274 (5287), 546 (1996), sequences from E. coli have been published in Blattner et al., Science 277 (5331), 1453 (1997). Its activity is described as Branched-chain amino acid permease.

[0234] Accordingly, in one embodiment, the process of the present invention for producing a plant with increased yield comprises increasing or generating the activity of a gene product conferring the activity “Branched-chain amino acid permease” from Saccharomyces cerevisiae or its functional equivalent or its homolog, e.g. the increase of

(a) a gene product of a gene comprising the nucleic acid molecule as shown in column 5 of table I, and being depicted in the same respective line as said YDR046C_{—}2 or a functional equivalent or a homologue thereof as shown depicted in column 7 of table I, preferably a homologue or functional equivalent as shown depicted in column 7 of table I B, and being depicted in the same respective line as said YDR046C_{—}2, e.g. cytoplasmic; or
(b) a polypeptide comprising a polypeptide, a consensus sequence or a polypeptide motif as shown depicted in column 5 of table II or column 7 of table IV, and being depicted in the same respective line as said YDR046C_{—}2 or a functional equivalent or a homologue thereof as depicted in column 7 of table II, preferably a homologue or functional equivalent as depicted in column 7 of table II B, and being depicted in the same respective line as said YDR046C_{—}2, e.g. cytoplasmic.

[0235] The sequence of YEL036C_{—}2 from Saccharomyces cerevisiae, e.g. as shown in column 5 of table I, is published: sequences from S. cerevisiae have been published in Goffeau et al., Science 274 (5287), 546 (1996), sequences from E. coli have been published in Blattner et al., Science 277 (5331), 1453 (1997). Its activity is described as Mannan polymerase II complex subunit.

[0236] Accordingly, in one embodiment, the process of the present invention for producing a plant with increased yield comprises increasing or generating the activity of a gene product conferring the activity “Mannan polymerase II complex subunit” from Saccharomyces cerevisiae or its functional equivalent or its homolog, e.g. the increase of

(a) a gene product of a gene comprising the nucleic acid molecule as shown in column 5 of table I, and being depicted in the same respective line as said YEL036C_{—}2 or a functional equivalent or a homologue thereof as shown depicted in column 7 of table I, preferably a homologue or functional equivalent as shown depicted in column 7 of table I B, and being depicted in the same respective line as said YEL036C_{—}2, e.g. cytoplasmic; or
(b) a polypeptide comprising a polypeptide, a consensus sequence or a polypeptide motif as shown depicted in column 5 of table II or column 7 of table IV, and being depicted in the same respective line as said YEL036C_{—}2 or a functional equivalent or a homologue thereof as depicted in column 7 of table II, preferably a homologue or functional equivalent as depicted in column 7 of table II B, and being depicted in the same respective line as said YEL036C_{—}2, e.g. cytoplasmic.

[0237] The sequence of GM02LC38418_{—}2 from Glycine max, e.g. as shown in column 5 of table I, is published: sequences from S. cerevisiae have been published in Goffeau et al., Science 274 (5287), 546 (1996), sequences from E. coli have been published in Blattner et al., Science 277 (5331), 1453 (1997). Its activity is described as GM02LC38418-protein. Accordingly, in one embodiment, the process of the present invention for producing a plant with increased yield comprises increasing or generating the activity of a gene product conferring the activity “GM02LC38418-protein” from Glycine max or its functional equivalent or its homolog, e.g. the increase of

(a) a gene product of a gene comprising the nucleic acid molecule as shown in column 5 of table I, and being depicted in the same respective line as said GM02LC38418_{—}2 or a functional equivalent or a homologue thereof as shown depicted in column 7 of table I, preferably a homologue or functional equivalent as shown depicted in column 7 of table I B, and being depicted in the same respective line as said GM02LC38418_{—}2, e.g. cytoplasmic; or
(b) a polypeptide comprising a polypeptide, a consensus sequence or a polypeptide motif as shown depicted in column 5 of table II or column 7 of table IV, and being depicted in the same respective line as said GM02LC38418_{—}2 or a functional equivalent or a homologue thereof as depicted in column 7 of table II, preferably a homologue or functional equivalent as depicted in column 7 of table II B, and being depicted in the same respective line as said GM02LC38418_{—}2, e.g. cytoplasmic.

[0238] Accordingly, an activity selected form the group consisting of 26S proteasome-subunit, 50S ribosomal protein L36, Autophagy-related protein, B0050-protein, Branched-chain amino acid permease, Calmodulin, carbon storage regulator, FK506-binding protein, gammaglutamyl-gamma-aminobutyrate hydrolase, GM02LC38418-protein, Heat stress transcription factor, Mannan polymerase II complex subunit, mitochondrial precursor of Lon protease homolog, MutS protein homolog, phosphate transporter subunit, Protein EFR3, pyruvate kinase, tellurite resistance protein, Xanthine permease, and YAR047c-protein is increased in one or more specific compartment(s) or organelle(s) of a cell or plant and confers said increased yield, e.g. the plant shows one or more increased yield-related trait(s). For example, said activity is increased in the compartment of a cell as indicated in table I or II in column 6 resulting in an increased yield of the corresponding plant. For example, the specific localization of said activity confers an improved or increased yield-related trait as shown in table VIIIA, B, C and/or D. For example, said activity can be increased in plastids or mitochondria of a plant cell, thus conferring increase of yield in a corresponding plant.

[0239] In one embodiment, an activity as disclosed herein as being conferred by a the expression of the genes described herein or its expression product; e.g. a polypeptide shown in table II, is increase or generated in the plastid, if in column 6 of each table I the term “plastidic” is listed for said polypeptide.

[0240] In one embodiment, an activity as disclosed herein as being conferred by a the expression of the genes described herein or its expression product; e.g. a polypeptide shown in table II, is increase or generated in the mitochondria if in column 6 of each table I the term “mitochondria” is listed for said polypeptide.

[0241] In another embodiment the present invention relates to a method for producing an, e.g. transgenic, plant with increased yield, e.g. with an increased yield-related trait, for example enhanced tolerance to abiotic environmental stress, for example an increased drought tolerance and/or low temperature tolerance and/or an increased nutrient use efficiency, intrinsic yield and/or another increased yield-related trait as compared to a corresponding, e.g. non-transformed, wild type plant, which comprises
[0242] (a) increasing or generating one or more said “activities” according to the invention in the cytoplasm of a plant cell, and
[0243] (b) growing the plant under conditions which permit the development of a plant with increased yield, e.g. with an increased yield-related trait, for example enhanced tolerance to abiotic environmental stress, for example an increased drought tolerance and/or low temperature tolerance and/or an increased nutrient use efficiency, intrinsic yield and/or another increased yield-related trait as compared to a corresponding, e.g. non-transformed, wild type plant.

[0244] In one embodiment, an activity according to the invention as being conferred by a polypeptide shown in table II is increase or generated in the cytoplasm, if in column 6 of each table I the term “cytoplasmic” is listed for said polypeptide.

[0245] As the terms “cytoplasmic” and “non-targeted” shall not exclude a targeted localisation to any cell compartment for the products of the inventive nucleic acid sequences by their naturally occurring sequence properties within the background of the transgenic organism, in one embodiment, an activity as disclosed herein as being conferred by a polypeptide shown in table II is increase or generated non-targeted, if in column 6 of each table I the term “cytoplasmic” is listed for said polypeptide. For the purposes of the description of the present invention, the term “cytoplasmic” shall indicate, that the nucleic acid of the invention is expressed without the addition of an non-natural transit peptide encoding sequence. A non-natural transient peptide encoding sequence is a sequence which is not a natural part of a nucleic acid of the invention but is rather added by molecular manipulation steps as for example described in the example under “plastid targeted expression”. Therefore the term “cytoplasmic” shall not exclude a targeted localisation to any cell compartment for the products of the inventive nucleic acid sequences by their naturally occurring sequence properties.

[0246] In another embodiment the present invention is related to a method for producing a, e.g. transgenic, plant with increased yield, or a part thereof, as compared to a corresponding, e.g. non-transformed, wild type plant, which comprises
[0247] (a1) increasing or generating one or more said activities, e.g. the activity of said gene or the gene product gene, e.g. an activity selected from the group consisting of 26S proteasome-subunit, 50S ribosomal protein L36, Autophagy-related protein, B0050-protein, Branched-chain amino acid permease, Calmodulin, carbon storage regulator, FK506-binding protein, gamma-glutamyl-gamma-aminobutyrate hydrolase, GM02LC38418-protein, Heat stress transcription factor, Mannan polymerase II complex subunit, mitochondrial precursor of Lon protease homolog, MutS protein homolog, phosphate trans-porter subunit, Protein EFR3, pyruvate kinase, tellurite resistance protein, Xanthine permease, and YAR047c-protein in an organelle of a plant cell, or
[0248] (a2) increasing or generating the activity of a protein as shown in table II, column 3 or as encoded by the nucleic acid sequences as shown in table I, column 5 or 7, and which is joined to a nucleic acid sequence encoding a transit peptide in the plant cell; or
[0249] (a3) increasing or generating the activity of a protein as shown in table II, column 3 or as encoded by the nucleic acid sequences as shown in table I, column 5 or 7, and which is joined to a nucleic acid sequence encoding an organelle localization sequence, especially a chloroplast localization sequence, in a plant cell,
[0250] (a4) increasing or generating the activity of a protein as shown in table II, column 3 or as encoded by the nucleic acid sequences as shown in table I, column 5 or 7, and which is joined to a nucleic acid sequence encoding an mitochondrion localization sequence in a plant cell,
   and
[0251] (b) regenerating a plant from said plant cell;
[0252] (c) growing the plant under conditions which permit the development of a plant with increased yield, e.g. with an increased yield-related trait, for example enhanced tolerance to abiotic environmental stress, for example an increased drought tolerance and/or low temperature tolerance and/or an increased nutrient use efficiency, intrinsic yield and/or another increased yield-related trait as compared to a corresponding, e.g. non-transformed, wild type plant.

[0253] Accordingly, in a further embodiment, in said method for producing a transgenic plant with increased yield said activity is increased or generating by increasing or generating the activity of a protein as shown in table II, column 3 encoded by the nucleic acid sequences as shown in table I, column 5 or 7,
[0254] (a1) in an organelle of a plant through the transformation of the organelle indicated in column 6 for said activity, or
[0255] (a2) in the plastid of a plant, or in one or more parts thereof, through the transformation of the plastids, if indicated in column 6 for said activity;
[0256] (a3) in the chloroplast of a plant, or in one or more parts thereof, through the transformation of the chloroplast, if indicated in column 6 for said activity,
[0257] (a4) in the mitochondrion of a plant, or in one or more parts thereof, through the transformation of the mitochondrion, if indicated in column 6 for said activity.

[0258] According to the disclosure of the invention, especially in the examples, the skilled worker is able to link transit peptide nucleic acid sequences to the nucleic acid sequences shown in table I, columns 5 and 7, e.g. for the nucleic acid molecules for which in column 6 of table I the term “plastidic” is indicated.

[0259] Any transit peptide may be used in accordance with the various embodiments of the present invention. For example, specific nucleic acid sequences are encoding transit peptides are disclosed by von Heijne et al. (Plant Molecular Biology Reporter, 9 (2), 104, (1991)) or other transit peptides are disclosed by Schmidt et al. (J. Biol. Chem. 268 (36), 27447 (1993)), Della-Cioppa et al. (Plant. Physiol. 84, 965 (1987)), de Castro Silva Filho et al. (Plant Mol. Biol. 30, 769 (1996)), Zhao et al. (J. Biol. Chem. 270 (11), 6081 (1995)), Römer et al. (Biochem. Biophys. Res. Commun. 196 (3), 1414 (1993)), Keegstra et al. (Annu. Rev. Plant Physiol. Plant Mol. Biol. 40, 471 (1989)), Lubben et al. (Photosynthesis Res. 17, 173 (1988)) and Lawrence et al. (J. Biol. Chem. 272 (33), 20357 (1997))), which are hereby incorporated by reference. A general review about targeting is disclosed by Kermode Allison R. in Critical Reviews in Plant Science 15 (4), 285 (1996) under the title “Mechanisms of Intracellular Protein Transport and Targeting in Plant Cells.”.

[0260] Additional nucleic acid sequences encoding a transit peptide can be isolated from any organism such as microorganisms such as algae or plants containing plastids, preferably containing chloroplasts. A “transit peptide” is an amino acid sequence, whose encoding nucleic acid sequence is translated together with the corresponding structural gene. That means the transit peptide is an integral part of the translated protein and forms an amino terminal extension of the protein. Both are translated as so called “pre-protein”. In general the transit peptide is cleaved off from the pre-protein during or just after import of the protein into the correct cell organelle such as a plastid to yield the mature protein. The transit peptide ensures correct localization of the mature protein by facilitating the transport of proteins through intracellular membranes.

[0261] For example, such transit peptides, which are beneficially used in the inventive process, are derived from the nucleic acid sequence encoding a protein selected from the group consisting of ribulose bisphosphate carboxylase/oxygenase, 5-enolpyruvyl-shikimate-3-phosphate synthase, acetolactate synthase, chloroplast ribosomal protein CS17, Cs protein, ferredoxin, plastocyanin, ribulose bisphosphate carboxylase activase, tryptophan synthase, acyl carrier protein, plastid chaperonin-60, cytochrome c₅₅₂, 22-kDA heat shock protein, 33-kDa Oxygen-evolving enhancer protein 1, ATP synthase γ subunit, ATP synthase δ subunit, chlorophyll-a/b-binding proteinII-1, Oxygen-evolving enhancer protein 2, Oxygen-evolving enhancer protein 3, photosystem I: P21, photosystem I: P28, photosystem I: P30, photosystem I: P35, photosystem I: P37, glycerol-3-phosphate acyltransferases, chlorophyll a/b binding protein, CAB2 protein, hydroxymethyl-bilane synthase, pyruvate-orthophosphate dikinase, CAB3 protein, plastid ferritin, ferritin, early light-inducible protein, glutamate-1-semialdehyde aminotransferase, protochlorophyllide reductase, starch-granule-bound amylase synthase, light-harvesting chlorophyll a/b-binding protein of photosystem II, major pollen allergen Lol p 5a, plastid ClpB ATP-dependent protease, superoxide dismutase, ferredoxin NADP oxidoreductase, 28-kDa ribonucleoprotein, 31-kDa ribonucleoprotein, 33-kDa ribonucleoprotein, acetolactate synthase, ATP synthase CF₀ subunit 1, ATP synthase CF₀ subunit 2, ATP synthase CF₀ subunit 3, ATP synthase CF₀ subunit 4, cytochrome f, ADP-glucose pyrophosphorylase, glutamine synthase, glutamine synthase 2, carbonic anhydrase, GapA protein, heat-shock-protein hsp21, phosphate translocator, plastid ClpA ATP-dependent protease, plastid ribosomal protein CL24, plastid ribosomal protein CL9, plastid ribosomal protein PsCL18, plastid ribosomal protein PsCL25, DAHP synthase, starch phosphorylase, root acyl carrier protein II, betaine-aldehyde dehydrogenase, GapB protein, glutamine synthetase 2, phosphoribulokinase, nitrite reductase, ribosomal protein L12, ribosomal protein L13, ribosomal protein L21, ribosomal protein L35, ribosomal protein L40, triose phosphate-3-phosphoglyerate-phosphate translocator, ferredox-independent glutamate synthase, glyceraldehyde-3-phosphate dehydrogenase, NADP-dependent malic enzyme and NADP-malate dehydrogenase, chloroplast 30S ribosomal protein PSrp-1, and the like.

[0262] The skilled worker will recognize that various other nucleic acid sequences encoding transit peptides can easily isolated from plastid-localized proteins, which are expressed from nuclear genes as precursors and are then targeted to plastids. Nucleic acid sequences encoding a transit peptide can be isolated from organelle-targeted proteins from any organism. Preferably, the transit peptide is isolated from an organism selected from the group consisting of the genera Acetabularia, Arabidopsis, Brassica, Capsicum, Chlamydomonas, Cururbita, Dunaliella, Euglena, Flayeria, Glycine, Helianthus, Hordeum, Lemna, Lolium, Lycopersion, Malus, Medicago, Mesembryanthemum, Nicotiana, Oenotherea, Oryza, Petunia, Phaseolus, Physcomitrella, Pinus, Pisum, Raphanus, Silene, Sinapis, Solanum, Spinacea, Stevia, Synechococcus, Triticum and Zea. More preferably, the nucleic acid sequence encoding the transit peptide is isolated from an organism selected from the group consisting of the species Acetabularia mediterranea, Arabidopsis thaliana, Brassica campestris, Brassica napus, Capsicum annuum, Chlamydomonas reinhardtii, Cururbita moschata, Dunaliella saline, Dunaliella tertiolecta, Euglena gracilis, Flayeria trinervia, Glycine max, Helianthus annuus, Hordeum vulgare, Lemna gibba, Lolium perenne, Lycopersion esculentum, Malus domestica, Medicago falcate, Medicago sativa, Mesembryanthemum crystallinum, Nicotiana plumbaginifolia, Nicotiana sylvestris, Nicotiana tabacum, Oenotherea hookeri, Oryza sativa, Petunia hybrida, Phaseolus vulgaris, Physcomitrella patens, Pinus tunbergii, Pisum sativum, Raphanus sativus, Silene pratensis, Sinapis alba, Solanum tuberosum, Spinacea oleracea, Stevia rebaudiana, Synechococcus, Synechocystis, Triticum aestivum and Zea mays. Alternatively, nucleic acid sequences coding for transit peptides may be chemically synthesized either in part or wholly according to structure of transit peptide sequences disclosed in the prior art.

[0263] Such transit peptides encoding sequences can be used for the construction of other expression constructs. The transit peptides advantageously used in the inventive process and which are part of the inventive nucleic acid sequences and proteins are typically 20 to 120 amino acids, preferably 25 to 110, 30 to 100 or 35 to 90 amino acids, more preferably 40 to 85 amino acids and most preferably 45 to 80 amino acids in length and functions post-translational to direct the protein to the plastid preferably to the chloroplast. The nucleic acid sequences encoding such transit peptides are localized upstream of nucleic acid sequence encoding the mature protein. For the correct molecular joining of the transit peptide encoding nucleic acid and the nucleic acid encoding the protein to be targeted it is sometimes necessary to introduce additional base pairs at the joining position, which forms restriction enzyme recognition sequences useful for the molecular joining of the different nucleic acid molecules. This procedure might lead to very few additional amino acids at the N-terminal of the mature imported protein, which usually and preferably do not interfere with the protein function. In any case, the additional base pairs at the joining position which forms restriction enzyme recognition sequences have to be chosen with care, in order to avoid the formation of stop codons or codons which encode amino acids with a strong influence on protein folding, like e.g. proline. It is preferred that such additional codons encode small structural flexible amino acids such as glycine or alanine.

[0264] As mentioned above the nucleic acid sequence coding for a protein as shown in table II, column 3 or 5, and its homologs as disclosed in table I, column 7 can be joined to a nucleic acid sequence encoding a transit peptide, e.g. if for the nucleic acid molecule in column 6 of table I the term “plastidic” is indicated. The nucleic acid sequence of the gene to be expressed and the nucleic acid sequence encoding the transit peptide are operably linked. Therefore the transit peptide is fused in frame to the nucleic acid sequence coding for a protein as shown in table II, column 3 or 5 and its homologs as disclosed in table I, column 7, e.g. if for the nucleic acid molecule in column 6 of table I the term “plastidic” is indicated.

[0265] The proteins translated from said inventive nucleic acid sequences are a kind of fusion proteins that means the nucleic acid sequences encoding the transit peptide, for example the ones shown in table V, for example the last one of the table, are joint to a gene, e.g. the nucleic acid sequences shown in table I, columns 5 and 7, e.g. if for the nucleic acid molecule in column 6 of table I the term “plastidic” is indicated. The person skilled in the art is able to join said sequences in a functional manner. Advantageously the transit peptide part is cleaved off from the protein part shown in table II, columns 5 and 7, during the transport preferably into the plastids. All products of the cleavage of the preferred transit peptide shown in the last line of table V have preferably the N-terminal amino acid sequences QIA CSS or QIA EFQLTT in front of the start methionine of the protein mentioned in table II, columns 5 and 7. Other short amino acid sequences of an range of 1 to 20 amino acids preferable 2 to 15 amino acids, more preferable 3 to 10 amino acids most preferably 4 to 8 amino acids are also possible in front of the start methionine of the gene, e.g. the protein mentioned in table II, columns 5 and 7. In case of the amino acid sequence QIA CSS the three amino acids in front of the start methionine are stemming from the LIC (=ligation independent cloning) cassette. Said short amino acid sequence is preferred in the case of the expression of Escherichia coli genes. In case of the amino acid sequence QIA EFQLTT the six amino acids in front of the start methionine are stemming from the LIC cassette. Said short amino acid sequence is preferred in the case of the expression of S. cerevisiae genes. The skilled worker knows that other short sequences are also useful in the expression of the genes mentioned in table I, columns 5 and 7. Furthermore the skilled worker is aware of the fact that there is not a need for such short sequences in the expression of the genes.

[0266] Alternatively to the targeting of the gene, e.g. proteins having the sequences shown in table II, columns 5 and 7, preferably of sequences in general encoded in the nucleus with the aid of the targeting sequences mentioned for example in table V alone or in combination with other targeting sequences preferably into the plastids, the nucleic acids of the invention can directly be introduced into the plastidic genome, e.g. for which in column 6 of table II the term “plastidic” is indicated. Therefore in a preferred embodiment the gene, e.g. the nucleic acid sequences shown in table I, columns 5 and 7 are directly introduced and expressed in plastids, particularly if in column 6 of table I the term “plastidic” is indicated.

[0267] By transforming the plastids the intraspecies specific transgene flow is blocked, because a lot of species such as corn, cotton and rice have a strict maternal inheritance of plastids. By placing the gene, e.g. the genes specified in table I, columns 5 and 7, e.g. if for the nucleic acid molecule in column 6 of table I the term “plastidic” is indicated, or active fragments thereof in the plastids of plants, these genes will not be present in the pollen of said plants.

[0268] In another embodiment of the invention the gene, e.g. the nucleic acid molecules as shown in table I, columns 5 and 7, e.g. if in column 6 of table I the term “mitochondric” is indicated, used in the inventive process are transformed into mitochondria, which are metabolic active.

[0269] For a good expression in the plastids the gene, e.g. the nucleic acid sequences as shown in table I, columns 5 and 7, e.g. if in column 6 of table I the term “plastidic” is indicated, are introduced into an expression cassette using a preferably a promoter and terminator, which are active in plastids, preferably a chloroplast promoter. Examples of such promoters include the psbA promoter from the gene from spinach or pea, the rbcL promoter, and the atpB promoter from corn.

[0270] In one embodiment, the process of the present invention comprises one or more of the following steps:
[0271] (a) stabilizing a protein conferring the increased expression of a protein encoded by the nucleic acid molecule of the invention or of the polypeptide of the invention having the herein-mentioned activity selected from the group consisting of 26S proteasome-subunit, 50S ribosomal protein L36, Autophagy-related protein, B0050-protein, Branched-chain amino acid permease, Calmodulin, carbon storage regulator, FK506-binding protein, gamma-glutamyl-gamma-aminobutyrate hydrolase, GM02LC38418-protein, Heat stress transcription factor, Mannan polymerase II complex subunit, mitochondrial precursor of Lon protease homolog, MutS protein homolog, phosphate transporter subunit, Protein EFR3, pyruvate kinase, tellurite resistance protein, Xanthine permease, and YAR047C-protein and conferring increased yield, e.g. increasing a yield-related trait, for example enhanced tolerance to abiotic environmental stress, for example an increased drought tolerance and/or low temperature tolerance and/or an increased nutrient use efficiency, intrinsic yield and/or another mentioned yield-related trait as compared to a corresponding, e.g. non-transformed, wild type plant cell, plant or part thereof;
[0272] (b) stabilizing an mRNA conferring the increased expression of a polynucleotide encoding a polypeptide as mentioned in (a);
[0273] (c) increasing the specific activity of a protein conferring the increased expression of a polypeptide as mentioned in (a);
[0274] (d) generating or increasing the expression of an endogenous or artificial transcription factor mediating the expression of a protein conferring the increased expression of a polypeptide as mentioned in (a);
[0275] (e) stimulating activity of a protein conferring the increased expression of a polypeptide as mentioned in (a), by adding one or more exogenous inducing factors to the organism or parts thereof;
[0276] (f) expressing a transgenic gene encoding a protein conferring the increased expression of a polypeptide as mentioned in (a); and/or
[0277] (g) increasing the copy number of a gene conferring the increased expression of a nucleic acid molecule encoding a polypeptide as mentioned in (a);
[0278] (h) increasing the expression of the endogenous gene encoding a polypeptide as mentioned in (a) by adding positive expression or removing negative expression elements, e.g. homologous recombination can be used to either introduce positive regulatory elements like for plants the 35S enhancer into the promoter or to remove repressor elements form regulatory regions. Further gene conversion methods can be used to disrupt repressor elements or to enhance to activity of positive elements-positive elements can be randomly introduced in plants by T-DNA or transposon mutagenesis and lines can be identified in which the positive elements have been integrated near to a gene of the invention, the expression of which is thereby enhanced; and/or
[0279] (i) modulating growth conditions of the plant in such a manner, that the expression or activity of the gene encoding a polypeptide as mentioned in (a), or the protein itself is enhanced;
[0280] (j) selecting of organisms with especially high activity of a polypeptide as mentioned in (a) from natural or from mutagenized resources and breeding them into the target organisms, e.g. the elite crops.

[0281] Preferably, said mRNA is encoded by the nucleic acid molecule of the present invention and/or the protein conferring the increased expression of a protein encoded by the nucleic acid molecule of the present invention alone or linked to a transit nucleic acid sequence or transit peptide encoding nucleic acid sequence or the polypeptide having the herein mentioned activity, e.g. conferring with increased yield, e.g. with an increased yield-related trait, for example enhanced tolerance to abiotic environmental stress, for example an increased drought tolerance and/or low temperature tolerance and/or an increased nutrient use efficiency, intrinsic yield and/or another mentioned yield-related trait as compared to a corresponding, e.g. non-transformed, wild type plant cell, plant or part thereof after increasing the expression or activity of the encoded polypeptide or having the activity of a polypeptide having an activity as the protein as shown in table II column 3 or its homologs.

[0282] In general, the amount of mRNA or polypeptide in a cell or a compartment of an organism correlates with the amount of encoded protein and thus with the overall activity of the encoded protein in said volume. Said correlation is not always linear, the activity in the volume is dependent on the stability of the molecules or the presence of activating or inhibiting cofactors. The activity of the abovementioned proteins and/or polypeptides encoded by the nucleic acid molecule of the present invention can be increased in various ways. For example, the activity in an organism or in a part thereof, like a cell, is increased via increasing the gene product number, e.g. by increasing the expression rate, like introducing a stronger promoter, or by increasing the stability of the mRNA expressed, thus increasing the translation rate, and/or increasing the stability of the gene product, thus reducing the proteins decayed. Further, the activity or turnover of enzymes can be influenced in such a way that a reduction or increase of the reaction rate or a modification (reduction or increase) of the affinity to the substrate results, is reached. A mutation in the catalytic centre of an polypeptide of the invention, e.g. as enzyme, can modulate the turn over rate of the enzyme, e.g. a knock out of an essential amino acid can lead to a reduced or completely knock out activity of the enzyme, or the deletion or mutation of regulator binding sites can reduce a negative regulation like a feedback inhibition (or a substrate inhibition, if the substrate level is also increased). The specific activity of an enzyme of the present invention can be increased such that the turn over rate is increased or the binding of a cofactor is improved. Improving the stability of the encoding mRNA or the protein can also increase the activity of a gene product. The stimulation of the activity is also under the scope of the term “increased activity”.

[0283] Moreover, the regulation of the abovementioned nucleic acid sequences may be modified so that gene expression is increased. This can be achieved advantageously by means of heterologous regulatory sequences or by modifying, for example mutating, the natural regulatory sequences which are present. The advantageous methods may also be combined with each other.

[0284] In general, an activity of a gene product in an organism or part thereof, in particular in a plant cell or organelle of a plant cell, a plant, or a plant tissue or a part thereof or in a microorganism can be increased by increasing the amount of the specific encoding mRNA or the corresponding protein in said organism or part thereof.

[0285] A modification, i.e. an increase, can be caused by endogenous or exogenous factors. For example, an increase in activity in an organism or a part thereof can be caused by adding a gene product or a precursor or an activator or an agonist to the media or nutrition or can be caused by introducing said subjects into a organism, transient or stable. Furthermore such an increase can be reached by the introduction of the inventive nucleic acid sequence or the encoded protein in the correct cell compartment for example into the nucleus or cytoplasm respectively or into plastids either by transformation and/or targeting.

[0286] In one embodiment the increased yield, e.g. increased yield-related trait, for example enhanced tolerance to abiotic environmental stress, for example an increased drought tolerance and/or low temperature tolerance and/or an increased nutrient use efficiency, intrinsic yield and/or another mentioned yield-related trait as compared to a corresponding, e.g. non-transformed, wild type plant cell in the plant or a part thereof, e.g. in a cell, a tissue, a organ, an organelle, the cytoplasm etc., is achieved by increasing the endogenous level of the polypeptide of the invention.

[0287] Accordingly, in an embodiment of the present invention, the present invention relates to a process wherein the gene copy number of a gene encoding the polynucleotide or nucleic acid molecule of the invention is increased. Further, the endogenous level of the polypeptide of the invention can for example be increased by modifying the transcriptional or translational regulation of the polypeptide.

[0288] In one embodiment the increased yield, e.g. increased yield-related trait, for example enhanced tolerance to abiotic environmental stress, for example an increased drought tolerance and/or low temperature tolerance and/or an increased nutrient use efficiency, intrinsic yield and/or another mentioned yield-related trait of the plant or part thereof can be altered by targeted or random mutagenesis of the endogenous genes of the invention. For example homologous recombination can be used to either introduce positive regulatory elements like for plants the 35S enhancer into the promoter or to remove repressor elements form regulatory regions. In addition gene conversion like methods described by Kochevenko and Willmitzer (Plant Physiol. 132 (1), 174 (2003)) and citations therein can be used to disrupt repressor elements or to enhance to activity of positive regulatory elements.

[0289] Furthermore positive elements can be randomly introduced in (plant) genomes by T-DNA or transposon mutagenesis and lines can be screened for, in which the positive elements have been integrated near to a gene of the invention, the expression of which is thereby enhanced. The activation of plant genes by random integrations of enhancer elements has been described by Hayashi et al. (Science 258, 1350 (1992)) or Weigel et al. (Plant Physiol. 122, 1003 (2000)) and others recited therein. The enhancement of positive regulatory elements or the disruption or weakening of negative regulatory elements can also be achieved through common mutagenesis techniques: The production of chemically or radiation mutated populations is a common technique and known to the skilled worker. Methods for plants are described by Koorneef et al. (Mutat Res. Mar. 93 (1) (1982)) and the citations therein and by Lightner and Caspar in “Methods in Molecular Biology” Vol. 82. These techniques usually induce point mutations that can be identified in any known gene using methods such as TILLING (Colbert et al., Plant Physiol, 126, (2001)).

[0290] Accordingly, the expression level can be increased if the endogenous genes encoding a polypeptide conferring an increased expression of the polypeptide of the present invention, in particular genes comprising the nucleic acid molecule of the present invention, are modified via homologous recombination, Tilling approaches or gene conversion. It also possible to add as mentioned herein targeting sequences to the inventive nucleic acid sequences.

[0291] Regulatory sequences, if desired, in addition to a target sequence or part thereof can be operatively linked to the coding region of an endogenous protein and control its transcription and translation or the stability or decay of the encoding mRNA or the expressed protein. In order to modify and control the expression, promoter, UTRs, splicing sites, processing signals, polyadenylation sites, terminators, enhancers, repressors, post transcriptional or post-translational modification sites can be changed, added or amended. For example, the activation of plant genes by random integrations of enhancer elements has been described by Hayashi et al. (Science 258, 1350 (1992)) or Weigel et al. (Plant Physiol. 122, 1003 (2000)) and others recited therein. For example, the expression level of the endogenous protein can be modulated by replacing the endogenous promoter with a stronger transgenic promoter or by replacing the endogenous 3′UTR with a 3′UTR, which provides more stability without amending the coding region. Further, the transcriptional regulation can be modulated by introduction of an artificial transcription factor as described in the examples. Alternative promoters, terminators and UTR are described below.

[0292] The activation of an endogenous polypeptide having above-mentioned activity, e.g. having the activity of a protein as shown in table II, column 3 or of the polypeptide of the invention, e.g. conferring increased yield, e.g. increased yield-related trait, for example enhanced tolerance to abiotic environmental stress, for example an increased drought tolerance and/or low temperature tolerance and/or an increased nutrient use efficiency, intrinsic yield and/or another mentioned yield-related trait as compared to a corresponding, e.g. non-transformed, wild type plant cell, plant or part thereof after increase of expression or activity in the cytoplasm and/or in an organelle like a plastid, can also be increased by introducing a synthetic transcription factor, which binds close to the coding region of the gene encoding the protein as shown in table II, column 3 and activates its transcription.

[0293] In one further embodiment of the process according to the invention, organisms are used in which one of the abovementioned genes, or one of the abovementioned nucleic acids, is mutated in a way that the activity of the encoded gene products is less influenced by cellular factors, or not at all, in comparison with the not mutated proteins. For example, well known regulation mechanism of enzyme activity are substrate inhibition or feed back regulation mechanisms. Ways and techniques for the introduction of substitution, deletions and additions of one or more bases, nucleotides or amino acids of a corresponding sequence are described herein below in the corresponding paragraphs and the references listed there, e.g. in Sambrook et al., Molecular Cloning, Cold Spring Harbour, N.Y., 1989. The person skilled in the art will be able to identify regulation domains and binding sites of regulators by comparing the sequence of the nucleic acid molecule of the present invention or the expression product thereof with the state of the art by computer software means which comprise algorithms for the identifying of binding sites and regulation domains or by introducing into a nucleic acid molecule or in a protein systematically mutations and assaying for those mutations which will lead to an increased specific activity or an increased activity per volume, in particular per cell.

[0294] It can therefore be advantageous to express in an organism a nucleic acid molecule of the invention or a polypeptide of the invention derived from a evolutionary distantly related organism, as e.g. using a prokaryotic gene in a eukaryotic host, as in these cases the regulation mechanism of the host cell may not weaken the activity (cellular or specific) of the gene or its expression product.

[0295] The mutation is introduced in such a way that increased yield, e.g. increased yield-related trait, for example enhanced tolerance to abiotic environmental stress, for example an increased drought tolerance and/or low temperature tolerance and/or an increased nutrient use efficiency, intrinsic yield and/or another mentioned yield-related trait are not adversely affected.

[0296] The invention provides that the above methods can be performed such that enhanced tolerance to abiotic environmental stress, for example drought tolerance and/or low temperature tolerance and/or nutrient use efficiency, intrinsic yield and/or another mentioned yield-related traits increased, wherein particularly the tolerance to low temperature is increased.

[0297] The invention is not limited to specific nucleic acids, specific polypeptides, specific cell types, specific host cells, specific conditions or specific methods etc. as such, but may vary and numerous modifications and variations therein will be apparent to those skilled in the art. It is also to be understood that the terminology used herein is for the purpose of describing specific embodiments only and is not intended to be limiting.

[0298] The present invention also relates to isolated nucleic acids comprising a nucleic acid molecule selected from the group consisting of:
[0299] (a) a nucleic acid molecule encoding the polypeptide shown in column 7 of table II B;
[0300] (b) a nucleic acid molecule shown in column 7 of table I B,
[0301] (c) a nucleic acid molecule, which, as a result of the degeneracy of the genetic code, can be derived from a polypeptide sequence depicted in column 5 or 7 of table II, and confers increased yield, e.g. increased yield-related trait, for example enhanced tolerance to abiotic environmental stress, for example an increased drought tolerance and/or low temperature tolerance and/or an increased nutrient use efficiency, intrinsic yield and/or another mentioned yield-related trait as compared to a corresponding, e.g. non-transformed, wild type plant cell, a plant or a part thereof;
[0302] (d) a nucleic acid molecule having 30% or more identity, preferably 40%, 50%, 60%, 70%, 75%, 80%, 85%, 90%, 95%, 96%, 97%, 98%, 99%, 99.5%, or more with the nucleic acid molecule sequence of a polynucleotide comprising the nucleic acid molecule shown in column 5 or 7 of table I, and confers increased yield, e.g. increased yield-related trait, for example enhanced tolerance to abiotic environmental stress, for example an increased drought tolerance and/or low temperature tolerance and/or an increased nutrient use efficiency, intrinsic yield and/or another mentioned yield-related trait as compared to a corresponding, e.g. non-transformed, wild type plant cell, a plant or a part thereof;
[0303] (e) a nucleic acid molecule encoding a polypeptide having 30% or more identity, preferably at least 40%, 50%, 60%, 70%, 75%, 80%, 85%, 90%, 95%, 96%, 97%, 98%, 99%, 99.5% or more, with the amino acid sequence of the polypeptide encoded by the nucleic acid molecule of (a), (b), (c) or (d) and having the activity represented by a nucleic acid molecule comprising a polynucleotide as depicted in column 5 of table I, and confers increased yield, e.g. increased yield-related trait, for example enhanced tolerance to abiotic environmental stress, for example an increased drought tolerance and/or low temperature tolerance and/or an increased nutrient use efficiency, intrinsic yield and/or another mentioned yield-related trait as compared to a corresponding, e.g. non-transformed, wild type plant cell, a plant or a part thereof;
[0304] (f) nucleic acid molecule which hybridizes with a nucleic acid molecule of (a), (b), (c), (d) or (e) under stringent hybridization conditions and confers increased yield, e.g. an increased yield-related trait, for example enhanced tolerance to abiotic environmental stress, for example an increased drought tolerance and/or low temperature tolerance and/or an increased nutrient use efficiency, intrinsic yield and/or another mentioned yield-related trait as compared to a corresponding, e.g. non-transformed, wild type plant cell, a plant or a part thereof;
[0305] (g) a nucleic acid molecule encoding a polypeptide which can be isolated with the aid of monoclonal or polyclonal antibodies made against a polypeptide encoded by one of the nucleic acid molecules of (a), (b), (c), (d), (e) or (f) and having the activity represented by the nucleic acid molecule comprising a polynucleotide as depicted in column 5 of table I;
[0306] (h) a nucleic acid molecule encoding a polypeptide comprising the consensus sequence or one or more polypeptide motifs as shown in column 7 of table IV, and preferably having the activity represented by a protein comprising a polypeptide as depicted in column 5 of table II or IV;
[0307] (i) a nucleic acid molecule encoding a polypeptide having the activity represented by a protein as depicted in column 5 of table II, and confers increased yield, e.g. an increased yield-related trait, for example enhanced tolerance to abiotic environmental stress, for example an increased drought tolerance and/or low temperature tolerance and/or an increased nutrient use efficiency, intrinsic yield and/or another mentioned yield-related trait as compared to a corresponding, e.g. non-transformed, wild type plant cell, a plant or a part thereof;
[0308] (j) nucleic acid molecule which comprises a polynucleotide, which is obtained by amplifying a cDNA library or a genomic library using the primers in column 7 of table III, and preferably having the activity represented by a protein comprising a polypeptide as depicted in column 5 of table II or IV, and
[0309] (k) a nucleic acid molecule which is obtainable by screening a suitable nucleic acid library, especially a cDNA library and/or a genomic library, under stringent hybridization conditions with a probe comprising a complementary sequence of a nucleic acid molecule of (a) or (b) or with a fragment thereof, having 15 nt, preferably 20 nt, 30 nt, 50 nt, 100 nt, 200 nt, 500 nt, 750 nt or 1000 nt or more of a nucleic acid molecule complementary to a nucleic acid molecule sequence characterized in (a) to (e) and encoding a polypeptide having the activity represented by a protein comprising a polypeptide as depicted in column 5 of table II.
   In one embodiment, the nucleic acid molecule according to (a), (b), (c), (d), (e), (f), (g), (h), (i), (j) and (k) is at least in one or more nucleotides different from the sequence depicted in column 5 or 7 of table I A, and preferably which encodes a protein which differs at least in one or more amino acids from the protein sequences depicted in column 5 or 7 of table II A. For example the nucleic acid molecule according to (a), (b), (c), (d), (e), (f), (g), (h), (i), (j) and (k) is from table I B.

[0310] In one embodiment the invention relates to homologs of the aforementioned sequences, which can be isolated advantageously from yeast, fungi, viruses, algae, bacteria, such as Acetobacter (subgen. Acetobacter) aceti; Acidithiobacillus ferrooxidans; Acinetobacter sp.; Actinobacillus sp; Aeromonas salmonicida; Agrobacterium tumefaciens; Aquifex aeolicus; Arcanobacterium pyogenes; Aster yellows phytoplasma; Bacillus sp.; Bifidobacterium sp.; Borrelia burgdorferi; Brevibacterium linens; Brucella melitensis; Buchnera sp.; Butyrivibrio fibrisolvens; Campylobacter jejuni; Caulobacter crescentus; Chlamydia sp.; Chlamydophila sp.; Chlorobium limicola; Citrobacter rodentium; Clostridium sp.; Comamonas testosteroni; Corynebacterium sp.; Coxiella burnetii; Deinococcus radiodurans; Dichelobacter nodosus; Edwardsiella ictaluri; Enterobacter sp.; Erysipelothrix rhusiopathiae; E. coli; Flavobacterium sp.; Francisella tularensis; Frankia sp. Cpl1; Fusobacterium nucleatum; Geobacillus stearothermophilus; Gluconobacter oxydans; Haemophilus sp.; Helicobacter pylori; Klebsiella pneumoniae; Lactobacillus sp.; Lactococcus lactis; Listeria sp.; Mannheimia haemolytica; Mesorhizobium loti; Methylophaga thalassica; Microcystis aeruginosa; Microscilla sp. PRE1; Moraxella sp. TA144; Mycobacterium sp.; Mycoplasma sp.; Neisseria sp.; Nitrosomonas sp.; Nostoc sp. PCC 7120; Novosphingobium aromaticivorans; Oenococcus oeni; Pantoea citrea; Pasteurella multocida; Pediococcus pentosaceus; Phormidium foveolarum; Phytoplasma sp.; Plectonema boryanum; Prevotella ruminicola; Propionibacterium sp.; Proteus vulgaris; Pseudomonas sp.; Ralstonia sp.; Rhizobium sp.; Rhodococcus equi; Rhodothermus marinus; Rickettsia sp.; Riemerella anatipestifer; Ruminococcus flavefaciens; Salmonella sp.; Selenomonas ruminantium; Serratia entomophila; Shigella sp.; Sinorhizobium meliloti; Staphylococcus sp.; Streptococcus sp.; Streptomyces sp.; Synechococcus sp.; Synechocystis sp. PCC 6803; Thermotoga maritima; Treponema sp.; Ureaplasma urealyticum; Vibrio cholerae; Vibrio parahaemolyticus; Xylella fastidiosa; Yersinia sp.; Zymomonas mobilis, preferably Salmonella sp. or E. coli or plants, preferably from yeasts such as from the genera Saccharomyces, Pichia, Candida, Hansenula, Torulopsis or Schizosaccharomyces or plants such as A. thaliana, maize, wheat, rye, oat, triticale, rice, barley, soybean, peanut, cotton, borage, sunflower, linseed, primrose, rapeseed, canola and turnip rape, manihot, pepper, sunflower, tagetes, solanaceous plant such as potato, tobacco, eggplant and tomato, Vicia species, pea, alfalfa, bushy plants such as coffee, cacao, tea, Salix species, trees such as oil palm, coconut, perennial grass, such as ryegrass and fescue, and forage crops, such as alfalfa and clover and from spruce, pine or fir for example. More preferably homologs of aforementioned sequences can be isolated from S. cerevisiae, E. coli or Synechocystis sp. or plants, preferably Brassica napus, Glycine max, Zea mays, cotton or Oryza sativa.

[0311] The proteins of the present invention are preferably produced by recombinant DNA techniques. For example, a nucleic acid molecule encoding the protein is cloned into an expression vector, for example in to a binary vector, the expression vector is introduced into a host cell, for example the A. thaliana wild type NASC N906 or any other plant cell as described in the examples see below, and the protein is expressed in said host cell. Examples for binary vectors are pBIN19, pB1101, pBinAR (Höfgen and Willmitzer, Plant Science 66, 221 (1990)), pGPTV, pCAMBIA, pBIB-HYG, pBecks, pGreen or pPZP (Hajukiewicz, P. et al., Plant Mol. Biol. 25, 989 (1994), and Hellens et al, Trends in Plant Science 5, 446 (2000)).

[0312] In one embodiment the protein of the present invention is preferably produced in an compartment of the cell, e.g. in the plastids. Ways of introducing nucleic acids into plastids and producing proteins in this compartment are known to the person skilled in the art have been also described in this application. In one embodiment, the polypeptide of the invention is a protein localized after expression as indicated in column 6 of table II, e.g. non-targeted, mitochondrial or plastidic, for example it is fused to a transit peptide as described above for plastidic localisation. In another embodiment the protein of the present invention is produced without further targeting signal (e.g. as mentioned herein), e.g. in the cytoplasm of the cell. Ways of producing proteins in the cytoplasm are known to the person skilled in the art. Ways of producing proteins without artificial targeting are known to the person skilled in the art.

[0313] Advantageously, the nucleic acid sequences according to the invention or the gene construct together with at least one reporter gene are cloned into an expression cassette, which is introduced into the organism via a vector or directly into the genome. This reporter gene should allow easy detection via a growth, fluorescence, chemical, bioluminescence or tolerance assay or via a photometric measurement. Examples of reporter genes which may be mentioned are antibiotic- or herbicide-tolerance genes, hydrolase genes, fluorescence protein genes, bioluminescence genes, sugar or nucleotide metabolic genes or biosynthesis genes such as the Ura3 gene, the Ilv2 gene, the luciferase gene, the β-galactosidase gene, the gfp gene, the 2-desoxyglucose-6-phosphate phosphatase gene, the β-glucuronidase gene, β-lactamase gene, the neomycin phosphotransferase gene, the hygromycin phosphotransferase gene, a mutated acetohydroxy acid synthase (AHAS) gene (also known as acetolactate synthase (ALS) gene), a gene for a D-amino acid metabolizing enzmye or the BASTA (=gluphosinate-tolerance) gene. These genes permit easy measurement and quantification of the transcription activity and hence of the expression of the genes. In this way genome positions may be identified which exhibit differing productivity. For expression a person skilled in the art is familiar with different methods to introduce the nucleic acid sequences into different organelles such as the preferred plastids. Such methods are for example disclosed by Maiga P. (Annu. Rev. Plant Biol. 55, 289 (2004)), Evans T. (WO 2004/040973), McBride K. E. et al. (U.S. Pat. No. 5,455,818), Daniell H. et al. (U.S. Pat. No. 5,932,479 and U.S. Pat. No. 5,693,507) and Straub J. M. et al. (U.S. Pat. No. 6,781,033). A preferred method is the transformation of microspore-derived hypocotyl or cotyledonary tissue (which are green and thus contain numerous plastids) leaf tissue and afterwards the regeneration of shoots from said transformed plant material on selective medium. As methods for the transformation bombarding of the plant material or the use of independently replicating shuttle vectors are well known by the skilled worker. But also a PEG-mediated transformation of the plastids or Agrobacterium transformation with binary vectors is possible. Useful markers for the transformation of plastids are positive selection markers for example the chloramphenicol-, streptomycin-, kanamycin-, neomycin-, amikamycin-, spectinomycin-, triazine- and/or lincomycin-tolerance genes. As additional markers named in the literature often as secondary markers, genes coding for the tolerance against herbicides such as phosphinothricin (=glufosinate, BASTA™, Liberty™, encoded by the bar gene), glyphosate (═N-(phosphonomethyl)glycine, Roundup™, encoded by the 5-enolpyruvylshikimate-3-phosphate synthase gene=epsps), sulfonylureas (like Staple™, encoded by the acetolactate synthase (ALS) gene), imidazolinones [=IMI, like imazethapyr, imazamox, Clearfield™, encoded by the acetohydroxy acid synthase (AHAS) gene, also known as acetolactate synthase (ALS) gene] or bromoxynil (=Buctril™, encoded by the oxy gene) or genes coding for antibiotics such as hygromycin or G418 are useful for further selection. Such secondary markers are useful in the case when most genome copies are transformed. In addition negative selection markers such as the bacterial cytosine deaminase (encoded by the codA gene) are also useful for the transformation of plastids.

[0314] To increase the possibility of identification of transformants it is also desirable to use reporter genes other then the aforementioned tolerance genes or in addition to said genes. Reporter genes are for example β-galactosidase-, β-glucuronidase-(GUS), alkaline phosphatase- and/or green-fluorescent protein-genes (GFP).

[0315] In a preferred embodiment a nucleic acid construct, for example an expression cassette, comprises upstream, i.e. at the 5′ end of the encoding sequence, a promoter and downstream, i.e. at the 3′ end, a polyadenylation signal and optionally other regulatory elements which are operably linked to the intervening encoding sequence with one of the nucleic acids of SEQ ID NO as depicted in table I, column 5 and 7. By an operable linkage is meant the sequential arrangement of promoter, encoding sequence, terminator and optionally other regulatory elements in such a way that each of the regulatory elements can fulfill its function in the expression of the encoding sequence in due manner. In one embodiment the sequences preferred for operable linkage are targeting sequences for ensuring subcellular localization in plastids. However, targeting sequences for ensuring subcellular localization in the mitochondrium, in the endoplasmic reticulum (=ER), in the nucleus, in oil corpuscles or other compartments may also be employed as well as translation promoters such as the 5′ lead sequence in tobacco mosaic virus (Gallie et al., Nucl. Acids Res. 15 8693 (1987)).

[0316] A nucleic acid construct, for example an expression cassette may, for example, contain a constitutive promoter or a tissue-specific promoter (preferably the USP or napin promoter) the gene to be expressed and the ER retention signal. For the ER retention signal the KDEL amino acid sequence (lysine, aspartic acid, glutamic acid, leucine) or the KKX amino acid sequence (lysine-lysine-X-stop, wherein X means every other known amino acid) is preferably employed.

[0317] For expression in a host organism, for example a plant, the expression cassette is advantageously inserted into a vector such as by way of example a plasmid, a phage or other DNA which allows optimal expression of the genes in the host organism. Examples of suitable plasmids are: in E. coli pLG338, pACYC184, pBR series such as e.g. pBR322, pUC series such as pUC18 or pUC19, M113 mp series, pKC30, pRep4, pHS1, pHS2, pPLc236, pMBL24, pLG200, pUR290, pIN-III113-B1, λgt11 or pBdCl; in Streptomyces pIJ101, pIJ364, pIJ702 or pIJ361; in Bacillus pUB110, pC194 or pBD214; in Corynebacterium pSA77 or pAJ667; in fungi pALS1, pIL2 or pBB116; other advantageous fungal vectors are described by Romanos M. A. et al., Yeast 8, 423 (1992) and by van den Hondel, C. A. M. J. J. et al. [(1991) “Heterologous gene expression in filamentous fungi”] as well as in “More Gene Manipulations” in “Fungi” in Bennet J. W. & Lasure L. L., eds., pp. 396-428, Academic Press, San Diego, and in “Gene transfer systems and vector development for filamentous fungi” [van den Hondel, C. A. M. J. J. & Punt, P. J. (1991) in: Applied Molecular Genetics of Fungi, Peberdy, J. F. et al., eds., pp. 1-28, Cambridge University Press: Cambridge]. Examples of advantageous yeast promoters are 2 μM, pAG-1, YEp6, YEp13 or pEMBLYe23. Examples of algal or plant promoters are pLGV23, pGHlac+, pBIN19, pAK2004, pVKH or pDH51 (see Schmidt, R. and Willmitzer, L., Plant Cell Rep. 7, 583 (1988))). The vectors identified above or derivatives of the vectors identified above are a small selection of the possible plasmids. Further plasmids are well known to those skilled in the art and may be found, for example, in “Cloning Vectors” (Eds. Pouwels P. H. et al. Elsevier, Amsterdam-New York-Oxford, 1985, ISBN 0 444 904018). Suitable plant vectors are described inter alia in “Methods in Plant Molecular Biology and Biotechnology” (CRC Press, Ch. 6/7, pp. 71-119). Advantageous vectors are known as shuttle vectors or binary vectors which replicate in E. coli and Agrobacterium.

[0318] In a further embodiment of the vector the expression cassette according to the invention may also advantageously be introduced into the organisms in the form of a linear DNA and be integrated into the genome of the host organism by way of heterologous or homologous recombination. This linear DNA may be composed of a linearized plasmid or only of the expression cassette as vector or the nucleic acid sequences according to the invention.

[0319] A nucleic acid sequence can also be introduced into an organism on its own.

[0320] If in addition to the nucleic acid sequence according to the invention further genes are to be introduced into the organism, all together with a reporter gene in a single vector or each single gene with a reporter gene in a vector in each case can be introduced into the organism, whereby the different vectors can be introduced simultaneously or successively.

[0321] The vector advantageously contains at least one copy of the nucleic acid sequences according to the invention and/or the expression cassette (=gene construct) according to the invention.

[0322] The invention further provides an isolated recombinant expression vector comprising a nucleic acid encoding a polypeptide as depicted in table II, column 5 or 7, wherein expression of the vector in a host cell results in increased yield, e.g. increased yield-related trait, for example enhanced tolerance to abiotic environmental stress, for example an increased drought tolerance and/or low temperature tolerance and/or an increased nutrient use efficiency, intrinsic yield and/or another mentioned yield-related trait as compared to a wild type variety of the host cell.

[0323] The recombinant expression vectors of the invention comprise a nucleic acid of the invention in a form suitable for expression of the nucleic acid in a host cell, which means that the recombinant expression vectors include one or more regulatory sequences, selected on the basis of the host cells to be used for expression, which is operatively linked to the nucleic acid sequence to be expressed. It will be appreciated by those skilled in the art that the design of the expression vector can depend on such factors as the choice of the host cell to be transformed, the level of expression of polypeptide desired, etc. The expression vectors of the invention can be introduced into host cells to thereby produce polypeptides or peptides, including fusion polypeptides or peptides, encoded by nucleic acids as described herein.

[0324] The recombinant expression vectors of the invention can be designed for expression of the polypeptide of the invention in plant cells. For example, nucleic acid molecules of the present invention can be expressed in plant cells (see Schmidt R., and Willmitzer L., Plant Cell Rep. 7 (1988); Plant Molecular Biology and Biotechnology, C Press, Boca Raton, Fla., Chapter 6/7, p. 71-119 (1993); White F. F., Jenes B. et al., Techniques for Gene Transfer, in: Trans-genic Plants, Vol. 1, Engineering and Utilization, eds. Kung and Wu R., 128-43, Academic Press: 1993; Potrykus, Annu. Rev. Plant Physiol. Plant Molec. Biol. 42, 205 (1991) and references cited therein). Suitable host cells are discussed further in Goeddel, Gene Expression Technology: Methods in Enzymology 185, Academic Press: San Diego, Calif. (1990). By way of example the plant expression cassette can be installed in the pRT transformation vector ((a) Toepfer et al., Methods Enzymol. 217, 66 (1993), (b) Toepfer et al., Nucl. Acids. Res. 15, 5890 (1987)). Alternatively, a recombinant vector (=expression vector) can also be transcribed and translated in vitro, e.g. by using the T7 promoter and the T7 RNA polymerase.

[0325] In an further embodiment of the present invention, the nucleic acid molecules of the invention are expressed in plants and plants cells such as unicellular plant cells (e.g. algae) (see Falciatore et al., Marine Biotechnology 1 (3), 239 (1999) and references therein) and plant cells from higher plants (e.g., the spermatophytes, such as crop plants), for example to regenerate plants from the plant cells. A nucleic acid molecule depicted in table II, column 5 or 7 may be “introduced” into a plant cell by any means, including transfection, transformation or transduction, electroporation, particle bombardment, agroinfection, and the like. One transformation method known to those of skill in the art is the dipping of a flowering plant into an Agrobacteria solution, wherein the Agrobacteria contains the nucleic acid of the invention, followed by breeding of the transformed gametes. Other suitable methods for transforming or transfecting host cells including plant cells can be found in Sambrook et al., supra, and other laboratory manuals such as Methods in Molecular Biology, 1995, Vol. 44, Agrobacterium protocols, ed: Gartland and Davey, Humana Press, Totowa, N.J.

[0326] In one embodiment of the present invention, transfection of a nucleic acid molecule coding for a nucleic acid molecule depicted in table II, column 5 or 7 into a plant is achieved by Agrobacterium mediated gene transfer. Agrobacterium mediated plant transformation can be performed using for example the GV3101(pMP90) (Koncz and Schell, Mol. Gen. Genet. 204, 383 (1986)) or LBA4404 (Clontech) Agrobacterium tumefaciens strain. Transformation can be performed by standard transformation and regeneration techniques (Deblaere et al., Nucl. Acids Res. 13, 4777 (1994), Gelvin, Stanton B. and Schilperoort Robert A, Plant Molecular Biology Manual, 2nd Ed.—Dordrecht: Kluwer Academic Publ., 1995.—in Sect., Ringbuc Zentrale Signatur: BT11-P ISBN 0-7923-2731-4; Glick Bernard R., Thompson John E., Methods in Plant Molecular Biology and Biotechnology, Boca Raton: CRC Press, 1993 360 S., ISBN 0-8493-5164-2). For example, rapeseed can be transformed via cotyledon or hypocotyl transformation (Moloney et al., Plant Cell Report 8, 238 (1989); De Block et al., Plant Physiol. 91, 694 (1989)). Use of antibiotics for Agrobacterium and plant selection depends on the binary vector and the Agrobacterium strain used for transformation. Rapeseed selection is normally performed using kanamycin as selectable plant marker. Agrobacterium mediated gene transfer to flax can be performed using, for example, a technique described by Mlynarova et al., Plant Cell Report 13, 282 (1994). Additionally, transformation of soybean can be performed using for example a technique described in European Patent No. 424 047, U.S. Pat. No. 5,322,783, European Patent No. 397 687, U.S. Pat. No. 5,376,543 or U.S. Pat. No. 5,169,770. Transformation of maize can be achieved by particle bombardment, polyethylene glycol mediated DNA uptake or via the silicon carbide fiber technique. (See, for example, Freeling and Walbot “The maize handbook” Springer Verlag New York (1993) ISBN 3-540-97826-7). A specific example of maize transformation is found in U.S. Pat. No. 5,990,387, and a specific example of wheat transformation can be found in PCT Application No. WO 93/07256.

[0327] According to the present invention, the introduced nucleic acid molecule coding for a polypeptides depicted in table II, column 5 or 77, or homologs thereof, may be maintained in the plant cell stably if it is incorporated into a non-chromosomal autonomous replicon or integrated into the plant chromosomes or organelle genome. Alternatively, the introduced nucleic acid molecule may be present on an extra-chromosomal non-replicating vector and be transiently expressed or transiently active.

[0328] In one embodiment, a homologous recombinant microorganism can be created wherein the nucleic acid molecule is integrated into a chromosome, a vector is prepared which contains at least a portion of a nucleic acid molecule coding for a protein depicted in table II, column 5 or 7 into which a deletion, addition, or substitution has been introduced to thereby alter, e.g., functionally disrupt, the gene. For example, the gene is a yeast gene, like a gene of S. cerevisiae, or of Synechocystis, or a bacterial gene, like an E. coli gene, but it can be a homolog from a related plant or even from a mammalian or insect source. The vector can be designed such that, upon homologous recombination, the endogenous nucleic acid molecule coding for a protein depicted in table II, column 5 or 7 is mutated or otherwise altered but still encodes a functional polypeptide (e.g., the upstream regulatory region can be altered to thereby alter the expression of the endogenous nucleic acid molecule). In a preferred embodiment the biological activity of the protein of the invention is increased upon homologous recombination. To create a point mutation via homologous recombination, DNA-RNA hybrids can be used in a technique known as chimeraplasty (Cole-Strauss et al., Nucleic Acids Research 27 (5), 1323 (1999) and Kmiec, Gene Therapy American Scientist. 87 (3), 240 (1999)). Homologous recombination procedures in Physcomitrella patens are also well known in the art and are contemplated for use herein.

[0329] Whereas in the homologous recombination vector, the altered portion of the nucleic acid molecule coding for a protein depicted in table II, column 5 or 7 is flanked at its 5′ and 3′ ends by an additional nucleic acid molecule of the gene to allow for homologous recombination to occur between the exogenous gene carried by the vector and an endogenous gene, in a microorganism or plant. The additional flanking nucleic acid molecule is of sufficient length for successful homologous recombination with the endogenous gene. Typically, several hundreds of base pairs up to kilobases of flanking DNA (both at the 5′ and 3′ ends) are included in the vector. See, e.g., Thomas K. R., and Capecchi M. R., Cell 51, 503 (1987) for a description of homologous recombination vectors or Strepp et al., PNAS, 95 (8), 4368 (1998) for cDNA based recombination in Physcomitrella patens. The vector is introduced into a microorganism or plant cell (e.g. via polyethylene glycol mediated DNA), and cells in which the introduced gene has homologously recombined with the endogenous gene are selected using art-known techniques.

[0330] Whether present in an extra-chromosomal non-replicating vector or a vector that is integrated into a chromosome, the nucleic acid molecule coding for a nucleic acid molecules depicted in table II, column 5 or 7 preferably resides in a plant expression cassette. A plant expression cassette preferably contains regulatory sequences capable of driving gene expression in plant cells that are operatively linked so that each sequence can fulfill its function, for example, termination of transcription by polyadenylation signals. Preferred polyadenylation signals are those originating from Agrobacterium tumefaciens t-DNA such as the gene 3 known as α-topine synthase of the Ti-plasmid pTiACH5 (Gielen et al., EMBO J. 3, 835 (1984)) or functional equivalents thereof but also all other terminators functionally active in plants are suitable. As plant gene expression is very often not limited on transcriptional levels, a plant expression cassette preferably contains other operatively linked sequences like translational enhancers such as the overdrive-sequence containing the 5′-untranslated leader sequence from tobacco mosaic virus enhancing the polypeptide per RNA ratio (Gallie et al., Nucl. Acids Research 15, 8693 (1987)). Examples of plant expression vectors include those detailed in: Becker D. et al., Plant Mol. Biol. 20, 1195 (1992); and Bevan M. W., Nucl. Acid. Res. 12, 8711 (1984); and “Vectors for Gene Transfer in Higher Plants” in: Transgenic Plants, Vol. 1, Engineering and Utilization, eds. Kung and Wu R., Academic Press, 1993, S. 15-38.

[0331] The host organism (=transgenic organism) advantageously contains at least one copy of the nucleic acid according to the invention and/or of the nucleic acid construct according to the invention.

[0332] As increased tolerance to abiotic environmental stress and/or yield is a general trait wished to be inherited into a wide variety of plants like maize, wheat, rye, oat, triticale, rice, barley, soybean, peanut, cotton, rapeseed and canola, manihot, pepper, sunflower and tagetes, solanaceous plants like potato, tobacco, eggplant, and tomato, Vicia species, pea, alfalfa, bushy plants (coffee, cacao, tea), Salix species, trees (oil palm, coconut), perennial grasses, and forage crops, these crop plants are also preferred target plants for a genetic engineering as one further embodiment of the present invention. Forage crops include, but are not limited to Wheatgrass, Canarygrass, Bromegrass, Wildrye Grass, Bluegrass, Orchardgrass, Alfalfa, Salfoin, Birdsfoot Trefoil, Alsike Clover, Red Clover and Sweet Clover.

[0333] In principle all plants can be used as host organism. Preferred transgenic plants are, for example, selected from the families Aceraceae, Anacardiaceae, Apiaceae, Asteraceae, Brassicaceae, Cactaceae, Cucurbitaceae, Euphorbiaceae, Fabaceae, Malvaceae, Nymphaeaceae, Papaveraceae, Rosaceae, Salicaceae, Solanaceae, Arecaceae, Bromeliaceae, Cyperaceae, Iridaceae, Liliaceae, Orchidaceae, Gentianaceae, Labiaceae, Magnoliaceae, Ranunculaceae, Carifolaceae, Rubiaceae, Scrophulariaceae, Caryophyllaceae, Ericaceae, Polygonaceae, Violaceae, Juncaceae or Poaceae and preferably from a plant selected from the group of the families Apiaceae, Asteraceae, Brassicaceae, Cucurbitaceae, Fabaceae, Papaveraceae, Rosaceae, Solanaceae, Liliaceae or Poaceae. Preferred are crop plants such as plants advantageously selected from the group of the genus peanut, oilseed rape, canola, sunflower, safflower, olive, sesame, hazelnut, almond, avocado, bay, pumpkin/squash, linseed, soya, pistachio, borage, maize, wheat, rye, oats, sorghum and millet, triticale, rice, barley, cassava, potato, sugarbeet, egg plant, alfalfa, and perennial grasses and forage plants, oil palm, vegetables (brassicas, root vegetables, tuber vegetables, pod vegetables, fruiting vegetables, onion vegetables, leafy vegetables and stem vegetables), buckwheat, Jerusalem artichoke, broad bean, vetches, lentil, dwarf bean, lupin, clover and Lucerne for mentioning only some of them.

[0334] In one embodiment of the invention transgenic plants are selected from the group comprising cereals, soybean, rapeseed (including oil seed rape, especially canola and winter oil seed rape), cotton, sugarcane, sugar beet and potato, especially corn, soy, rapeseed (including oil seed rape, especially canola and winter oil seed rape), cotton, wheat and rice.

[0335] In another embodiment of the invention the transgenic plant is a gymnosperm plant, especially a spruce, pine or fir.

[0336] In one embodiment, the host plant is selected from the families Aceraceae, Anacardiaceae, Apiaceae, Asteraceae, Brassicaceae, Cactaceae, Cucurbitaceae, Euphorbiaceae, Fabaceae, Malvaceae, Nymphaeaceae, Papaveraceae, Rosaceae, Salicaceae, Solanaceae, Arecaceae, Bromeliaceae, Cyperaceae, lridaceae, Liliaceae, Orchidaceae, Gentianaceae, Labiaceae, Magnoliaceae, Ranunculaceae, Carifolaceae, Rubiaceae, Scrophulariaceae, Caryophyllaceae, Ericaceae, Polygonaceae, Violaceae, Juncaceae or Poaceae and preferably from a plant selected from the group of the families Apiaceae, Asteraceae, Brassicaceae, Cucurbitaceae, Fabaceae, Papaveraceae, Rosaceae, Solanaceae, Liliaceae or Poaceae. Preferred are crop plants and in particular plants mentioned herein above as host plants such as the families and genera mentioned above for example preferred the species Anacardium occidentale, Calendula officinalis, Carthamus tinctorius, Cichorium intybus, Cynara scolymus, Helianthus annus, Tagetes lucida, Tagetes erecta, Tagetes tenuifolia; Daucus carota; Corylus avellana, Corylus colurna, Borago officinalis; Brassica napus, Brassica rapa ssp., Sinapis arvensis Brassica juncea, Brassica juncea var. juncea, Brassica juncea var. crispifolia, Brassica juncea var. foliosa, Brassica nigra, Brassica sinapioides, Melanosinapis communis, Brassica oleracea, Arabidopsis thaliana, Anana comosus, Ananas ananas, Bromelia comosa, Carica papaya, Cannabis sative, Ipomoea batatus, Ipomoea pandurata, Convolvulus batatas, Convolvulus tiliaceus, Ipomoea fastigiata, Ipomoea tiliacea, Ipomoea triloba, Convolvulus panduratus, Beta vulgaris, Beta vulgaris var. altissima, Beta vulgaris var. vulgaris, Beta maritima, Beta vulgaris var. perennis, Beta vulgaris var. conditiva, Beta vulgaris var. esculenta, Cucurbita maxima, Cucurbita mixta, Cucurbita pepo, Cucurbita moschata, Olea europaea, Manihot utilissima, Janipha manihot, Jatropha manihot, Manihot aipil, Manihot dulcis, Manihot manihot, Manihot melanobasis, Manihot esculenta, Ricinus communis, Pisum sativum, Pisum arvense, Pisum humile, Medicago sativa, Medicago falcata, Medicago varia, Glycine max Dolichos soja, Glycine gracilis, Glycine hispida, Phaseolus max, Soja hispida, Soja max, Cocos nucifera, Pelargonium grossularioides, Oleum cocoas, Laurus nobilis, Persea americana, Arachis hypogaea, Linum usitatissimum, Linum humile, Linum austriacum, Linum bienne, Linum angustifolium, Linum catharticum, Linum flavum, Linum grandiflorum, Adenolinum grandiflorum, Linum lewisii, Linum narbonense, Linum perenne, Linum perenne var. lewisii, Linum pratense, Linum trigynum, Punica granatum, Gossypium hirsutum, Gossypium arboreum, Gossypium barbadense, Gossypium herbaceum, Gossypium thurberi, Musa nana, Musa acuminata, Musa paradisiaca, Musa spp., Elaeis guineensis, Papaver orientale, Papaver rhoeas, Papaver dubium, Sesamum indicum, Piper aduncum, Piper amalago, Piper angustifolium, Piper auritum, Piper betel, Piper cubeba, Piper longum, Piper nigrum, Piper retrofractum, Artanthe adunca, Artanthe elongata, Peperomia elongata, Piper elongatum, Steffensia elongata, Hordeum vulgare, Hordeum jubatum, Hordeum murinum, Hordeum secalinum, Hordeum distichon Hordeum aegiceras, Hordeum hexastichon, Hordeum hexastichum, Hordeum irregulare, Hordeum sativum, Hordeum secalinum, Avena sativa, Avena fatua, Avena byzantina, Avena fatua var. sativa, Avena hybrida, Sorghum bicolor, Sorghum halepense, Sorghum saccharatum, Sorghum vulgare, Andropogon drummondii, Holcus bicolor, Holcus sorghum, Sorghum aethiopicum, Sorghum arundinaceum, Sorghum caffrorum, Sorghum cernuum, Sorghum dochna, Sorghum drummondii, Sorghum durra, Sorghum guineense, Sorghum lanceolatum, Sorghum nervosum, Sorghum saccharatum, Sorghum subglabrescens, Sorghum verticilliflorum, Sorghum vulgare, Holcus halepensis, Sorghum miliaceum millet, Panicum militaceum, Zea mays, Triticum aestivum, Triticum durum, Triticum turgidum, Triticum hybernum, Triticum macha, Triticum sativum or Triticum vulgare, Cofea spp., Coffea arabica, Coffea canephora, Coffea liberica, Capsicum annuum, Capsicum annuum var. glabriusculum, Capsicum frutescens, Capsicum annuum, Nicotiana tabacum, Solanum tuberosum, Solanum melongena, Lycopersicon esculentum, Lycopersicon lycopersicum, Lycopersicon pyriforme, Solanum integrifolium, Solanum lycopersicum Theobroma cacao or Camellia sinensis.

[0337] Anacardiaceae such as the genera Pistacia, Mangifera, Anacardium e.g. the species Pistacia vera [pistachios, Pistazie], Mangifer indica [Mango] or Anacardium occidentale [Cashew]; Asteraceae such as the genera Calendula, Carthamus, Centaurea, Cichorium, Cynara, Helianthus, Lactuca, Locusta, Tagetes, Valeriana e.g. the species Calendula officinalis [Marigold], Carthamus tinctorius [safflower], Centaurea cyanus [cornflower], Cichorium intybus [blue daisy], Cynara scolymus [Artichoke], Helianthus annus [sunflower], Lactuca sativa, Lactuca crispa, Lactuca esculenta, Lactuca scariola L. ssp. sativa, Lactuca scariola L. var. integrata, Lactuca scariola L. var. integrifolia, Lactuca sativa subsp. romana, Locusta communis, Valeriana locusta [lettuce], Tagetes lucida, Tagetes erecta or Tagetes tenuifolia [Marigold]; Apiaceae such as the genera Daucus e.g. the species Daucus carota [carrot]; Betulaceae such as the genera Corylus e.g. the species Corylus avellana or Corylus colurna [hazelnut]; Boraginaceae such as the genera Borago e.g. the species Borago officinalis [borage]; Brassicaceae such as the genera Brassica, Melanosinapis, Sinapis, Arabadopsis e.g. the species Brassica napus, Brassica rapa ssp. [canola, oilseed rape, turnip rape], Sinapis arvensis Brassica juncea, Brassica juncea var. juncea, Brassica juncea var. crispifolia, Brassica juncea var. foliosa, Brassica nigra, Brassica sinapioides, Melanosinapis communis [mustard], Brassica oleracea [fodder beet] or Arabidopsis thaliana; Bromeliaceae such as the genera Anana, Bromelia e.g. the species Anana comosus, Ananas ananas or Bromelia comosa [pineapple]; Caricaceae such as the genera Carica e.g. the species Carica papaya [papaya]; Cannabaceae such as the genera Cannabis e.g. the species Cannabis sative [hemp], Convolvulaceae such as the genera Ipomea, Convolvulus e.g. the species Ipomoea batatus, Ipomoea pandurata, Convolvulus batatas, Convolvulus tiliaceus, Ipomoea fastigiata, Ipomoea tiliacea, Ipomoea triloba or Convolvulus panduratus [sweet potato, Man of the Earth, wild potato], Chenopodiaceae such as the genera Beta, i.e. the species Beta vulgaris, Beta vulgaris var. altissima, Beta vulgaris var. Vulgaris, Beta maritima, Beta vulgaris var. perennis, Beta vulgaris var. conditiva or Beta vulgaris var. esculenta [sugar beet]; Cucurbitaceae such as the genera Cucubita e.g. the species Cucurbita maxima, Cucurbita mixta, Cucurbita pepo or Cucurbita moschata [pumpkin, squash]; Elaeagnaceae such as the genera Elaeagnus e.g. the species Olea europaea [olive]; Ericaceae such as the genera Kalmia e.g. the species Kalmia latifolia, Kalmia angustifolia, Kalmia microphylla, Kalmia polifolia, Kalmia occidentalis, Cistus chamaerhodendros or Kalmia lucida [American laurel, broad-leafed laurel, calico bush, spoon wood, sheep laurel, alpine laurel, bog laurel, western bog-laurel, swamp-laurel]; Euphorbiaceae such as the genera Manihot, Janipha, Jatropha, Ricinus e.g. the species Manihot utilissima, Janipha manihot, Jatropha manihot, Manihot aipil, Manihot dulcis, Manihot manihot, Manihot melanobasis, Manihot esculenta [manihot, arrowroot, tapioca, cassaya] or Ricinus communis [castor bean, Castor Oil Bush, Castor Oil Plant, Palma Christi, Wonder Tree]; Fabaceae such as the genera Pisum, Albizia, Cathormion, Feuillea, Inga, Pithecolobium, Acacia, Mimosa, Medicajo, Glycine, Dolichos, Phaseolus, Soja e.g. the species Pisum sativum, Pisum arvense, Pisum humile [pea], Albizia berteriana, Albizia julibrissin, Albizia lebbeck, Acacia berteriana, Acacia littoralis, Albizia berteriana, Albizzia berteriana, Cathormion berteriana, Feuillea berteriana, Inga fragrans, Pithecellobium berterianum, Pithecellobium fragrans, Pithecolobium berterianum, Pseudalbizzia berteriana, Acacia julibrissin, Acacia nemu, Albizia nemu, Feuilleea julibrissin, Mimosa julibrissin, Mimosa speciosa, Sericanrda julibrissin, Acacia lebbeck, Acacia macrophylla, Albizia lebbek, Feuilleea lebbeck, Mimosa lebbeck, Mimosa speciosa [bastard logwood, silk tree, East Indian Walnut], Medicago sativa, Medicago falcata, Medicago varia [alfalfa] Glycine max Dolichos soja, Glycine gracilis, Glycine hispida, Phaseolus max, Soja hispida or Soja max [soybean]; Geraniaceae such as the genera Pelargonium, Cocos, Oleum e.g. the species Cocos nucifera, Pelargonium grossularioides or Oleum cocois [coconut]; Gramineae such as the genera Saccharum e.g. the species Saccharum officinarum; Juglandaceae such as the genera Juglans, Wallia e.g. the species Juglans regia, Juglans ailanthifolia, Juglans sieboldiana, Juglans cinerea, Wallia cinerea, Juglans bixbyi, Juglans californica, Juglans hindsii, Juglans intermedia, Juglans jamaicensis, Juglans major, Juglans microcarpa, Juglans nigra or Wallia nigra [walnut, black walnut, common walnut, persian walnut, white walnut, butternut, black walnut]; Lauraceae such as the genera Persea, Laurus e.g. the species laurel Laurus nobilis [bay, laurel, bay laurel, sweet bay], Persea americana Persea americana, Persea gratissima or Persea persea [avocado]; Leguminosae such as the genera Arachis e.g. the species Arachis hypogaea [peanut]; Linaceae such as the genera Linum, Adenolinum e.g. the species Linum usitatissimum, Linum humile, Linum austriacum, Linum bienne, Linum angustifolium, Linum catharticum, Linum flavum, Linum grandiflorum, Adenolinum grandiflorum, Linum lewisii, Linum narbonense, Linum perenne, Linum perenne var. lewisii, Linum pratense or Linum trigynum [flax, linseed]; Lythrarieae such as the genera Punica e.g. the species Punica granatum [pomegranate]; Malvaceae such as the genera Gossypium e.g. the species Gossypium hirsutum, Gossypium arboreum, Gossypium barbadense, Gossypium herbaceum or Gossypium thurberi [cotton]; Musaceae such as the genera Musa e.g. the species Musa nana, Musa acuminata, Musa paradisiaca, Musa spp. [banana]; Onagraceae such as the genera Camissonia, Oenothera e.g. the species Oenothera biennis or Camissonia brevipes [primrose, evening primrose]; Palmae such as the genera Elacis e.g. the species Elaeis guineensis [oil plam]; Papaveraceae such as the genera Papaver e.g. the species Papaver orientale, Papaver rhoeas, Papaver dubium [poppy, oriental poppy, corn poppy, field poppy, shirley poppies, field poppy, long-headed poppy, long-pod poppy]; Pedaliaceae such as the genera Sesamum e.g. the species Sesamum indicum [sesame]; Piperaceae such as the genera Piper, Artanthe, Peperomia, Steffensia e.g. the species Piper aduncum, Piper amalago, Piper angustifolium, Piper auritum, Piper betel, Piper cubeba, Piper longum, Piper nigrum, Piper retrofractum, Artanthe adunca, Artanthe elongata, Peperomia elongata, Piper elongatum, Steffensia elongata. [Cayenne pepper, wild pepper]; Poaceae such as the genera Hordeum, Secale, Avena, Sorghum, Andropogon, Holcus, Panicum, Oryza, Zea, Triticum e.g. the species Hordeum vulgare, Hordeum jubatum, Hordeum murinum, Hordeum secalinum, Hordeum distichon Hordeum aegiceras, Hordeum hexastichon, Hordeum hexastichum, Hordeum irregulare, Hordeum sativum, Hordeum secalinum [barley, pearl barley, foxtail barley, wall barley, meadow barley], Secale cereale [rye], Avena sativa, Avena fatua, Avena byzantina, Avena fatua var. sativa, Avena hybrida [oat], Sorghum bicolor, Sorghum halepense, Sorghum saccharatum, Sorghum vulgare, Andropogon drummondii, Holcus bicolor, Holcus sorghum, Sorghum aethiopicum, Sorghum arundinaceum, Sorghum caffrorum, Sorghum cernuum, Sorghum dochna, Sorghum drummondii, Sorghum durra, Sorghum guineense, Sorghum lanceolatum, Sorghum nervosum, Sorghum saccharatum, Sorghum subglabrescens, Sorghum verticilliflorum, Sorghum vulgare, Holcus halepensis, Sorghum miliaceum millet, Panicum militaceum [Sorghum, millet], Oryza sativa, Oryza latifolia [rice], Zea mays [corn, maize] Triticum aestivum, Triticum durum, Triticum turgidum, Triticum hybernum, Triticum macha, Triticum sativum or Triticum vulgare [wheat, bread wheat, common wheat], Proteaceae such as the genera Macadamia e.g. the species Macadamia intergrifolia [macadamia]; Rubiaceae such as the genera Coffea e.g. the species Cofea spp., Coffea arabica, Coffea canephora or Coffea liberica [coffee]; Scrophulariaceae such as the genera Verbascum e.g. the species Verbascum blattaria, Verbascum chaixii, Verbascum densiflorum, Verbascum lagurus, Verbascum longifolium, Verbascum lychnitis, Verbascum nigrum, Verbascum olympicum, Verbascum phlomoides, Verbascum phoenicum, Verbascum pulverulentum or Verbascum thapsus [mullein, white moth mullein, nettle-leaved mullein, dense-flowered mullein, silver mullein, long-leaved mullein, white mullein, dark mullein, greek mullein, orange mullein, purple mullein, hoary mullein, great mullein]; Solanaceae such as the genera Capsicum, Nicotiana, Solanum, Lycopersicon e.g. the species Capsicum annuum, Capsicum annuum var. glabriusculum, Capsicum frutescens [pepper], Capsicum annuum [paprika], Nicotiana tabacum, Nicotiana alata, Nicotiana attenuata, Nicotiana glauca, Nicotiana langsdorffii, Nicotiana obtusifolia, Nicotiana quadrivalvis, Nicotiana repanda, Nicotiana rustica, Nicotiana sylvestris [tobacco], Solanum tuberosum [potato], Solanum melongena [egg-plant] (Lycopersicon esculentum, Lycopersicon lycopersicum, Lycopersicon pyriforme, Solanum integrifolium or Solanum lycopersicum [tomato]; Sterculiaceae such as the genera Theobroma e.g. the species Theobroma cacao [cacao]; Theaceae such as the genera Camellia e.g. the species Camellia sinensis) [tea].

[0338] The introduction of the nucleic acids according to the invention, the expression cassette or the vector into organisms, plants for example, can in principle be done by all of the methods known to those skilled in the art. The introduction of the nucleic acid sequences gives rise to recombinant or transgenic organisms.

[0339] The transfer of foreign genes into the genome of a plant is called transformation. In doing this the methods described for the transformation and regeneration of plants from plant tissues or plant cells are utilized for transient or stable transformation. Suitable methods are protoplast transformation by poly(ethylene glycol)-induced DNA uptake, the “biolistic” method using the gene cannon—referred to as the particle bombardment method, electroporation, the incubation of dry embryos in DNA solution, microinjection and gene transfer mediated by Agrobacterium. Said methods are described by way of example in Jenes B. et al., Techniques for Gene Transfer, in: Transgenic Plants, Vol. 1, Engineering and Utilization, eds. Kung S. D and Wu R., Academic Press (1993) 128-143 and in Potrykus, Annu. Rev. Plant Physiol. Plant Molec. Biol. 42, 205 (1991). The nucleic acids or the construct to be expressed is preferably cloned into a vector which is suitable for transforming Agrobacterium tumefaciens, for example pBin19 (Bevan et al., Nucl. Acids Res. 12, 8711 (1984)). Agrobacteria transformed by such a vector can then be used in known manner for the transformation of plants, in particular of crop plants such as by way of example tobacco plants, for example by bathing bruised leaves or chopped leaves in an agrobacterial solution and then culturing them in suitable media. The transformation of plants by means of Agrobacterium tumefaciens is described, for example, by Höfgen and Willmitzer in Nucl. Acid Res. 16, 9877 (1988) or is known inter alia from White F. F., Vectors for Gene Transfer in Higher Plants; in Transgenic Plants, Vol. 1, Engineering and Utilization, eds. Kung S. D. and Wu R., Academic Press, 1993, pp. 15-38.

[0340] Agrobacteria transformed by an expression vector according to the invention may likewise be used in known manner for the transformation of plants such as test plants like Arabidopsis or crop plants such as cereal crops, corn, oats, rye, barley, wheat, soybean, rice, cotton, sugar beet, canola, sunflower, flax, hemp, potatoes, tobacco, tomatoes, carrots, paprika, oilseed rape, tapioca, cassaya, arrowroot, tagetes, alfalfa, lettuce and the various tree, nut and vine species, in particular oil-containing crop plants such as soybean, peanut, castor oil plant, sunflower, corn, cotton, flax, oilseed rape, coconut, oil palm, safflower (Carthamus tinctorius) or cocoa bean, or in particular corn, wheat, soybean, rice, cotton and canola, e.g. by bathing bruised leaves or chopped leaves in an agrobacterial solution and then culturing them in suitable media.

[0341] The genetically modified plant cells may be regenerated by all of the methods known to those skilled in the art. Appropriate methods can be found in the publications referred to above by Kung S. D. and Wu R., Potrykus or Hofgen and Willmitzer.

[0342] Accordingly, a further aspect of the invention relates to transgenic organisms transformed by at least one nucleic acid sequence, expression cassette or vector according to the invention as well as cells, cell cultures, tissue, parts—such as, for example, leaves, roots, etc. in the case of plant organisms—or reproductive material derived from such organisms.

[0343] In one embodiment of the invention host plants for the nucleic acid, expression cassette or vector according to the invention are selected from the group comprising corn, soy, oil seed rape (including canola and winter oil seed rape), cotton, wheat and rice.

[0344] A further embodiment of the invention relates to the use of a nucleic acid construct, e.g. an expression cassette, containing one or more DNA sequences encoding one or more polypeptides shown in table II or comprising one or more nucleic acid molecules as depicted in table I or encoding or DNA sequences hybridizing therewith for the transformation of plant cells, tissues or parts of plants.

[0345] In doing so, depending on the choice of promoter, the nucleic acid molecules or sequences shown in table I or II can be expressed specifically in the leaves, in the seeds, the nodules, in roots, in the stem or other parts of the plant. Those transgenic plants overproducing sequences, e.g. as depicted in table I, the reproductive material thereof, together with the plant cells, tissues or parts thereof are a further object of the present invention.

[0346] The expression cassette or the nucleic acid sequences or construct according to the invention containing nucleic acid molecules or sequences according to table I can, moreover, also be employed for the transformation of the organisms identified by way of example above such as bacteria, yeasts, filamentous fungi and plants.

[0347] Within the framework of the present invention, increased yield, e.g. an increased yield-related trait, for example enhanced tolerance to abiotic environmental stress, for example an increased drought tolerance and/or low temperature tolerance and/or an increased nutrient use efficiency, intrinsic yield and/or another mentioned yield-related trait relates to, for example, the artificially acquired trait of increased yield, e.g. an increased yield-related trait, for example enhanced tolerance to abiotic environmental stress, for example an increased drought tolerance and/or low temperature tolerance and/or an increased nutrient use efficiency, intrinsic yield and/or another mentioned yield-related trait, by comparison with the non-genetically modified initial plants e.g. the trait acquired by genetic modification of the target organism, and due to functional over-expression of one or more polypeptide (sequences) of table II, e.g. encoded by the corresponding nucleic acid molecules as depicted in table I, column 5 or 7, and/or homologs, in the organisms according to the invention, advantageously in the transgenic plant according to the invention or produced according to the method of the invention, at least for the duration of at least one plant generation.

[0348] A constitutive expression of the polypeptide sequences of table II, encoded by the corresponding nucleic acid molecule as depicted in table I, column 5 or 7 and/or homologs is, moreover, advantageous. On the other hand, however, an inducible expression may also appear desirable. Expression of the polypeptide sequences of the invention can be either direct to the cytoplasm or the organelles, preferably the plastids of the host cells, preferably the plant cells.

[0349] The efficiency of the expression of the sequences of the of table II, encoded by the corresponding nucleic acid molecule as depicted in table I, column 5 or 7 and/or homologs can be determined, for example, in vitro by shoot meristem propagation. In addition, an expression of the sequences of table II, encoded by the corresponding nucleic acid molecule as depicted in table I, column 5 or 7 and/or homologs modified in nature and level and its effect on yield, e.g. on an increased yield-related trait, for example enhanced tolerance to abiotic environmental stress, for example an increased drought tolerance and/or low temperature tolerance and/or an increased nutrient use efficiency, but also on the metabolic pathways performance can be tested on test plants in greenhouse trials.

[0350] An additional object of the invention comprises transgenic organisms such as trans-genic plants transformed by an expression cassette containing sequences of as depicted in table I, column 5 or 7 according to the invention or DNA sequences hybridizing therewith, as well as transgenic cells, tissue, parts and reproduction material of such plants. Particular preference is given in this case to transgenic crop plants such as by way of example barley, wheat, rye, oats, corn, soybean, rice, cotton, sugar beet, oilseed rape and canola, sunflower, flax, hemp, thistle, potatoes, tobacco, tomatoes, tapioca, cassaya, arrowroot, alfalfa, lettuce and the various tree, nut and vine species.

[0351] In one embodiment of the invention transgenic plants transformed by an expression cassette containing or comprising nucleic acid molecules or sequences as depicted in table I, column 5 or 7, in particular of table IIB, according to the invention or DNA sequences hybridizing therewith are selected from the group comprising corn, soy, oil seed rape (including canola and winter oil seed rape), cotton, wheat and rice.

[0352] For the purposes of the invention plants are mono- and dicotyledonous plants, mosses or algae, especially plants, for example in one embodiment monocotyledonous plants, or for example in another embodiment dicotyledonous plants. A further refinement according to the invention are transgenic plants as described above which contain a nucleic acid sequence or construct according to the invention or a expression cassette according to the invention.

[0353] However, transgenic also means that the nucleic acids according to the invention are located at their natural position in the genome of an organism, but that the sequence, e.g. the coding sequence or a regulatory sequence, for example the promoter sequence, has been modified in comparison with the natural sequence. Preferably, transgenic/recombinant is to be understood as meaning the transcription of one or more nucleic acids or molecules of the invention and being shown in table I, occurs at a non-natural position in the genome. In one embodiment, the expression of the nucleic acids or molecules is homologous. In another embodiment, the expression of the nucleic acids or molecules is heterologous. This expression can be transiently or of a sequence integrated stably into the genome.

[0354] Advantageous inducible plant promoters are by way of example the PRP1 promoter (Ward et al., Plant. Mol. Biol. 22361 (1993)), a promoter inducible by benzenesulfonamide (EP 388 186), a promoter inducible by tetracycline (Gatz et al., Plant J. 2, 397 (1992)), a promoter inducible by salicylic acid (WO 95/19443), a promoter inducible by abscisic acid (EP 335 528) and a promoter inducible by ethanol or cyclohexanone (WO 93/21334). Other examples of plant promoters which can advantageously be used are the promoter of cytoplasmic FBPase from potato, the ST-LSI promoter from potato (Stockhaus et al., EMBO J. 8, 2445 (1989)), the promoter of phosphoribosyl pyrophosphate amidotransferase from Glycine max (see also gene bank accession number U87999) or a nodiene-specific promoter as described in EP 249 676.

[0355] Particular advantageous are those promoters which ensure expression upon onset of abiotic stress conditions. Particular advantageous are those promoters which ensure expression upon onset of low temperature conditions, e.g. at the onset of chilling and/or freezing temperatures as defined hereinabove, e.g. for the expression of nucleic acid molecules as shown in table VIIIb. Advantageous are those promoters which ensure expression upon conditions of limited nutrient availability, e.g. the onset of limited nitrogen sources in case the nitrogen of the soil or nutrient is exhausted, e.g. for the expression of the nucleic acid molecules or their gene products as shown in table VIIIa. Particular advantageous are those promoters which ensure expression upon onset of water deficiency, as defined hereinabove, e.g. for the expression of the nucleic acid molecules or their gene products as shown in table VIIIc. Particular advantageous are those promoters which ensure expression upon onset of standard growth conditions, e.g. under condition without stress and deficient nutrient provision, e.g. for the expression of the nucleic acid molecules or their gene products as shown in table VIIId.

[0356] Such promoters are known to the person skilled in the art or can be isolated from genes which are induced under the conditions mentioned above. In one embodiment, seed-specific promoters may be used for monocotylodonous or dicotylodonous plants.

[0357] In principle all natural promoters with their regulation sequences can be used like those named above for the expression cassette according to the invention and the method according to the invention. Over and above this, synthetic promoters may also advantageously be used. In the preparation of an expression cassette various DNA fragments can be manipulated in order to obtain a nucleotide sequence, which usefully reads in the correct direction and is equipped with a correct reading frame. To connect the DNA fragments (=nucleic acids according to the invention) to one another adaptors or linkers may be attached to the fragments. The promoter and the terminator regions can usefully be provided in the transcription direction with a linker or polylinker containing one or more restriction points for the insertion of this sequence. Generally, the linker has 1 to 10, mostly 1 to 8, preferably 2 to 6, restriction points. In general the size of the linker inside the regulatory region is less than 100 bp, frequently less than 60 bp, but at least 5 bp. The promoter may be both native or homologous as well as foreign or heterologous to the host organism, for example to the host plant. In the 5′-3′ transcription direction the expression cassette contains the promoter, a DNA sequence which shown in table I and a region for transcription termination. Different termination regions can be exchanged for one another in any desired fashion.

[0358] A nucleic acid molecule of the present invention, e.g., a nucleic acid molecule encoding a polypeptide which confers increased yield, e.g. an increased yield-related trait, e.g. an enhanced tolerance to abiotic environmental stress and/or increased nutrient use efficiency and/or enhanced cycling drought tolerance in plants, can be isolated using standard molecular biological techniques and the sequence information provided herein. For example, an A. thaliana polypeptide encoding cDNA can be isolated from a A. thaliana c-DNA library or a Synechocystis sp., Brassica napus, Glycine max, Zea mays or Oryza sativa polypeptide encoding cDNA can be isolated from a Synechocystis sp., Brassica napus, Glycine max, Zea mays or Oryza sativa c-DNA library respectively using all or portion of one of the sequences shown in table I. Moreover, a nucleic acid molecule encompassing all or a portion of one of the sequences of table I can be isolated by the polymerase chain reaction using oligonucleotide primers designed based upon this sequence. For example, mRNA can be isolated from plant cells (e.g., by the guanidinium-thiocyanate extraction procedure of Chirgwin et al., Biochemistry 18, 5294 (1979)) and cDNA can be prepared using reverse transcriptase (e.g., Moloney MLV reverse transcriptase, available from Gibco/BRL, Bethesda, Md.; or AMV reverse transcriptase, available from Seikagaku America, Inc., St. Petersburg, Fla.). Synthetic oligonucleotide primers for polymerase chain reaction amplification can be designed based upon one of the nucleotide sequences shown in table I. A nucleic acid molecule of the invention can be amplified using cDNA or, alternatively, genomic DNA, as a template and appropriate oligonucleotide primers according to standard PCR amplification techniques. The nucleic acid molecule so amplified can be cloned into an appropriate vector and characterized by DNA sequence analysis. Furthermore, the genes employed in the present invention can be prepared by standard synthetic techniques, e.g., using a commercially available automated DNA synthesizer.

[0359] In a embodiment, an isolated nucleic acid molecule of the invention comprises one of the nucleotide sequences or molecules as shown in table I. Moreover, the nucleic acid molecule of the invention can comprise only a portion of the coding region of one of the sequences or molecules of a nucleic acid of table I, for example, a fragment which can be used as a probe or primer or a fragment encoding a biologically active portion of a polypeptide according to invention

[0360] Portions of proteins encoded by the polypeptide according to the invention or a polypeptide encoding nucleic acid molecules of the invention are preferably biologically active portions described herein. As used herein, the term “biologically active portion of” a polypeptide is intended to include a portion, e.g. a domain/motif, of increased yield, e.g. increased or enhanced an yield related trait, e.g. increased the low temperature resistance and/or tolerance related protein that participates in an enhanced nutrient use efficiency e.g. nitrogen use efficiency efficiency, and/or increased intrinsic yield in a plant. To determine whether a polypeptide according to the invention, or a biologically active portion thereof, results in an increased yield, e.g. increased or enhanced an yield related trait, e.g. increased the low temperature resistance and/or tolerance related protein that participates in an enhanced nutrient use efficiency, e.g. nitrogen use efficiency efficiency and/or increased intrinsic yield in a plant, an analysis of a plant comprising the polypeptide may be performed. Such analysis methods are well known to those skilled in the art, as detailed in the Examples. More specifically, nucleic acid fragments encoding biologically active portions of a polypeptide can be prepared by isolating a portion of one of the sequences of the nucleic acid molecules listed in table I expressing the encoded portion of the polypeptide or peptide thereof (e.g., by recombinant expression in vitro) and assessing the activity of the encoded portion.

[0361] Biologically active portions of the polypeptide according to the invention are encompassed by the present invention and include peptides comprising amino acid sequences derived from the amino acid sequence of the polypeptide encoding gene, or the amino acid sequence of a protein homologous to the polypeptide according to the invention, which include fewer amino acids than a full length polypeptide according to the invention or the full length protein which is homologous to the polypeptide according to the invention, and exhibits at least some enzymatic or biological activity of the polypeptide according to the invention. Typically, biologically active portions (e.g., peptides which are, for example, 5, 10, 15, 20, 30, 35, 36, 37, 38, 39, 40, 50, 100 or more amino acids in length) comprise a domain or motif with at least one activity of the polypeptide according to the invention. Moreover, other biologically active portions in which other regions of the protein are deleted, can be prepared by recombinant techniques and evaluated for one or more of the activities described herein. Preferably, the biologically active portions of the polypeptide according to the invention include one or more selected domains/motifs or portions thereof having biological activity.

[0362] The term “biological active portion” or “biological activity” means a polypeptide as depicted in table II, column 3 or a portion of said polypeptide which still has at least 10% or 20%, preferably 30%, 40%, 50% or 60%, especially preferably 70%, 75%, 80%, 90% or 95% of the enzymatic or biological activity of the natural or starting enzyme or protein.

[0363] In the process according to the invention nucleic acid sequences or molecules can be used, which, if appropriate, contain synthetic, non-natural or modified nucleotide bases, which can be incorporated into DNA or RNA. Said synthetic, non-natural or modified bases can for example increase the stability of the nucleic acid molecule outside or inside a cell. The nucleic acid molecules of the invention can contain the same modifications as aforementioned.

[0364] As used in the present context the term “nucleic acid molecule” may also encompass the untranslated sequence or molecule located at the 3′ and at the 5′ end of the coding gene region, for example at least 500, preferably 200, especially preferably 100, nucleotides of the sequence upstream of the 5′ end of the coding region and at least 100, preferably 50, especially preferably 20, nucleotides of the sequence downstream of the 3′ end of the coding gene region. It is often advantageous only to choose the coding region for cloning and expression purposes.

[0365] Preferably, the nucleic acid molecule used in the process according to the invention or the nucleic acid molecule of the invention is an isolated nucleic acid molecule. In one embodiment, the nucleic acid molecule of the invention is the nucleic acid molecule used in the process of the invention.

[0366] In various embodiments, the isolated nucleic acid molecule used in the process according to the invention may, for example comprise less than approximately 5 kb, 4 kb, 3 kb, 2 kb, 1 kb, 0.5 kb or 0.1 kb nucleotide sequences which naturally flank the nucleic acid molecule in the genomic DNA of the cell from which the nucleic acid molecule originates.

[0367] The nucleic acid molecules used in the process, for example the polynucleotide of the invention or of a part thereof can be isolated using molecular-biological standard techniques and the sequence information provided herein. Also, for example a homologous sequence or homologous, conserved sequence regions at the DNA or amino acid level can be identified with the aid of comparison algorithms. The former can be used as hybridization probes under standard hybridization techniques (for example those described in Sambrook et al., supra) for isolating further nucleic acid sequences useful in this process.

[0368] A nucleic acid molecule encompassing a complete sequence of the nucleic acid molecules used in the process, for example the polynucleotide of the invention, or a part thereof may additionally be isolated by polymerase chain reaction, oligonucleotide primers based on this sequence or on parts thereof being used. For example, a nucleic acid molecule comprising the complete sequence or part thereof can be isolated by polymerase chain reaction using oligonucleotide primers which have been generated on the basis of this very sequence. For example, mRNA can be isolated from cells (for example by means of the guanidinium thiocyanate extraction method of Chirgwin et al., Biochemistry 18, 5294 (1979)) and cDNA can be generated by means of reverse transcriptase (for example Moloney, MLV reverse transcriptase, available from Gibco/BRL, Bethesda, Md., or AMV reverse transcriptase, obtainable from Seikagaku America, Inc., St. Petersburg, Fla.).

[0369] Synthetic oligonucleotide primers for the amplification by means of polymerase chain reaction can be generated on the basis of a sequence shown herein, using known methods.

[0370] Moreover, it is possible to identify a conserved protein by carrying out protein sequence alignments with the polypeptide encoded by the nucleic acid molecules of the present invention, in particular with the sequences encoded by the nucleic acid molecule shown in column 5 or 7 of table I, from which conserved regions, and in turn, degenerate primers can be derived. Conserved regions are those, which show a very little variation in the amino acid in one particular position of several homologs from different origin. The consensus sequence and polypeptide motifs shown in column 7 of table IV, are derived from said alignments. Moreover, it is possible to identify conserved regions from various organisms by carrying out protein sequence alignments with the polypeptide encoded by the nucleic acid of the present invention, in particular with the sequences encoded by the polypeptide molecule shown in column 5 or 7 of table II, from which conserved regions, and in turn, degenerate primers can be derived.

[0371] In one advantageous embodiment, in the method of the present invention the activity of a polypeptide comprising or consisting of a consensus sequence or a polypeptide motif shown in table IV, column 7 is increased and in one another embodiment, the present invention relates to a polypeptide comprising or consisting of a consensus sequence or a polypeptide motif shown in table IV, column 7 whereby less than 20, preferably less than 15 or 10, preferably less than 9, 8, 7, or 6, more preferred less than 5 or 4, even more preferred less then 3, even more preferred less then 2, even more preferred 0 of the amino acids positions indicated can be replaced by any amino acid. In one embodiment not more than 15%, preferably 10%, even more preferred 5%, 4%, 3%, or 2%, most preferred 1% or 0% of the amino acid position indicated by a letter are/is replaced another amino acid. In one embodiment less than 20, preferably less than 15 or 10, preferably less than 9, 8, 7, or 6, more preferred less than 5 or 4, even more preferred less than 3, even more preferred less than 2, even more preferred 0 amino acids are inserted into a consensus sequence or protein motif.

[0372] The consensus sequence was derived from a multiple alignment of the sequences as listed in table II. The letters represent the one letter amino acid code and indicate that the amino acids are conserved in at least 80% of the aligned proteins, whereas the letter X stands for amino acids, which are not conserved in at least 80% of the aligned sequences. The consensus sequence starts with the first conserved amino acid in the alignment, and ends with the last conserved amino acid in the alignment of the investigated sequences. The number of given X indicates the distances between conserved amino acid residues, e.g. Y-x(21,23)-F means that conserved tyrosine and phenylalanine residues in the alignment are separated from each other by minimum 21 and maximum 23 amino acid residues in the alignment of all investigated sequences.

[0373] Conserved domains were identified from all sequences and are described using a subset of the standard Prosite notation, e.g. the pattern Y-x(21,23)-[FW] means that a conserved tyrosine is separated by minimum 21 and maximum 23 amino acid residues from either a phenylalanine or tryptophane. Patterns had to match at least 80% of the investigated proteins. Conserved patterns were identified with the software tool MEME version 3.5.1 or manually. MEME is described by Timothy L. Bailey and Charles Elkan (Proceedings of the Second International Conference on Intelligent Systems for Molecular Biology, pp. 28-36, AAAI Press, Menlo Park, Calif., 1994). The source code for the stand-alone program is publicly available from the San Diego Supercomputer centre. For identifying common motifs in all sequences with the software tool MEME, the following settings were used: -maxsize 500000, -nmotifs 15, -evt 0.001, -maxw 60, -distance 1e-3, -minsites number of sequences used for the analysis. Input sequences for MEME were non-aligned sequences in Fasta format. Other parameters were used in the default settings in this software version. Prosite patterns for conserved domains were generated with the software tool Pratt version 2.1 or manually. Pratt was developed by Inge Jonassen, Dept. of Informatics, University of Bergen, Norway and is described by Jonassen et al. (I. Jonassen, J. F. Collins and D. G. Higgins, Protein Science 4 (1995), pp. 1587-1595; I. Jonassen, Efficient discovery of conserved patterns using a pattern graph, Submitted to CABIOS Febr. 1997]. The source code (ANSI C) for the stand-alone program is public available, e.g. at established Bioinformatic centers like EBI (European Bioinformatics Institute). For generating patterns with the software tool Pratt, following settings were used: PL (max Pattern Length): 100, PN (max Nr of Pattern Symbols): 100, PX (max Nr of consecutive x's): 30, FN (max Nr of flexible spacers): 5, FL (max Flexibility): 30, FP (max Flex.Product): 10, ON (max number patterns): 50. Input sequences for Pratt were distinct regions of the protein sequences exhibiting high similarity as identified from software tool MEME. The minimum number of sequences, which have to match the generated patterns (CM, min Nr of Seqs to Match) was set to at least 80% of the provided sequences. Parameters not mentioned here were used in their default settings. The Prosite patterns of the conserved domains can be used to search for protein sequences matching this pattern. Various established Bioinformatic centres provide public internet portals for using those patterns in database searches (e.g. PIR (Protein Information Resource, located at Georgetown University Medical Center) or ExPASy (Expert Protein Analysis System)). Alternatively, stand-alone software is available, like the program Fuzzpro, which is part of the EMBOSS software package. For example, the program Fuzzpro not only allows to search for an exact pattern-protein match but also allows to set various ambiguities in the performed search.

[0374] The alignment was performed with the software ClustalW (version 1.83) and is described by Thompson et al. (Nucleic Acids Research 22, 4673 (1994)). The source code for the stand-alone program is publicly available from the European Molecular Biology Laboratory; Heidelberg, Germany. The analysis was performed using the default parameters of ClustalW v1.83 (gap open penalty: 10.0; gap extension penalty: 0.2; protein matrix: Gonnet; protein/DNA endgap: −1; protein/DNA gapdist: 4).

[0375] Degenerate primers can then be utilized by PCR for the amplification of fragments of novel proteins having above-mentioned activity, e.g. conferring increased yield, e.g. the increased yield-related trait, in particular, the enhanced tolerance to abiotic environmental stress, e.g. low temperature tolerance, cycling drought tolerance, water use efficiency, nutrient (e.g. nitrogen) use efficiency and/or increased intrinsic yield as compared to a corresponding, e.g. non-transformed, wild type plant cell, plant or part thereof after increasing the expression or activity or having the activity of a protein as shown in table II, column 3 or further functional homologs of the polypeptide of the invention from other organisms.

[0376] These fragments can then be utilized as hybridization probe for isolating the complete gene sequence. As an alternative, the missing 5′ and 3′ sequences can be isolated by means of RACE-PCR. A nucleic acid molecule according to the invention can be amplified using cDNA or, as an alternative, genomic DNA as template and suitable oligonucleotide primers, following standard PCR amplification techniques. The nucleic acid molecule amplified thus can be cloned into a suitable vector and characterized by means of DNA sequence analysis. Oligonucleotides, which correspond to one of the nucleic acid molecules used in the process can be generated by standard synthesis methods, for example using an automatic DNA synthesizer.

[0377] Nucleic acid molecules which are advantageously for the process according to the invention can be isolated based on their homology to the nucleic acid molecules disclosed herein using the sequences or part thereof as or for the generation of a hybridization probe and following standard hybridization techniques under stringent hybridization conditions. In this context, it is possible to use, for example, isolated one or more nucleic acid molecules of at least 15, 20, 25, 30, 35, 40, 50, 60 or more nucleotides, preferably of at least 15, 20 or 25 nucleotides in length which hybridize under stringent conditions with the above-described nucleic acid molecules, in particular with those which encompass a nucleotide sequence of the nucleic acid molecule used in the process of the invention or encoding a protein used in the invention or of the nucleic acid molecule of the invention. Nucleic acid molecules with 30, 50, 100, 250 or more nucleotides may also be used.

[0378] By “hybridizing” it is meant that such nucleic acid molecules hybridize under conventional hybridization conditions, preferably under stringent conditions such as described by, e.g., Sambrook (Molecular Cloning; A Laboratory Manual, 2nd Edition, Cold Spring Harbor Laboratory Press, Cold Spring Harbor, N.Y. (1989)) or in Current Protocols in Molecular Biology, John Wiley & Sons, N.Y. (1989), 6.3.1-6.3.6.

[0379] According to the invention, DNA as well as RNA molecules of the nucleic acid of the invention can be used as probes. Further, as template for the identification of functional homologues Northern blot assays as well as Southern blot assays can be performed. The Northern blot assay advantageously provides further information about the expressed gene product: e.g. expression pattern, occurrence of processing steps, like splicing and capping, etc. The Southern blot assay provides additional information about the chromosomal localization and organization of the gene encoding the nucleic acid molecule of the invention.

[0380] A preferred, non-limiting example of stringent hybridization conditions are hybridizations in 6× sodium chloride/sodium citrate (═SSC) at approximately 45° C., followed by one or more wash steps in 0.2×SSC, 0.1% SDS at 50 to 65° C., for example at 50° C., 55° C. or 60° C. The skilled worker knows that these hybridization conditions differ as a function of the type of the nucleic acid and, for example when organic solvents are present, with regard to the temperature and concentration of the buffer. The temperature under “standard hybridization conditions” differs for example as a function of the type of the nucleic acid between 42° C. and 58° C., preferably between 45° C. and 50° C. in an aqueous buffer with a concentration of 0.1×, 0.5×, 1×, 2×, 3×, 4× or 5×SSC (pH 7.2). If organic solvent(s) is/are present in the above-mentioned buffer, for example 50% formamide, the temperature under standard conditions is approximately 40° C., 42° C. or 45° C. The hybridization conditions for DNA:DNA hybrids are preferably for example 0.1×SSC and 20° C., 25° C., 30° C., 35° C., 40° C. or 45° C., preferably between 30° C. and 45° C. The hybridization conditions for DNA:RNA hybrids are preferably for example 0.1×SSC and 30° C., 35° C., 40° C., 45° C., 50° C. or 55° C., preferably between 45° C. and 55° C. The above-mentioned hybridization temperatures are determined for example for a nucleic acid approximately 100 by (=base pairs) in length and a G+C content of 50% in the absence of form amide. The skilled worker knows to determine the hybridization conditions required with the aid of textbooks, for example the ones mentioned above, or from the following textbooks: Sambrook et al., “Molecular Cloning”, Cold Spring Harbor Laboratory, 1989; Hames and Higgins (Ed.) 1985, “Nucleic Acids Hybridization: A Practical Approach”, IRL Press at Oxford University Press, Oxford; Brown (Ed.) 1991, “Essential Molecular Biology: A Practical Approach”, IRL Press at Oxford University Press, Oxford.

[0381] A further example of one such stringent hybridization condition is hybridization at 4×SSC at 65° C., followed by a washing in 0.1×SSC at 65° C. for one hour. Alternatively, an exemplary stringent hybridization condition is in 50% formamide, 4×SSC at 42° C. Further, the conditions during the wash step can be selected from the range of conditions delimited by low-stringency conditions (approximately 2×SSC at 50° C.) and high-stringency conditions (approximately 0.2×SSC at 50° C., preferably at 65° C.) (20×SSC:0.3 M sodium citrate, 3 M NaCl, pH 7.0). In addition, the temperature during the wash step can be raised from low-stringency conditions at room temperature, approximately 22° C., to higher-stringency conditions at approximately 65° C. Both of the parameters salt concentration and temperature can be varied simultaneously, or else one of the two parameters can be kept constant while only the other is varied. Denaturants, for example formamide or SDS, may also be employed during the hybridization. In the presence of 50% formamide, hybridization is preferably effected at 42° C. Relevant factors like 1) length of treatment, 2) salt conditions, 3) detergent conditions, 4) competitor DNAs, 5) temperature and 6) probe selection can be combined case by case so that not all possibilities can be mentioned herein.

[0382] Thus, in a preferred embodiment, Northern blots are prehybridized with Rothi-Hybri-Quick buffer (Roth, Karlsruhe) at 68° C. for 2 h. Hybridization with radioactive labelled probe is done overnight at 68° C. Subsequent washing steps are performed at 68° C. with 1×SSC. For Southern blot assays the membrane is prehybridized with Rothi-Hybri-Quick buffer (Roth, Karlsruhe) at 68° C. for 2 h. The hybridization with radioactive labelled probe is conducted over night at 68° C. Subsequently the hybridization buffer is discarded and the filter shortly washed using 2×SSC; 0.1% SDS. After discarding the washing buffer new 2×SSC; 0.1% SDS buffer is added and incubated at 68° C. for 15 minutes. This washing step is performed twice followed by an additional washing step using 1×SSC; 0.1% SDS at 68° C. for 10 min.

[0383] Some examples of conditions for DNA hybridization (Southern blot assays) and wash step are shown herein below:

[0384] (1) Hybridization conditions can be selected, for example, from the following conditions:

[0385] (a) 4×SSC at 65° C.,

[0386] (b) 6×SSC at 45° C.,

[0387] (c) 6×SSC, 100 mg/ml denatured fragmented fish sperm DNA at 68° C.,

[0388] (d) 6×SSC, 0.5% SDS, 100 mg/ml denatured salmon sperm DNA at 68° C.,

[0389] (e) 6×SSC, 0.5% SDS, 100 mg/ml denatured fragmented salmon sperm DNA, 50% formamide at 42° C.,

[0390] (f) 50% formamide, 4×SSC at 42° C.,

[0391] (g) 50% (v/v) formamide, 0.1% bovine serum albumin, 0.1% Ficoll, 0.1% polyvinylpyrrolidone, 50 mM sodium phosphate buffer pH 6.5, 750 mM NaCl, 75 mM sodium citrate at 42° C.,

[0392] (h) 2× or 4×SSC at 50° C. (low-stringency condition), or

[0393] (i) 30 to 40% formamide, 2× or 4×SSC at 42° C. (low-stringency condition).

[0394] (2) Wash steps can be selected, for example, from the following conditions:

[0395] (a) 0.015 M NaCl/0.0015 M sodium citrate/0.1% SDS at 50° C.

[0396] (b) 0.1×SSC at 65° C.

[0397] (c) 0.1×SSC, 0.5% SDS at 68° C.

[0398] (d) 0.1×SSC, 0.5% SDS, 50% formamide at 42° C.

[0399] (e) 0.2×SSC, 0.1% SDS at 42° C.

[0400] (f) 2×SSC at 65° C. (low-stringency condition).

[0401] Polypeptides having above-mentioned activity, i.e. conferring increased yield, e.g. an increased yield-related trait as mentioned herein, e.g. increased abiotic stress tolerance, e.g. low temperature tolerance, e.g. with increased nutrient use efficiency, and/or water use efficiency and/or increased intrinsic yield as compared to a corresponding, e.g. non-transformed, wild type plant cell, plant or part thereof, derived from other organisms, can be encoded by other DNA sequences which hybridize to the sequences shown in table I, columns 5 and 7 under relaxed hybridization conditions and which code on expression for peptides conferring the increased yield, e.g. an increased yield-related trait as mentioned herein, e.g. increased abiotic stress tolerance, e.g. low temperature tolerance or enhanced cold tolerance, e.g. with increased nutrient use efficiency, and/or water use efficiency and/or increased intrinsic yield, as compared to a corresponding, e.g. non-transformed, wild type plant cell, plant or part thereof.

[0402] Further, some applications have to be performed at low stringency hybridization conditions, without any consequences for the specificity of the hybridization. For example, a Southern blot analysis of total DNA could be probed with a nucleic acid molecule of the present invention and washed at low stringency (55° C. in 2×SSPE, 0.1% SDS). The hybridization analysis could reveal a simple pattern of only genes encoding polypeptides of the present invention or used in the process of the invention, e.g. having the herein-mentioned activity of enhancing the increased yield, e.g. an increased yield-related trait as mentioned herein, e.g. increased abiotic stress tolerance, e.g. increased low temperature tolerance or enhanced cold tolerance, e.g. with increased nutrient use efficiency, and/or water use efficiency and/or increased intrinsic yield, as compared to a corresponding, e.g. non-transformed, wild type plant cell, plant or part thereof. A further example of such low-stringent hybridization conditions is 4×SSC at 50° C. or hybridization with 30 to 40% formamide at 42° C. Such molecules comprise those which are fragments, analogues or derivatives of the polypeptide of the invention or used in the process of the invention and differ, for example, by way of amino acid and/or nucleotide deletion(s), insertion(s), substitution (s), addition(s) and/or recombination (s) or any other modification(s) known in the art either alone or in combination from the above-described amino acid sequences or their underlying nucleotide sequence(s). However, it is preferred to use high stringency hybridization conditions.

[0403] Hybridization should advantageously be carried out with fragments of at least 5, 10, 15, 20, 25, 30, 35 or 40 bp, advantageously at least 50, 60, 70 or 80 bp, preferably at least 90, 100 or 110 bp. Most preferably are fragments of at least 15, 20, 25 or 30 bp. Preferably are also hybridizations with at least 100 by or 200, very especially preferably at least 400 by in length. In an especially preferred embodiment, the hybridization should be carried out with the entire nucleic acid sequence with conditions described above.

[0404] The terms “fragment”, “fragment of a sequence” or “part of a sequence” mean a truncated sequence of the original sequence referred to. The truncated sequence (nucleic acid or protein sequence) can vary widely in length; the minimum size being a sequence of sufficient size to provide a sequence with at least a comparable function and/or activity of the original sequence or molecule referred to or hybridizing with the nucleic acid molecule of the invention or used in the process of the invention under stringent conditions, while the maximum size is not critical. In some applications, the maximum size usually is not substantially greater than that required to provide the desired activity and/or function(s) of the original sequence.

[0405] Typically, the truncated amino acid sequence or molecule will range from about 5 to about 310 amino acids in length. More typically, however, the sequence will be a maximum of about 250 amino acids in length, preferably a maximum of about 200 or 100 amino acids. It is usually desirable to select sequences of at least about 10, 12 or 15 amino acids, up to a maximum of about 20 or 25 amino acids.

[0406] The term “epitope” relates to specific immunoreactive sites within an antigen, also known as antigenic determinates. These epitopes can be a linear array of monomers in a polymeric composition—such as amino acids in a protein—or consist of or comprise a more complex secondary or tertiary structure. Those of skill will recognize that immunogens (i.e., substances capable of eliciting an immune response) are antigens; however, some antigen, such as haptens, are not immunogens but may be made immunogenic by coupling to a carrier molecule. The term “antigen” includes references to a substance to which an antibody can be generated and/or to which the antibody is specifically immunoreactive.

[0407] In one embodiment the present invention relates to a epitope of the polypeptide of the present invention or used in the process of the present invention and confers an increased yield, e.g. an increased yield-related trait as mentioned herein, e.g. increased abiotic stress tolerance, e.g. low temperature tolerance or enhanced cold tolerance, e.g. with increased nutrient use efficiency, and/or water use efficiency and/or increased intrinsic yield etc., as compared to a corresponding, e.g. non-transformed, wild type plant cell, plant or part thereof.

[0408] The term “one or several amino acids” relates to at least one amino acid but not more than that number of amino acids, which would result in a homology of below 50% identity. Preferably, the identity is more than 70% or 80%, more preferred are 85%, 90%, 91%, 92%, 93%, 94% or 95%, even more preferred are 96%, 97%, 98%, or 99% identity.

[0409] Further, the nucleic acid molecule of the invention comprises a nucleic acid molecule, which is a complement of one of the nucleotide sequences of above mentioned nucleic acid molecules or a portion thereof. A nucleic acid molecule or its sequence which is complementary to one of the nucleotide molecules or sequences shown in table I, columns 5 and 7 is one which is sufficiently complementary to one of the nucleotide molecules or sequences shown in table I, columns 5 and 7 such that it can hybridize to one of the nucleotide sequences shown in table I, columns 5 and 7, thereby forming a stable duplex. Preferably, the hybridization is performed under stringent hybridization conditions. However, a complement of one of the herein disclosed sequences is preferably a sequence complement thereto according to the base pairing of nucleic acid molecules well known to the skilled person. For example, the bases A and G undergo base pairing with the bases T and U or C, resp. and visa versa. Modifications of the bases can influence the base-pairing partner.

[0410] The nucleic acid molecule of the invention comprises a nucleotide sequence which is at least about 30%, 35%, 40% or 45%, preferably at least about 50%, 55%, 60% or 65%, more preferably at least about 70%, 80%, or 90%, and even more preferably at least about 95%, 97%, 98%, 99% or more homologous to a nucleotide sequence shown in table I, columns 5 and 7, or a portion thereof and preferably has above mentioned activity, in particular having a increasing-yield activity, e.g. increasing an yield-related trait, for example enhancing tolerance to abiotic environmental stress, for example increasing drought tolerance and/or low temperature tolerance and/or increasing nutrient use efficiency, increased intrinsic yield and/or another mentioned yield-related trait after increasing the activity or an activity of a gene as shown in table I or of a gene product, e.g. as shown in table II, column 3, by for example expression either in the cytsol or cytoplasm or in an organelle such as a plastid or mitochondria or both, preferably in plastids.

[0411] In one embodiment, the nucleic acid molecules marked in table I, column 6 with “plastidic” or gene products encoded by said nucleic acid molecules are expressed in combination with a targeting signal as described herein.

[0412] The nucleic acid molecule of the invention comprises a nucleotide sequence or molecule which hybridizes, preferably hybridizes under stringent conditions as defined herein, to one of the nucleotide sequences or molecule shown in table I, columns 5 and 7, or a portion thereof and encodes a protein having above-mentioned activity, e.g. conferring an increased yield, e.g. an increased yield-related trait, for example enhanced tolerance to abiotic environmental stress, for example an increased drought tolerance and/or low temperature tolerance and/or an increased nutrient use efficiency, increased intrinsic yield and/or another mentioned yield-related trait as compared to a corresponding, e.g. non-transformed, wild type plant cell, plant or part thereof by for example expression either in the cytsol or in an organelle such as a plastid or mitochondria or both, preferably in plastids, and optionally, the activity selected from the group consisting of 26S proteasome-subunit, 50S ribosomal protein L36, Autophagy-related protein, B0050-protein, Branched-chain amino acid permease, Calmodulin, carbon storage regulator, FK506-binding protein, gamma-glutamyl-gamma-aminobutyrate hydrolase, GM02LC38418-protein, Heat stress transcription factor, Mannan polymerase II complex subunit, mitochondrial precursor of Lon protease homolog, MutS protein homolog, phosphate transporter subunit, Protein EFR3, pyruvate kinase, tellurite resistance protein, Xanthine permease, and YAR047c-protein.

[0413] Moreover, the nucleic acid molecule of the invention can comprise only a portion of the coding region of one of the sequences shown in table I, columns 5 and 7, for example a fragment which can be used as a probe or primer or a fragment encoding a biologically active portion of the polypeptide of the present invention or of a polypeptide used in the process of the present invention, i.e. having above-mentioned activity, e.g. conferring an increased yield, e.g. with an increased yield-related trait, for example enhanced tolerance to abiotic environmental stress, for example an increased drought tolerance and/or low temperature tolerance and/or an increased nutrient use efficiency, increased intrinsic yield and/or another mentioned yield-related trait as compared to a corresponding, e.g. non-transformed, wild type plant cell, plant or part thereof f its activity is increased by for example expression either in the cytsol or in an organelle such as a plastid or mitochondria or both, preferably in plastids. The nucleotide sequences determined from the cloning of the present protein-according-to-the-invention-encoding gene allows for the generation of probes and primers designed for use in identifying and/or cloning its homologues in other cell types and organisms. The probe/primer typically comprises substantially purified oligonucleotide. The oligonucleotide typically comprises a region of nucleotide sequence that hybridizes under stringent conditions to at least about 12, 15 preferably about 20 or 25, more preferably about 40, 50 or 75 consecutive nucleotides of a sense strand of one of the sequences set forth, e.g., in table I, columns 5 and 7, an anti-sense sequence of one of the sequences, e.g., set forth in table I, columns 5 and 7, or naturally occurring mutants thereof. Primers based on a nucleotide of invention can be used in PCR reactions to clone homologues of the polypeptide of the invention or of the polypeptide used in the process of the invention, e.g. as the primers described in the examples of the present invention, e.g. as shown in the examples. A PCR with the primers shown in table III, column 7 will result in a fragment of the gene product as shown in table II, column 3.

[0414] Primer sets are interchangeable. The person skilled in the art knows to combine said primers to result in the desired product, e.g. in a full length clone or a partial sequence. Probes based on the sequences of the nucleic acid molecule of the invention or used in the process of the present invention can be used to detect transcripts or genomic sequences encoding the same or homologous proteins. The probe can further comprise a label group attached thereto, e.g. the label group can be a radioisotope, a fluorescent compound, an enzyme, or an enzyme co-factor. Such probes can be used as a part of a genomic marker test kit for identifying cells which express an polypeptide of the invention or used in the process of the present invention, such as by measuring a level of an encoding nucleic acid molecule in a sample of cells, e.g., detecting mRNA levels or determining, whether a genomic gene comprising the sequence of the polynucleotide of the invention or used in the processes of the present invention has been mutated or deleted.

[0415] The nucleic acid molecule of the invention encodes a polypeptide or portion thereof which includes an amino acid sequence which is sufficiently homologous to the amino acid sequence shown in table II, columns 5 and 7 such that the protein or portion thereof maintains the ability to participate in increasing yield, e.g. increasing a yield-related trait, for example enhancing tolerance to abiotic environmental stress, for example increasing drought tolerance and/or low temperature tolerance and/or increasing nutrient use efficiency, increasing intrinsic yield and/or another mentioned yield-related trait as compared to a corresponding, e.g. non-transformed, wild type plant cell, plant or part thereof, in particular increasing the activity as mentioned above or as described in the examples in plants is comprised.

[0416] As used herein, the language “sufficiently homologous” refers to proteins or portions thereof which have amino acid sequences which include a minimum number of identical or equivalent amino acid residues (e.g., an amino acid residue which has a similar side chain as an amino acid residue in one of the sequences of the polypeptide of the present invention) to an amino acid sequence shown in table II, columns 5 and 7 such that the protein or portion thereof is able to participate in increasing yield, e.g. increasing a yield-related trait, for example enhancing tolerance to abiotic environmental stress, for example increasing drought tolerance and/or low temperature tolerance and/or increasing nutrient use efficiency, increasing intrinsic yield and/or another mentioned yield-related trait as compared to a corresponding, e.g. non-transformed, wild type plant cell, plant or part thereof. For examples having the activity of a protein as shown in table II, column 3 and as described herein.

[0417] In one embodiment, the nucleic acid molecule of the present invention comprises a nucleic acid that encodes a portion of the protein of the present invention. The protein is at least about 30%, 35%, 40%, 45% or 50%, preferably at least about 55%, 60%, 65% or 70%, and more preferably at least about 75%, 80%, 85%, 90%, 91%, 92%, 93% or 94% and most preferably at least about 95%, 97%, 98%, 99% or more homologous to an entire amino acid sequence of table II, columns 5 and 7 and having above-mentioned activity, e.g. conferring an increased yield, e.g. an increased yield-related trait, for example enhanced tolerance to abiotic environmental stress, for example an increased drought tolerance and/or low temperature tolerance and/or an increased nutrient use efficiency, intrinsic yield and/or another mentioned yield-related trait as compared to a corresponding, e.g. non-transformed, wild type plant cell, plant or part thereof by for example expression either in the cytsol or in an organelle such as a plastid or mitochondria or both, preferably in plastids.

[0418] Portions of proteins encoded by the nucleic acid molecule of the invention are preferably biologically active, preferably having above-mentioned annotated activity, e.g. conferring an increased yield, e.g. an increased yield-related trait, for example enhanced tolerance to abiotic environmental stress, for example an increased drought tolerance and/or low temperature tolerance and/or an increased nutrient use efficiency, intrinsic yield and/or another mentioned yield-related trait as compared to a corresponding, e.g. non-transformed, wild type plant cell, plant or part thereof after increase of activity.

[0419] As mentioned herein, the term “biologically active portion” is intended to include a portion, e.g., a domain/motif, that confers an increased yield, e.g. an increased yield-related trait, for example enhanced tolerance to abiotic environmental stress, for example an increased drought tolerance and/or low temperature tolerance and/or an increased nutrient use efficiency, intrinsic yield and/or another mentioned yield-related trait as compared to a corresponding, e.g. non-transformed, wild type plant cell, plant or part thereof or has an immunological activity such that it is binds to an antibody binding specifically to the polypeptide of the present invention or a polypeptide used in the process of the present invention for increasing yield, e.g. increasing a yield-related trait, for example enhancing tolerance to abiotic environmental stress, for example increasing drought tolerance and/or low temperature tolerance and/or increasing nutrient use efficiency, increasing intrinsic yield and/or another mentioned yield-related traitas compared to a corresponding, e.g. non-transformed, wild type plant cell, plant or part thereof.

[0420] The invention further relates to nucleic acid molecules that differ from one of the nucleotide sequences shown in table I A, columns 5 and 7 (and portions thereof) due to degeneracy of the genetic code and thus encode a polypeptide of the present invention, in particular a polypeptide having above mentioned activity, e.g. as that polypeptides depicted by the sequence shown in table II, columns 5 and 7 or the functional homologues. Advantageously, the nucleic acid molecule of the invention comprises, or in an other embodiment has, a nucleotide sequence encoding a protein comprising, or in an other embodiment having, an amino acid sequence shown in table II, columns 5 and 7 or the functional homologues. In a still further embodiment, the nucleic acid molecule of the invention encodes a full length protein which is substantially homologous to an amino acid sequence shown in table II, columns 5 and 7 or the functional homologues. However, in one embodiment, the nucleic acid molecule of the present invention does not consist of the sequence shown in table I, preferably table IA, columns 5 and 7.

[0421] In addition, it will be appreciated by those skilled in the art that DNA sequence polymorphisms that lead to changes in the amino acid sequences may exist within a population. Such genetic polymorphism in the gene encoding the polypeptide of the invention or comprising the nucleic acid molecule of the invention may exist among individuals within a population due to natural variation.

[0422] Nucleic acid molecules corresponding to natural variants homologues of a nucleic acid molecule of the invention, which can also be a cDNA, can be isolated based on their homology to the nucleic acid molecules disclosed herein using the nucleic acid molecule of the invention, or a portion thereof, as a hybridization probe according to standard hybridization techniques under stringent hybridization conditions.

[0423] Accordingly, in another embodiment, a nucleic acid molecule of the invention is at least 15, 20, 25 or 30 nucleotides in length. Preferably, it hybridizes under stringent conditions to a nucleic acid molecule comprising a nucleotide sequence of the nucleic acid molecule of the present invention or used in the process of the present invention, e.g. comprising the sequence shown in table I, columns 5 and 7. The nucleic acid molecule is preferably at least 20, 30, 50, 100, 250 or more nucleotides in length.

[0424] The term “hybridizes under stringent conditions” is defined above. In one embodiment, the term “hybridizes under stringent conditions” is intended to describe conditions for hybridization and washing under which nucleotide sequences at least 30%, 40%, 50% or 65% identical to each other typically remain hybridized to each other. Preferably, the conditions are such that sequences at least about 70%, more preferably at least about 75% or 80%, and even more preferably at least about 85%, 90% or 95% or more identical to each other typically remain hybridized to each other.

[0425] Preferably, nucleic acid molecule of the invention that hybridizes under stringent conditions to a sequence shown in table I, columns 5 and 7 corresponds to a naturally-occurring nucleic acid molecule of the invention. As used herein, a “naturally-occurring” nucleic acid molecule refers to an RNA or DNA molecule having a nucleotide sequence that occurs in nature (e.g., encodes a natural protein). Preferably, the nucleic acid molecule encodes a natural protein having above-mentioned activity, e.g. conferring increasing yield, e.g. increasing a yield-related trait, for example enhancing tolerance to abiotic environmental stress, for example increasing drought tolerance and/or low temperature tolerance and/or increasing nutrient use efficiency, increasing intrinsic yield and/or another mentioned yield-related trait after increasing the expression or activity thereof or the activity of a protein of the invention or used in the process of the invention by for example expression the nucleic acid sequence of the gene product in the cytsol and/or in an organelle such as a plastid or mitochondria, preferably in plastids.

[0426] In addition to naturally-occurring variants of the sequences of the polypeptide or nucleic acid molecule of the invention as well as of the polypeptide or nucleic acid molecule used in the process of the invention that may exist in the population, the skilled artisan will further appreciate that changes can be introduced by mutation into a nucleotide sequence of the nucleic acid molecule encoding the polypeptide of the invention or used in the process of the present invention, thereby leading to changes in the amino acid sequence of the encoded said polypeptide, without altering the functional ability of the polypeptide, preferably not decreasing said activity.

[0427] For example, nucleotide substitutions leading to amino acid substitutions at “nonessential” amino acid residues can be made in a sequence of the nucleic acid molecule of the invention or used in the process of the invention, e.g. shown in table I, columns 5 and 7.

[0428] A “non-essential” amino acid residue is a residue that can be altered from the wild-type sequence of one without altering the activity of said polypeptide, whereas an “essential” amino acid residue is required for an activity as mentioned above, e.g. leading to increasing yield, e.g. increasing a yield-related trait, for example enhancing tolerance to abiotic environmental stress, for example increasing drought tolerance and/or low temperature tolerance and/or increasing nutrient use efficiency, increasing intrinsic yield and/or another mentioned yield-related trait as compared to a corresponding, e.g. non-transformed, wild type plant cell, plant or part thereof in an organism after an increase of activity of the polypeptide. Other amino acid residues, however, (e.g., those that are not conserved or only semi-conserved in the domain having said activity) may not be essential for activity and thus are likely to be amenable to alteration without altering said activity.

[0429] Further, a person skilled in the art knows that the codon usage between organisms can differ. Therefore, he may adapt the codon usage in the nucleic acid molecule of the present invention to the usage of the organism or the cell compartment for example of the plastid or mitochondria in which the polynucleotide or polypeptide is expressed.

[0430] Accordingly, the invention relates to nucleic acid molecules encoding a polypeptide having above-mentioned activity, in an organisms or parts thereof by for example expression either in the cytosol or in an organelle such as a plastid or mitochondria or both, preferably in plastids that contain changes in amino acid residues that are not essential for said activity. Such polypeptides differ in amino acid sequence from a sequence contained in the sequences shown in table II, columns 5 and 7 yet retain said activity described herein. The nucleic acid molecule can comprise a nucleotide sequence encoding a polypeptide, wherein the polypeptide comprises an amino acid sequence at least about 50% identical to an amino acid sequence shown in table II, columns 5 and 7 and is capable of participation in increasing yield, e.g. increasing a yield-related trait, for example enhancing tolerance to abiotic environmental stress, for example increasing drought tolerance and/or low temperature tolerance and/or increasing nutrient use efficiency, increasing intrinsic yield and/or another mentioned yield-related trait as compared to a corresponding, e.g. non-transformed, wild type plant cell, plant or part thereof after increasing its activity, e.g. its expression by for example expression either in the cytsol or in an organelle such as a plastid or mitochondria or both, preferably in plastids. Preferably, the protein encoded by the nucleic acid molecule is at least about 60% identical to the sequence shown in table II, columns 5 and 7, more preferably at least about 70% identical to one of the sequences shown in table II, columns 5 and 7, even more preferably at least about 80%, 90%, 95% homologous to the sequence shown in table II, columns 5 and 7, and most preferably at least about 96%, 97%, 98%, or 99% identical to the sequence shown in table II, columns 5 and 7.

[0431] To determine the percentage homology (=identity, herein used interchangeably) of two amino acid sequences or of two nucleic acid molecules, the sequences are written one underneath the other for an optimal comparison (for example gaps may be inserted into the sequence of a protein or of a nucleic acid in order to generate an optimal alignment with the other protein or the other nucleic acid).

[0432] The amino acid residues or nucleic acid molecules at the corresponding amino acid positions or nucleotide positions are then compared. If a position in one sequence is occupied by the same amino acid residue or the same nucleic acid molecule as the corresponding position in the other sequence, the molecules are homologous at this position (i.e. amino acid or nucleic acid “homology” as used in the present context corresponds to amino acid or nucleic acid “identity”. The percentage homology between the two sequences is a function of the number of identical positions shared by the sequences (i.e. % homology=number of identical positions/total number of positions×100). The terms “homology” and “identity” are thus to be considered as synonyms.

[0433] For the determination of the percentage homology (=identity) of two or more amino acids or of two or more nucleotide sequences several computer software programs have been developed. The homology of two or more sequences can be calculated with for example the software fasta, which presently has been used in the version fasta 3 (W. R. Pearson and D. J. Lipman, PNAS 85, 2444 (1988); W. R. Pearson, Methods in Enzymology 183, 63 (1990); W. R. Pearson and D. J. Lipman, PNAS 85, 2444 (1988); W. R. Pearson, Enzymology 183, 63 (1990)). Another useful program for the calculation of homologies of different sequences is the standard blast program, which is included in the Biomax pedant software (Biomax, Munich, Federal Republic of Germany). This leads unfortunately sometimes to suboptimal results since blast does not always include complete sequences of the subject and the querry. Nevertheless as this program is very efficient it can be used for the comparison of a huge number of sequences. The following settings are typically used for such a comparisons of sequences: −p Program Name [String]; −d Database [String]; default=nr; −i Query File [File In]; default=stdin; −e Expectation value (E) [Real]; default=10.0; −m alignment view options: 0=pairwise; 1=query-anchored showing identities; 2=query-anchored no identities; 3=flat query-anchored, show identities; 4=flat query-anchored, no identities; 5=query-anchored no identities and blunt ends; 6=flat query-anchored, no identities and blunt ends; 7=XML Blast output; 8=tabular; 9 tabular with comment lines [Integer]; default=0; −o BLAST report Output File [File Out] Optional; default=stdout; −F Filter query sequence (DUST with blastn, SEG with others) [String]; default=T; −G Cost to open a gap (zero invokes default behavior) [Integer]; default=0; −E Cost to extend a gap (zero invokes default behavior) [Integer]; default=0; −X X dropoff value for gapped alignment (in bits) (zero invokes default behavior); blastn 30, megablast 20, tblastx 0, all others 15 [Integer]; default=0; <I Show GI's in deflines [T/F]; default=F; −q Penalty for a nucleotide mismatch (blastn only) [Integer]; default=−3; −r Reward for a nucleotide match (blastn only) [Integer]; default=1; −v Number of database sequences to show one-line descriptions for (V) [Integer]; default=500; −b Number of database sequence to show alignments for (B) [Integer]; default=250; −f Threshold for extending hits, default if zero; blastp 11, blastn 0, blastx 12, tblastn 13; tblastx 13, megablast 0 [Integer]; default=0; −g Perform gapped alignment (not available with tblastx) [T/F]; default=T; −Q Query Genetic code to use [Integer]; default=1; −D DB Genetic code (for tblast[nx] only) [Integer]; default=1; −a Number of processors to use [Integer]; default=1; −O SeqAlign file [File Out] Optional; −J Believe the query defline [T/F]; default=F; −M Matrix [String]; default=BLOSUM62; −W Word size, default if zero (blastn 11, megablast 28, all others 3) [Integer]; default=0; −z Effective length of the database (use zero for the real size) [Real]; default=0; −K Number of best hits from a region to keep (off by default, if used a value of 100 is recommended) [Integer]; default=0; −P 0 for multiple hit, 1 for single hit [Integer]; default=0; −Y Effective length of the search space (use zero for the real size) [Real]; default=0; −S Query strands to search against database (for blast[nx], and tblastx); 3 is both, 1 is top, 2 is bottom [Integer]; default=3; −T Produce HTML output [T/F]; default=F; −I Restrict search of database to list of GI's [String] Optional; −U Use lower case filtering of FASTA sequence [T/F] Optional; default=F; −y X dropoff value for ungapped extensions in bits (0.0 invokes default behavior); blastn 20, megablast 10, all others 7 [Real]; default=0.0; −Z X dropoff value for final gapped alignment in bits (0.0 invokes default behavior); blastn/megablast 50, tblastx 0, all others 25 [Integer]; default=0; −R PSI-TBLASTN checkpoint file [File In] Optional; −n MegaBlast search [T/F]; default=F; −L Location on query sequence [String] Optional; −A Multiple Hits window size, default if zero (blastn/megablast 0, all others 40 [Integer]; default=0; −w Frame shift penalty (OOF algorithm for blastx) [Integer]; default=0; −t Length of the largest intron allowed in tblastn for linking HSPs (0 disables linking) [Integer]; default=0.

[0434] Results of high quality are reached by using the algorithm of Needleman and Wunsch or Smith and Waterman. Therefore programs based on said algorithms are preferred. Advantageously the comparisons of sequences can be done with the program PileUp (J. Mol. Evolution., 25, 351 (1987), Higgins et al., CABIOS 5, 151 (1989)) or preferably with the programs “Gap” and “Needle”, which are both based on the algorithms of Needleman and Wunsch (J. Mol. Biol. 48; 443 (1970)), and “BestFit”, which is based on the algorithm of Smith and Waterman (Adv. Appl. Math. 2; 482 (1981)). “Gap” and “BestFit” are part of the GCG software-package (Genetics Computer Group, 575 Science Drive, Madison, Wis., USA 53711 (1991); Altschul et al., (Nucleic Acids Res. 25, 3389 (1997)), “Needle” is part of the The European Molecular Biology Open Software Suite (EMBOSS) (Trends in Genetics 16 (6), 276 (2000)). Therefore preferably the calculations to determine the percentages of sequence homology are done with the programs “Gap” or “Needle” over the whole range of the sequences. The following standard adjustments for the comparison of nucleic acid sequences were used for “Needle”: matrix: EDNAFULL, Gap_penalty: 10.0, Extend_penalty: 0.5. The following standard adjustments for the comparison of nucleic acid sequences were used for “Gap”: gap weight: 50, length weight: 3, average match: 10.000, average mismatch: 0.000.

[0435] For example a sequence, which has 80% homology with sequence SEQ ID NO: 22 at the nucleic acid level is understood as meaning a sequence which, upon comparison with the sequence SEQ ID NO: 22 by the above program “Needle” with the above parameter set, has a 80% homology.

[0436] Homology between two polypeptides is understood as meaning the identity of the amino acid sequence over in each case the entire sequence length which is calculated by comparison with the aid of the above program “Needle” using Matrix: EBLOSUM62, Gap_penalty: 8.0, Extend_penalty: 2.0.

[0437] For example a sequence which has a 80% homology with sequence SEQ ID NO: 23 at the protein level is understood as meaning a sequence which, upon comparison with the sequence SEQ ID NO: 23 by the above program “Needle” with the above parameter set, has a 80% homology.

[0438] Functional equivalents derived from the nucleic acid sequence as shown in table I, columns 5 and 7 according to the invention by substitution, insertion or deletion have at least 30%, 35%, 40%, 45% or 50%, preferably at least 55%, 60%, 65% or 70% by preference at least 80%, especially preferably at least 85% or 90%, 91%, 92%, 93% or 94%, very especially preferably at least 95%, 97%, 98% or 99% homology with one of the polypeptides as shown in table II, columns 5 and 7 according to the invention and encode polypeptides having essentially the same properties as the polypeptide as shown in table II, columns 5 and 7. Functional equivalents derived from one of the polypeptides as shown in table II, columns 5 and 7 according to the invention by substitution, insertion or deletion have at least 30%, 35%, 40%, 45% or 50%, preferably at least 55%, 60%, 65% or 70% by preference at least 80%, especially preferably at least 85% or 90%, 91%, 92%, 93% or 94%, very especially preferably at least 95%, 97%, 98% or 99% homology with one of the polypeptides as shown in table II, columns 5 and 7 according to the invention and having essentially the same properties as the polypeptide as shown in table II, columns 5 and 7.

[0439] “Essentially the same properties” of a functional equivalent is above all understood as meaning that the functional equivalent has above mentioned activity, by for example expression either in the cytsol or in an organelle such as a plastid or mitochondria or both, preferably in plastids while increasing the amount of protein, activity or function of said functional equivalent in an organism, e.g. a microorgansim, a plant or plant tissue or animal tissue, plant or animal cells or a part of the same.

[0440] A nucleic acid molecule encoding an homologous to a protein sequence of table II, columns 5 and 7 can be created by introducing one or more nucleotide substitutions, additions or deletions into a nucleotide sequence of the nucleic acid molecule of the present invention, in particular of table I, columns 5 and 7 such that one or more amino acid substitutions, additions or deletions are introduced into the encoded protein. Mutations can be introduced into the encoding sequences of table I, columns 5 and 7 by standard techniques, such as site-directed mutagenesis and PCR-mediated mutagenesis.

[0441] Preferably, conservative amino acid substitutions are made at one or more predicted non-essential amino acid residues. A “conservative amino acid substitution” is one in which the amino acid residue is replaced with an amino acid residue having a similar side chain. Families of amino acid residues having similar side chains have been defined in the art. These families include amino acids with basic side chains (e.g., lysine, arginine, histidine), acidic side chains (e.g., aspartic acid, glutamic acid), uncharged polar side chains (e.g., glycine, asparagine, glutamine, serine, threonine, tyrosine, cysteine), nonpolar side chains (e.g., alanine, valine, leucine, isoleucine, proline, phenylalanine, methionine, tryptophane), beta-branched side chains (e.g., threonine, valine, isoleucine) and aromatic side chains (e.g., tyrosine, phenylalanine, tryptophane, histidine).

[0442] Thus, a predicted nonessential amino acid residue in a polypeptide of the invention or a polypeptide used in the process of the invention is preferably replaced with another amino acid residue from the same family. Alternatively, in another embodiment, mutations can be introduced randomly along all or part of a coding sequence of a nucleic acid molecule of the invention or used in the process of the invention, such as by saturation mutagenesis, and the resultant mutants can be screened for activity described herein to identify mutants that retain or even have increased above mentioned activity, e.g. conferring increased yield, e.g. an increased yield-related trait, for example enhanced tolerance to abiotic environmental stress, for example an increased drought tolerance and/or low temperature tolerance and/or an increased nutrient use efficiency, intrinsic yield and/or another mentioned yield-related trait as compared to a corresponding, e.g. non-transformed, wild type plant cell, plant or part thereof.

[0443] Following mutagenesis of one of the sequences as shown herein, the encoded protein can be expressed recombinantly and the activity of the protein can be determined using, for example, assays described herein (see Examples).

[0444] The highest homology of the nucleic acid molecule used in the process according to the invention was found for the following database entries by Gap search.

[0445] Homologues of the nucleic acid sequences used, with the sequence shown in table I, columns 5 and 7, comprise also allelic variants with at least approximately 30%, 35%, 40% or 45% homology, by preference at least approximately 50%, 60% or 70%, more preferably at least approximately 90%, 91%, 92%, 93%, 94% or 95% and even more preferably at least approximately 96%, 97%, 98%, 99% or more homology with one of the nucleotide sequences shown or the abovementioned derived nucleic acid sequences or their homologues, derivatives or analogues or parts of these. Allelic variants encompass in particular functional variants which can be obtained by deletion, insertion or substitution of nucleotides from the sequences shown, preferably from table I, columns 5 and 7, or from the derived nucleic acid sequences, the intention being, however, that the enzyme activity or the biological activity of the resulting proteins synthesized is advantageously retained or increased.

[0446] In one embodiment of the present invention, the nucleic acid molecule of the invention or used in the process of the invention comprises the sequences shown in any of the table I, columns 5 and 7. It is preferred that the nucleic acid molecule comprises as little as possible other nucleotides not shown in any one of table I, columns 5 and 7. In one embodiment, the nucleic acid molecule comprises less than 500, 400, 300, 200, 100, 90, 80, 70, 60, 50 or 40 further nucleotides. In a further embodiment, the nucleic acid molecule comprises less than 30, or 10 further nucleotides. In one embodiment, the nucleic acid molecule use in the process of the invention is identical to the sequences shown in table I, columns 5 and 7.

[0447] Also preferred is that the nucleic acid molecule used in the process of the invention encodes a polypeptide comprising the sequence shown in table II, columns 5 and 7. In one embodiment, the nucleic acid molecule encodes less than 150, 130, 100, 80, 60, 50, 40 or 30 further amino acids. In a further embodiment, the encoded polypeptide comprises less than 20, 15, 10, 9, 8, 7, 6 or 5 further amino acids. In one embodiment used in the inventive process, the encoded polypeptide is identical to the sequences shown in table II, columns 5 and 7.

[0448] In one embodiment, the nucleic acid molecule of the invention or used in the process encodes a polypeptide comprising the sequence shown in table II, columns 5 and 7 comprises less than 100 further nucleotides. In a further embodiment, said nucleic acid molecule comprises less than 30 further nucleotides. In one embodiment, the nucleic acid molecule used in the process is identical to a coding sequence of the sequences shown in table I, columns 5 and 7.

[0449] Polypeptides (=proteins), which still have the essential biological or enzymatic activity of the polypeptide of the present invention conferring increased yield, e.g. an increased yield-related trait, for example enhanced tolerance to abiotic environmental stress, for example an increased drought tolerance and/or low temperature tolerance and/or an increased nutrient use efficiency, intrinsic yield and/or another mentioned yield-related trait as compared to a corresponding, e.g. non-transformed, wild type plant cell, plant or part thereof i.e. whose activity is essentially not reduced, are polypeptides with at least 10% or 20%, by preference 30% or 40%, especially preferably 50% or 60%, very especially preferably 80% or 90 or more of the wild type biological activity or enzyme activity, advantageously, the activity is essentially not reduced in comparison with the activity of a polypeptide shown in table II, columns 5 and 7 expressed under identical conditions.

[0450] Homologues of table I, columns 5 and 7 or of the derived sequences of table II, columns 5 and 7 also mean truncated sequences, cDNA, single-stranded DNA or RNA of the coding and noncoding DNA sequence. Homologues of said sequences are also understood as meaning derivatives, which comprise noncoding regions such as, for example, UTRs, terminators, enhancers or promoter variants. The promoters upstream of the nucleotide sequences stated can be modified by one or more nucleotide substitution(s), insertion(s) and/or deletion(s) without, however, interfering with the functionality or activity either of the promoters, the open reading frame (=ORF) or with the 3′-regulatory region such as terminators or other 3′-regulatory regions, which are far away from the ORF. It is furthermore possible that the activity of the promoters is increased by modification of their sequence, or that they are replaced completely by more active promoters, even promoters from heterologous organisms. Appropriate promoters are known to the person skilled in the art and are mentioned herein below.

[0451] In addition to the nucleic acid molecules encoding the polypeptide according to the invention described above, another aspect of the invention pertains to negative regulators of the activity of a nucleic acid molecules selected from the group according to table I, column 5 and/or 7, preferably column 7. Antisense polynucleotides thereto are thought to inhibit the downregulating activity of those negative regulators by specifically binding the target polynucleotide and interfering with transcription, splicing, transport, translation, and/or stability of the target polynucleotide. Methods are described in the prior art for targeting the antisense polynucleotide to the chromosomal DNA, to a primary RNA transcript, or to a processed mRNA. Preferably, the target regions include splice sites, translation initiation codons, translation termination codons, and other sequences within the open reading frame.

[0452] The term “antisense,” for the purposes of the invention, refers to a nucleic acid comprising a polynucleotide that is sufficiently complementary to all or a portion of a gene, primary transcript, or processed mRNA, so as to interfere with expression of the endogenous gene. “Complementary” polynucleotides are those that are capable of base pairing according to the standard Watson-Crick complementarity rules. specifically, purines will base pair with pyrimidines to form a combination of guanine paired with cytosine (G:C) and adenine paired with either thymine (A:T) in the case of DNA, or adenine paired with uracil (A:U) in the case of RNA. It is understood that two polynucleotides may hybridize to each other even if they are not completely complementary to each other, provided that each has at least one region that is substantially complementary to the other. The term “antisense nucleic acid” includes single stranded RNA as well as double-stranded DNA expression cassettes that can be transcribed to produce an antisense RNA. “Active” antisense nucleic acids are antisense RNA molecules that are capable of selectively hybridizing with a negative regulator of the activity of a nucleic acid molecules encoding a polypeptide having at least 80% sequence identity with the polypeptide selected from the group according to table II, column 5 and/or 7, preferably column 7.

[0453] The antisense nucleic acid can be complementary to an entire negative regulator strand, or to only a portion thereof. In an embodiment, the antisense nucleic acid molecule is antisense to a “noncoding region” of the coding strand of a nucleotide sequence encoding the polypeptide according to the invention. The term “noncoding region” refers to 5′ and 3′ sequences that flank the coding region that are not translated into amino acids (i.e., also referred to as 5′ and 3′ untranslated regions). The antisense nucleic acid molecule can be complementary to only a portion of the noncoding region of a mRNA. For example, the antisense oligonucleotide can be complementary to the region surrounding the translation start site of the mRNA. An antisense oligonucleotide can be, for example, about 5, 10, 15, 20, 25, 30, 35, 40, 45 or 50 nucleotides in length. Typically, the antisense molecules of the present invention comprise an RNA having 60-100% sequence identity with at least 14 consecutive nucleotides of a noncoding region of one of the nucleic acid of table I. Preferably, the sequence identity will be at least 70%, more preferably at least 75%, 80%, 85%, 90%, 95%, 98% and most preferably 99%.

[0454] An antisense nucleic acid of the invention can be constructed using chemical synthesis and enzymatic ligation reactions using procedures known in the art. For example, an antisense nucleic acid (e.g., an antisense oligonucleotide) can be chemically synthesized using naturally occurring nucleotides or variously modified nucleotides designed to increase the biological stability of the molecules or to increase the physical stability of the duplex formed between the antisense and sense nucleic acids, e.g., phosphorothioate derivatives and acridine substituted nucleotides can be used. Examples of modified nucleotides which can be used to generate the antisense nucleic acid include 5-fluorouracil, 5-bromouracil, 5-chlorouracil, 5-iodouracil, hypoxanthine, xanthine, 4-acetylcytosine, 5-(carboxyhydroxylmethyl)-uracil, 5-carboxymethylaminomethyl-2-thiouridine, 5-carboxymethylaminomethyluracil, dihydrouracil, beta-D-galactosylqueosine, inosine, N6-isopentenyladenine, 1-methylguanine, 1-methylinosine, 2,2-dimethylguanine, 2-methyladenine, 2-methylguanine, 3-methylcytosine, 5-methylcytosine, N6-adenine, 7-methylguanine, 5-methylaminomethyluracil, 5-methoxyaminomethyl-2-thiouracil, beta-D-mannosylqueosine, 5′-methoxycarboxymethyluracil, 5-methoxyuracil, 2-methylthio-N-6-isopentenyladenine, uracil-5-oxyacetic acid (v), wybutoxosine, pseudouracil, queosine, 2-thiocytosine, 5-methyl-2-thiouracil, 2-thiouracil, 4-thiouracil, 5-methyluracil, uracil-5-oxyacetic acid methylester, 5-methyl-2-thiouracil, 3-(3-amino-3-N-2-carboxypropyl)-uracil, acp3 and 2,6-diaminopurine. Alternatively, the antisense nucleic acid can be produced biologically using an expression vector into which a nucleic acid has been subcloned in an antisense orientation (i.e., RNA transcribed from the inserted nucleic acid will be of an antisense orientation to a target nucleic acid of interest, described further in the following subsection).

[0455] In yet another embodiment, the antisense nucleic acid molecule of the invention is an alpha-anomeric nucleic acid molecule. An alpha-anomeric nucleic acid molecule forms specific double-stranded hybrids with complementary RNA in which, contrary to the usual b-units, the strands run parallel to each other (Gaultier et al., Nucleic Acids. Res. 15, 6625 (1987)). The antisense nucleic acid molecule can also comprise a 2′-o-methylribonucleotide (Inoue et al., Nucleic Acids Res. 15, 6131 (1987)) or a chimeric RNA-DNA analogue (Inoue et al., FEBS Lett. 215, 327 (1987)).

[0456] The antisense nucleic acid molecules of the invention are typically administered to a cell or generated in situ such that they hybridize with or bind to cellular mRNA and/or genomic DNA. The hybridization can be by conventional nucleotide complementarity to form a stable duplex, or, for example, in the case of an antisense nucleic acid molecule which binds to DNA duplexes, through specific interactions in the major groove of the double helix. The antisense molecule can be modified such that it specifically binds to a receptor or an antigen expressed on a selected cell surface, e.g., by linking the antisense nucleic acid molecule to a peptide or an antibody which binds to a cell surface receptor or antigen. The antisense nucleic acid molecule can also be delivered to cells using the vectors described herein. To achieve sufficient intracellular concentrations of the antisense molecules, vector constructs in which the antisense nucleic acid molecule is placed under the control of a strong prokaryotic, viral, or eukaryotic (including plant) promoter are preferred.

[0457] As an alternative to antisense polynucleotides, ribozymes, sense polynucleotides, or double stranded RNA (dsRNA) can be used to reduce expression of the polypeptide according to the invention polypeptide. By “ribozyme” is meant a catalytic RNA-based enzyme with ribonuclease activity which is capable of cleaving a single-stranded nucleic acid, such as an mRNA, to which it has a complementary region. Ribozymes (e.g., hammerhead ribozymes described in Haselhoff and Gerlach, Nature 334, 585 (1988)) can be used to catalytically cleave the mRNA transcripts to thereby inhibit translation of the mRNA. A ribozyme having specificity for the polypeptide according to the invention-encoding nucleic acid can be designed based upon the nucleotide sequence of the polypeptide according to the invention cDNA, as disclosed herein or on the basis of a heterologous sequence to be isolated according to methods taught in this invention. For example, a derivative of a Tetrahymena L-19 IVS RNA can be constructed in which the nucleotide sequence of the active site is complementary to the nucleotide sequence to be cleaved in the polypeptide according to the invention-encoding mRNA. See, e.g. U.S. Pat. Nos. 4,987,071 and 5,116,742 to Cech et al. Alternatively, the mRNA can be used to select a catalytic RNA having a specific ribonuclease activity from a pool of RNA molecules. See, e.g. Bartel D., and Szostak J. W., Science 261, 1411 (1993). In preferred embodiments, the ribozyme will contain a portion having at least 7, 8, 9, 10, 12, 14, 16, 18 or 20 nucleotides, and more preferably 7 or 8 nucleotides, that have 100% complementarity to a portion of the target RNA. Methods for making ribozymes are known to those skilled in the art. See, e.g. U.S. Pat. Nos. 6,025,167, 5,773,260 and 5,496,698.

[0458] The term “dsRNA,” as used herein, refers to RNA hybrids comprising two strands of RNA. The dsRNAs can be linear or circular in structure. In a preferred embodiment, dsRNA is specific for a polynucleotide encoding either the polypeptide according to table II or a polypeptide having at least 70% sequence identity with a polypeptide according to table II. The hybridizing RNAs may be substantially or completely complementary. By “substantially complementary,” is meant that when the two hybridizing RNAs are optimally aligned using the BLAST program as described above, the hybridizing portions are at least 95% complementary. Preferably, the dsRNA will be at least 100 base pairs in length. Typically, the hybridizing RNAs will be of identical length with no over hanging 5′ or 3′ ends and no gaps. However, dsRNAs having 5′ or 3′ overhangs of up to 100 nucleotides may be used in the methods of the invention.

[0459] The dsRNA may comprise ribonucleotides or ribonucleotide analogs, such as 2′-O-methyl ribosyl residues, or combinations thereof. See, e.g. U.S. Pat. Nos. 4,130,641 and 4,024,222. A dsRNA polyriboinosinic acid:polyribocytidylic acid is described in U.S. Pat. No. 4,283,393. Methods for making and using dsRNA are known in the art. One method comprises the simultaneous transcription of two complementary DNA strands, either in vivo, or in a single in vitro reaction mixture. See, e.g. U.S. Pat. No. 5,795,715. In one embodiment, dsRNA can be introduced into a plant or plant cell directly by standard transformation procedures. Alternatively, dsRNA can be expressed in a plant cell by transcribing two complementary RNAs.

[0460] Other methods for the inhibition of endogenous gene expression, such as triple helix formation (Moser et al., Science 238, 645 (1987), and Cooney et al., Science 241, 456 (1988)) and co-suppression (Napoli et al., The Plant Cell 2,279, 1990) are known in the art. Partial and full-length cDNAs have been used for the co-suppression of endogenous plant genes. See, e.g. U.S. Pat. Nos. 4,801,340, 5,034,323, 5,231,020, and 5,283,184; Van der Kroll et al., The Plant Cell 2, 291, (1990); Smith et al., Mol. Gen. Genetics 224, 477 (1990), and Napoli et al., The Plant Cell 2, 279 (1990).

[0461] For sense suppression, it is believed that introduction of a sense polynucleotide blocks transcription of the corresponding target gene. The sense polynucleotide will have at least 65% sequence identity with the target plant gene or RNA. Preferably, the percent identity is at least 80%, 90%, 95% or more. The introduced sense polynucleotide need not be full length relative to the target gene or transcript. Preferably, the sense polynucleotide will have at least 65% sequence identity with at least 100 consecutive nucleotides of one of the nucleic acids as depicted in table I. The regions of identity can comprise introns and/or exons and untranslated regions. The introduced sense polynucleotide may be present in the plant cell transiently, or may be stably integrated into a plant chromosome or extra-chromosomal replicon.

[0462] Further, embodiment of the invention is an expression vector or an expression cassette comprising a nucleic acid molecule described herein, e.g. the nucleic acid molecule of the invention or used in the method of the invention, e.g. comprising
[0463] (a) a nucleic acid molecule encoding the polypeptide shown in column 5 or 7 of table II;
[0464] (b) a nucleic acid molecule shown in column 5 or 7 of table I;
[0465] (c) a nucleic acid molecule, which, as a result of the degeneracy of the genetic code, can be derived from a polypeptide sequence depicted in column 5 or 7 of table II, and confers an increased yield, e.g. an increased yield-related trait, for example enhanced tolerance to abiotic environmental stress, for example an increased drought tolerance and/or low temperature tolerance and/or an increased nutrient use efficiency, intrinsic yield and/or another mentioned yield-related trait as compared to a corresponding, e.g. non-transformed, wild type plant cell, a plant or a part thereof;
[0466] (d) a nucleic acid molecule having at least 30% identity, preferably at least 40%, 50%, 60%, 70%, 75%, 80%, 85%, 90%, 95%, 96%, 97%, 98%, 99%, 99.5% with the nucleic acid molecule sequence of a polynucleotide comprising the nucleic acid molecule shown in column 5 or 7 of table I, and confers increased yield, e.g. an increased yield-related trait, for example enhanced tolerance to abiotic environmental stress, for example an increased drought tolerance and/or low temperature tolerance and/or an increased nutrient use efficiency, intrinsic yield and/or another mentioned yield-related trait as compared to a corresponding, e.g. non-transformed, wild type plant cell, a plant or a part thereof;
[0467] (e) a nucleic acid molecule encoding a polypeptide having at least 30% identity, preferably at least 40%, 50%, 60%, 70%, 75%, 80%, 85%, 90%, 95%, 96%, 97%, 98%, 99%, 99.5%, with the amino acid sequence of the polypeptide encoded by the nucleic acid molecule of (a), (b), (c) or (d) and having the activity represented by a nucleic acid molecule comprising a polynucleotide as depicted in column 5 of table I, and confers increased yield, e.g. an increased yield-related trait, for example enhanced tolerance to abiotic environmental stress, for example an increased drought tolerance and/or low temperature tolerance and/or an increased nutrient use efficiency, intrinsic yield and/or another mentioned yield-related trait as compared to a corresponding, e.g. non-transformed, wild type plant cell, a plant or a part thereof;
[0468] (f) nucleic acid molecule which hybridizes with a nucleic acid molecule of (a), (b), (c), (d) or
[0469] (e) under stringent hybridization conditions and confers increased yield, e.g. an increased yield-related trait, for example enhanced tolerance to abiotic environmental stress, for example an increased drought tolerance and/or low temperature tolerance and/or an increased nutrient use efficiency, intrinsic yield and/or another mentioned yield-related trait as compared to a corresponding, e.g. non-transformed, wild type plant cell, a plant or a part thereof;
[0470] (g) a nucleic acid molecule encoding a polypeptide which can be isolated with the aid of monoclonal or polyclonal antibodies made against a polypeptide encoded by one of the nucleic acid molecules of (a), (b), (c), (d), (e) or (f) and having the activity represented by the nucleic acid molecule comprising a polynucleotide as depicted in column 5 of table I;
[0471] (h) a nucleic acid molecule encoding a polypeptide comprising the consensus sequence or one or more polypeptide motifs as shown in column 7 of table IV, and preferably having the activity represented by a protein comprising a polypeptide as depicted in column 5 of table II or IV;
[0472] (i) a nucleic acid molecule encoding a polypeptide having the activity represented by a protein as depicted in column 5 of table II, and confers increased yield, e.g. an increased yield-related trait, for example enhanced tolerance to abiotic environmental stress, for example an increased drought tolerance and/or low temperature tolerance and/or an increased nutrient use efficiency, intrinsic yield and/or another mentioned yield-related trait as compared to a corresponding, e.g. non-transformed, wild type plant cell, a plant or a part thereof;
[0473] (j) nucleic acid molecule which comprises a polynucleotide, which is obtained by amplifying a cDNA library or a genomic library using the primers in column 7 of table III, and preferably having the activity represented by a protein comprising a polypeptide as depicted in column 5 of table II or IV; and
[0474] (k) a nucleic acid molecule which is obtainable by screening a suitable nucleic acid library, especially a cDNA library and/or a genomic library, under stringent hybridization conditions with a probe comprising a complementary sequence of a nucleic acid molecule of (a) or (b) or with a fragment thereof, having at least 15 nt, preferably 20 nt, 30 nt, 50 nt, 100 nt, 200 nt, 500 nt, 750 or 1000 nt of a nucleic acid molecule complementary to a nucleic acid molecule sequence characterized in (a) to (e) and encoding a polypeptide having the activity represented by a protein comprising a polypeptide as depicted in column 5 of table II.

[0475] The invention further provides an isolated recombinant expression vector or expression cassette comprising the nucleic acid molecule of the invention, wherein expression of the vector or nucleic acid molecule, respectively in a host cell results in an increased yield, e.g. an increased yield-related trait, for example enhanced tolerance to abiotic environmental stress, an increased drought tolerance and/or low temperature tolerance and/or an increased nutrient use efficiency, intrinsic yield and/or another mentioned yield-related trait as compared to the corresponding, e.g. non-transformed, wild type of the host cell.

[0476] A plant expression cassette preferably contains regulatory sequences capable of driving gene expression in plant cells and operably linked so that each sequence can fulfill its function, for example, termination of transcription by polyadenylation signals. Preferred polyadenylation signals are those originating from Agrobacterium tumefaciens T-DNA such as the gene 3 known as octopine synthase of the Ti-plasmid pTiACH5 (Gielen et al., EMBO J. 3, 835 1(984)) or functional equivalents thereof but also all other terminators functionally active in plants are suitable. As plant gene expression is very often not limited on transcriptional levels, a plant expression cassette preferably contains other operably linked sequences like translational enhancers such as the overdrive-sequence containing the 5″-untranslated leader sequence from tobacco mosaic virus enhancing the protein per RNA ratio (Gallie et al., Nucl. Acids Research 15, 8693 (1987)).

[0477] Plant gene expression has to be operably linked to an appropriate promoter conferring gene expression in a timely, cell or tissue specific manner. Preferred are promoters driving constitutive expression (Benfey et al., EMBO J. 8, 2195 (1989)) like those derived from plant viruses like the 35S CaMV (Franck et al., Cell 21, 285 (1980)), the 19S CaMV (see also U.S. Pat. No. 5,352,605 and PCT Application No. WO 84/02913) or plant promoters like those from Rubisco small subunit described in U.S. Pat. No. 4,962,028. Other promoters, e.g. super-promoter (Ni et al., Plant Journal 7, 661 (1995)), Ubiquitin promoter (Callis et al., J. Biol. Chem., 265, 12486 (1990); U.S. Pat. No. 5,510,474; U.S. Pat. No. 6,020,190; Kawalleck et al., Plant. Molecular Biology, 21, 673 (1993)) or 34S promoter (GenBank Accession numbers M59930 and X16673) were similar useful for the present invention and are known to a person skilled in the art. Developmental stage-preferred promoters are preferentially expressed at certain stages of development. Tissue and organ preferred promoters include those that are preferentially expressed in certain tissues or organs, such as leaves, roots, seeds, or xylem. Examples of tissue preferred and organ preferred promoters include, but are not limited to fruit-preferred, ovule-preferred, male tissue-preferred, seed-preferred, integument-preferred, tuber-preferred, stalk-preferred, pericarp-preferred, and leaf-preferred, stigma-preferred, pollen-preferred, anther-preferred, a petal-preferred, sepal-preferred, pedicel-preferred, silique-preferred, stem-preferred, root-preferred promoters, and the like. Seed preferred promoters are preferentially expressed during seed development and/or germination. For example, seed preferred promoters can be embryo-preferred, endosperm preferred, and seed coat-preferred. See Thompson et al., BioEssays 10, 108 (1989). Examples of seed preferred promoters include, but are not limited to, cellulose synthase (celA), Cim1, gamma-zein, globulin-1, maize 19 kD zein (cZ19B1), and the like.

[0478] Other promoters useful in the expression cassettes of the invention include, but are not limited to, the major chlorophyll a/b binding protein promoter, histone promoters, the Ap3 promoter, the β-conglycin promoter, the napin promoter, the soybean lectin promoter, the maize 15 kD zein promoter, the 22 kD zein promoter, the 27 kD zein promoter, the g-zein promoter, the waxy, shrunken 1, shrunken 2 and bronze promoters, the Zm13 promoter (U.S. Pat. No. 5,086,169), the maize polygalacturonase promoters (PG) (U.S. Pat. Nos. 5,412,085 and 5,545,546), and the SGB6 promoter (U.S. Pat. No. 5,470,359), as well as synthetic or other natural promoters.

[0479] Additional advantageous regulatory sequences are, for example, included in the plant promoters such as CaMV/35S (Franck et al., Cell 21 285 (1980)), PRP1 (Ward et al., Plant. Mol. Biol. 22, 361 (1993)), SSU, OCS, lib4, usp, STLS1, B33, LEB4, nos, ubiquitin, napin or phaseolin promoter. Also advantageous in this connection are inducible promoters such as the promoters described in EP 388 186 (benzyl sulfonamide inducible), Gatz et al., Plant J. 2, 397 (1992) (tetracyclin inducible), EP-A-0 335 528 (abscisic acid inducible) or WO 93/21334 (ethanol or cyclohexenol inducible). Additional useful plant promoters are the cytoplasmic FBPase promotor or ST-LSI promoter of potato (Stockhaus et al., EMBO J. 8, 2445 (1989)), the phosphorybosyl phyrophoshate amido transferase promoter of Glycine max (gene bank accession No. U87999) or the noden specific promoter described in EP-A-0 249 676. Additional particularly advantageous promoters are seed specific promoters which can be used for monocotyledones or dicotyledones and are described in U.S. Pat. No. 5,608,152 (napin promoter from rapeseed), WO 98/45461 (phaseolin promoter from Arabidopsis), U.S. Pat. No. 5,504,200 (phaseolin promoter from Phaseolus vulgaris), WO 91/13980 (Bce4 promoter from Brassica) and Baeumlein et al., Plant J., 2 (2), 233 (1992) (LEB4 promoter from leguminosa). Said promoters are useful in dicotyledones. The following promoters are useful for example in monocotyledones Ipt-2- or Ipt-1-promoter from barley (WO 95/15389 and WO 95/23230) or hordein promoter from barley. Other useful promoters are described in WO 99/16890. It is possible in principle to use all natural promoters with their regulatory sequences like those mentioned above for the novel process. It is also possible and advantageous in addition to use synthetic promoters.

[0480] The gene construct may also comprise further genes which are to be inserted into the organisms and which are for example involved in stress tolerance and yield increase. It is possible and advantageous to insert and express in host organisms regulatory genes such as genes for inducers, repressors or enzymes which intervene by their enzymatic activity in the regulation, or one or more or all genes of a biosynthetic pathway. These genes can be heterologous or homologous in origin. The inserted genes may have their own promoter or else be under the control of same promoter as the sequences of the nucleic acid of table I or their homologs.

[0481] The gene construct advantageously comprises, for expression of the other genes present, additionally 3′ and/or 5′ terminal regulatory sequences to enhance expression, which are selected for optimal expression depending on the selected host organism and gene or genes.

[0482] These regulatory sequences are intended to make specific expression of the genes and protein expression possible as mentioned above. This may mean, depending on the host organism, for example that the gene is expressed or over-expressed only after induction, or that it is immediately expressed and/or over-expressed.

[0483] The regulatory sequences or factors may moreover preferably have a beneficial effect on expression of the introduced genes, and thus increase it. It is possible in this way for the regulatory elements to be enhanced advantageously at the transcription level by using strong transcription signals such as promoters and/or enhancers. However, in addition, it is also possible to enhance translation by, for example, improving the stability of the mRNA.

[0484] Other preferred sequences for use in plant gene expression cassettes are targeting-sequences necessary to direct the gene product in its appropriate cell compartment (for review see Kermode, Crit. Rev. Plant Sci. 15 (4), 285 (1996) and references cited therein) such as the vacuole, the nucleus, all types of plastids like amyloplasts, chloroplasts, chromoplasts, the extracellular space, mitochondria, the endoplasmic reticulum, oil bodies, peroxisomes and other compartments of plant cells.

[0485] Plant gene expression can also be facilitated via an inducible promoter (for review see Gatz, Annu. Rev. Plant Physiol. Plant Mol. Biol. 48, 89 (1997)). Chemically inducible promoters are especially suitable if gene expression is wanted to occur in a time specific manner.

[0486] Table VI lists several examples of promoters that may be used to regulate transcription of the nucleic acid coding sequences of the present invention.

TABLE VI
Examples of tissue-specific and inducible promoters in plants

| Expression | Reference |
|---|---|
| Cor78—Cold, drought, | Ishitani, et al., Plant Cell 9, 1935 (1997), |
| salt, ABA, wounding- | Yamaguchi-Shinozaki and Shinozaki, Plant |
| inducible | Cell 6, 251 (1994) |
| Rci2A—Cold, | Capel et al., Plant Physiol 115, 569 (1997) |
| dehydration-inducible | |
| Rd22—Drought, salt | Yamaguchi-Shinozaki and Shinozaki, Mol. |
| | Gen. Genet. 238, 17 (1993) |
| Cor15A—Cold, | Baker et al., Plant Mol. Biol. 24, 701 (1994) |
| dehydration, ABA | |
| GH3—Auxin inducible | Liu et al., Plant Cell 6, 645 (1994) |
| ARSK1—Root, salt | Hwang and Goodman, Plant J. 8, 37 (1995) |
| inducible | |
| PtxA—Root, salt | GenBank accession X67427 |
| inducible | |
| SbHRGP3—Root | Ahn et al., Plant Cell 8, 1477 (1998). |
| specific | |
| KST1—Guard cell | Plesch et al., Plant Journal. 28(4), 455- |
| specific | (2001) |
| KAT1—Guard cell | Plesch et al., Gene 249, 83 (2000), |
| specific | Nakamura et al., Plant Physiol. 109, 371 |
| | (1995) |
| salicylic acid inducible | PCT Application No. WO 95/19443 |
| tetracycline inducible | Gatz et al., Plant J. 2, 397 (1992) |
| Ethanol inducible | PCT Application No. WO 93/21334 |
| Pathogen inducible PRP1 | Ward et al., Plant. Mol. Biol. 22, 361 -(1993) |
| Heat inducible hsp80 | U.S. Pat. No. 5,187,267 |
| Cold inducible alpha- | PCT Application No. WO 96/12814 |
| amylase | |
| Wound-inducible pinII | European Patent No. 375 091 |
| RD29A—salt-inducible | Yamaguchi-Shinozalei et al. Mol. Gen. Genet. |
| | 236, 331 (1993) |
| Plastid-specific viral | PCT Application No. WO 95/16783, PCT |
| RNA—polymerase | Application WO 97/06250 |

[0487] Additional flexibility in controlling heterologous gene expression in plants may be obtained by using DNA binding domains and response elements from heterologous sources (i.e., DNA binding domains from non-plant sources). An example of such a heterologous DNA binding domain is the LexA DNA binding domain (Brent and Ptashne, Cell 43, 729 (1985)).

[0488] In one embodiment, the language “substantially free of cellular material” includes preparations of a protein having less than about 30% (by dry weight) of contaminating material (also referred to herein as a “contaminating polypeptide”), more preferably less than about 20% of contaminating material, still more preferably less than about 10% of contaminating material, and most preferably less than about 5% contaminating material.

[0489] The nucleic acid molecules, polypeptides, polypeptide homologs, fusion polypeptides, primers, vectors, and host cells described herein can be used in one or more of the following methods: identification of S. cerevisiae, E. coli or Brassica napus, Glycine max, Zea mays or Oryza sativa and related organisms; mapping of genomes of organisms related to S. cerevisiae, E. coli; identification and localization of S. cerevisiae, E. coli or Brassica napus, Glycine max, Zea mays or Oryza sativa sequences of interest; evolutionary studies; determination of polypeptide regions required for function; modulation of a polypeptide activity; modulation of the metabolism of one or more cell functions; modulation of the transmembrane transport of one or more compounds; modulation of yield, e.g. of a yield-related trait, e.g. of tolerance to abiotic environmental stress, e.g. to low temperature tolerance, drought tolerance, water use efficiency, nutrient use efficiency and/or intrinsic yield; and modulation of expression of polypeptide nucleic acids.

[0490] The nucleic acid molecules of the invention are also useful for evolutionary and polypeptide structural studies. The metabolic and transport processes in which the molecules of the invention participate are utilized by a wide variety of prokaryotic and eukaryotic cells; by comparing the sequences of the nucleic acid molecules of the present invention to those encoding similar enzymes from other organisms, the evolutionary relatedness of the organisms can be assessed. Similarly, such a comparison permits an assessment of which regions of the sequence are conserved and which are not, which may aid in determining those regions of the polypeptide that are essential for the functioning of the enzyme. This type of determination is of value for polypeptide engineering studies and may give an indication of what the polypeptide can tolerate in terms of mutagenesis without losing function.

[0491] There are a number of mechanisms by which the alteration of the polypeptide of the invention may directly affect yield, e.g. yield-related trait, for example tolerance to abiotic environmental stress, for example drought tolerance and/or low temperature tolerance, and/or nutrient use efficiency, intrinsic yield and/or another mentioned yield-related trait.

[0492] The effect of the genetic modification in plants regarding yield, e.g. yield-related trait, for example tolerance to abiotic environmental stress, for example drought tolerance and/or low temperature tolerance, and/or nutrient use efficiency, intrinsic yield and/or another mentioned yield-related trait can be assessed by growing the modified plant under less than suitable conditions and then analyzing the growth characteristics and/or metabolism of the plant. Such analysis techniques are well known to one skilled in the art, and include dry weight, fresh weight, polypeptide synthesis, carbohydrate synthesis, lipid synthesis, evapotranspiration rates, general plant and/or crop yield, flowering, reproduction, seed setting, root growth, respiration rates, photosynthesis rates, etc. (Applications of HPLC in Biochemistry in: Laboratory Techniques in Biochemistry and Molecular Biology, Vol. 17; Rehm et al., 1993 Biotechnology, Vol. 3, Chapter III: Product recovery and purification, page 469-714, VCH: Weinheim; Belter P. A. et al., 1988, Bioseparations: downstream processing for biotechnology, John Wiley and Sons; Kennedy J. F., and Cabral J. M. S., 1992, Recovery processes for biological materials, John Wiley and Sons; Shaeiwitz J. A. and Henry J. D., 1988, Biochemical separations, in Ulmann's Encyclopedia of Industrial Chemistry, Vol. B3, Chapter 11, page 1-27, VCH: Weinheim; and Dechow F. J., 1989, Separation and purification techniques in biotechnology, Noyes Publications).

[0493] For example, yeast expression vectors comprising the nucleic acids disclosed herein, or fragments thereof, can be constructed and transformed into S. cerevisiae using standard protocols. The resulting transgenic cells can then be assayed for generation or alteration of their yield, e.g. their yield-related traits, for example tolerance to abiotic environmental stress, for example drought tolerance and/or low temperature tolerance, and/or nutrient use efficiency, intrinsic yield and/or another mentioned yield-related trait. Similarly, plant expression vectors comprising the nucleic acids disclosed herein, or fragments thereof, can be constructed and transformed into an appropriate plant cell such as Arabidopsis, soy, rape, maize, cotton, rice, wheat, Medicago truncatula, etc., using standard protocols. The resulting transgenic cells and/or plants derived therefrom can then be assayed for generation or alteration of their yield, e.g. their yield-related traits, for example tolerance to abiotic environmental stress, for example drought tolerance and/or low temperature tolerance, and/or nutrient use efficiency, intrinsic yield and/or another mentioned yield-related trait.

[0494] The engineering of one or more genes according to table I and coding for the polypeptides of table II of the invention may also result in altered activities which indirectly and/or directly impact the tolerance to abiotic environmental stress of algae, plants, ciliates, fungi, or other microorganisms like C. glutamicum.

[0495] In particular, the invention provides a method of producing a transgenic plant with a nucleic acid, wherein expression of the nucleic acid(s) in the plant results in in increasing yield, e.g. increasing a yield-related trait, for example enhancing tolerance to abiotic environmental stress, for example increasing drought tolerance and/or low temperature tolerance and/or increasing nutrient use efficiency, increasing intrinsic yield and/or another mentioned yield-related trait as compared to a wild type plant comprising: (a) transforming a plant cell with an expression vector comprising a nucleic acid set forth in Table I and (b) generating from the plant cell a transgenic plant with enhanced tolerance to abiotic environmental stress and/or increased yield as compared to a wild type plant.

[0496] The present invention also provides antibodies that specifically bind to the polypeptide according to the invention, or a portion thereof, as encoded by a nucleic acid described herein. Antibodies can be made by many well-known methods (see, e.g. Harlow and Lane, “Antibodies; A Laboratory Manual”, Cold Spring Harbor Laboratory, Cold Spring Harbor, N.Y., (1988)). Briefly, purified antigen can be injected into an animal in an amount and in intervals sufficient to elicit an immune response. Antibodies can either be purified directly, or spleen cells can be obtained from the animal. The cells can then fused with an immortal cell line and screened for antibody secretion. The antibodies can be used to screen nucleic acid clone libraries for cells secreting the antigen. Those positive clones can then be sequenced. See, for example, Kelly et al., Bio/Technology 10, 163 (1992); Bebbington et al., Bio/Technology 10, 169 (1992).

[0497] Gene expression in plants is regulated by the interaction of protein transcription factors with specific nucleotide sequences within the regulatory region of a gene. One example of transcription factors are polypeptides that contain zinc finger (ZF) motifs. Each ZF module is approximately 30 amino acids long folded around a zinc ion. The DNA recognition domain of a ZF protein is a α-helical structure that inserts into the major grove of the DNA double helix. The module contains three amino acids that bind to the DNA with each amino acid contacting a single base pair in the target DNA sequence. ZF motifs are arranged in a modular repeating fashion to form a set of fingers that recognize a contiguous DNA sequence. For example, a three-fingered ZF motif will recognize 9 by of DNA. Hundreds of proteins have been shown to contain ZF motifs with between 2 and 37 ZF modules in each protein (Isalan M. et al., Biochemistry 37 (35), 12026 (1998); Moore M. et al., Proc. Natl. Acad. Sci. USA 98 (4), 1432 (2001) and Moore M. et al., Proc. Natl. Acad. Sci. USA 98 (4), 1437 (2001); U.S. Pat. No. 6,007,988 and U.S. Pat. No. 6,013,453).

[0498] The regulatory region of a plant gene contains many short DNA sequences (cis-acting elements) that serve as recognition domains for transcription factors, including ZF proteins. Similar recognition domains in different genes allow the coordinate expression of several genes encoding enzymes in a metabolic pathway by common transcription factors. Variation in the recognition domains among members of a gene family facilitates differences in gene expression within the same gene family, for example, among tissues and stages of development and in response to environmental conditions.

[0499] Typical ZF proteins contain not only a DNA recognition domain but also a functional domain that enables the ZF protein to activate or repress transcription of a specific gene. Experimentally, an activation domain has been used to activate transcription of the target gene (U.S. Pat. No. 5,789,538 and patent application WO 95/19431), but it is also possible to link a transcription repressor domain to the ZF and thereby inhibit transcription (patent applications WO 00/47754 and WO 01/002019). It has been reported that an enzymatic function such as nucleic acid cleavage can be linked to the ZF (patent application WO 00/20622).

[0500] The invention provides a method that allows one skilled in the art to isolate the regulatory region of one or more polypeptides according to the invention-encoding genes from the genome of a plant cell and to design zinc finger transcription factors linked to a functional domain that will interact with the regulatory region of the gene. The interaction of the zinc finger protein with the plant gene can be designed in such a manner as to alter expression of the gene and preferably thereby to confer increasing yield, e.g. increasing a yield-related trait, for example enhancing tolerance to abiotic environmental stress, for example increasing drought tolerance and/or low temperature tolerance and/or increasing nutrient use efficiency, increasing intrinsic yield and/or another mentioned yield-related trait.

[0501] In particular, the invention provides a method of producing a transgenic plant with a coding nucleic acid, wherein expression of the nucleic acid(s) in the plant results in in increasing yield, e.g. increasing a yield-related trait, for example enhancing tolerance to abiotic environmental stress, for example increasing drought tolerance and/or low temperature tolerance and/or increasing nutrient use efficiency, increasing intrinsic yield and/or another mentioned yield-related trait as compared to a wild type plant comprising: (a) transforming a plant cell with an expression vector comprising a encoding nucleic acid, and (b) generating from the plant cell a transgenic plant with enhanced tolerance to abiotic environmental stress and/or increased yield as compared to a wild type plant. For such plant transformation, binary vectors such as pBinAR can be used (Hofgen and Willmitzer, Plant Science 66, 221 (1990)). Moreover suitable binary vectors are for example pBIN19, pBI101, pGPTV or pPZP (Hajukiewicz P. et al., Plant Mol. Biol., 25, 989 (1994)).

[0502] Alternate methods of transfection include the direct transfer of DNA into developing flowers via electroporation or Agrobacterium mediated gene transfer. Agrobacterium mediated plant transformation can be performed using for example the GV3101 (pMP90) (Koncz and Schell, Mol. Gen. Genet. 204, 383 (1986)) or LBA4404 (Ooms et al., Plasmid, 7, 15 (1982); Hoekema et al., Nature, 303, 179 (1983)) Agrobacterium tumefaciens strain. Transformation can be performed by standard transformation and regeneration techniques (Deblaere et al., Nucl. Acids. Res. 13, 4777 (1994); Gelvin and Schilperoort, Plant Molecular Biology Manual, 2nd Ed.—Dordrecht: Kluwer Academic Publ., 1995.—in Sect., Ringbuc Zentrale Signatur: BT11-P ISBN 0-7923-2731-4; Glick B. R. and Thompson J. E., Methods in Plant Molecular Biology and Biotechnology, Boca Raton: CRC Press, 1993.-360 S., ISBN 0-8493-5164-2). For example, rapeseed can be transformed via cotyledon or hypocotyl transformation (Moloney et al., Plant Cell Reports 8, 238 (1989); De Block et al., Plant Physiol. 91, 694 (1989)). Use of antibiotics for Agrobacterium and plant selection depends on the binary vector and the Agrobacterium strain used for transformation. Rapeseed selection is normally performed using kanamycin as selectable plant marker. Agrobacterium mediated gene transfer to flax can be performed using, for example, a technique described by Mlynarova et al., Plant Cell Report 13, 282 (1994)). Additionally, transformation of soybean can be performed using for example a technique described in European Patent No. 424 047, U.S. Pat. No. 5,322,783, European Patent No. 397 687, U.S. Pat. No. 5,376,543 or U.S. Pat. No. 5,169,770. Transformation of maize can be achieved by particle bombardment, polyethylene glycol mediated DNA uptake or via the silicon carbide fiber technique (see, for example, Freeling and Walbot “The maize handbook” Springer Verlag: New York (1993) ISBN 3-540-97826-7). A specific example of maize transformation is found in U.S. Pat. No. 5,990,387 and a specific example of wheat transformation can be found in PCT Application No. WO 93/07256.

[0503] Growing the modified plants under defined N-conditions, in an especial embodiment under abiotic environmental stress conditions, and then screening and analyzing the growth characteristics and/or metabolic activity assess the effect of the genetic modification in plants on increasing yield, e.g. increasing a yield-related trait, for example enhancing tolerance to abiotic environmental stress, for example increasing drought tolerance and/or low temperature tolerance and/or increasing nutrient use efficiency, increasing intrinsic yield and/or another mentioned yield-related trait. Such analysis techniques are well known to one skilled in the art. They include beneath to screening (Römpp Lexikon Biotechnologie, Stuttgart/New York: Georg Thieme Verlag 1992, “screening” p. 701) dry weight, fresh weight, protein synthesis, carbohydrate synthesis, lipid synthesis, evapotranspiration rates, general plant and/or crop yield, flowering, reproduction, seed setting, root growth, respiration rates, photosynthesis rates, etc. (Applications of HPLC in Biochemistry in: Laboratory Techniques in Biochemistry and Molecular Biology, Vol. 17; Rehm et al., 1993 Biotechnology, Vol. 3, Chapter III: Product recovery and purification, page 469-714, VCH: Weinheim; Better, P. A. et al., 1988 Bioseparations: downstream processing for biotechnology, John Wiley and Sons; Kennedy J. F. and Cabral J. M. S., 1992 Recovery processes for biological materials, John Wiley and Sons; Shaeiwitz J. A. and Henry J. D., 1988 Biochemical separations, in: Ullmann's Encyclopedia of Industrial Chemistry, Vol. B3, Chapter 11, page 1-27, VCH: Weinheim; and Dechow F. J. (1989) Separation and purification techniques in biotechnology, Noyes Publications).

[0504] In one embodiment, the present invention relates to a method for the identification of a gene product conferring in increasing yield, e.g. increasing a yield-related trait, for example enhancing tolerance to abiotic environmental stress, for example increasing drought tolerance and/or low temperature tolerance and/or increasing nutrient use efficiency, increasing intrinsic yield and/or another mentioned yield-related trait as compared to a corresponding, e.g. non-transformed, wild type cell in a cell of an organism for example plant, comprising the following steps:
[0505] (a) contacting, e.g. hybridizing, some or all nucleic acid molecules of a sample, e.g. cells, tissues, plants or microorganisms or a nucleic acid library, which can contain a candidate gene encoding a gene product conferring increasing yield, e.g. increasing a yield-related trait, for example enhancing tolerance to abiotic environmental stress, for example increasing drought tolerance and/or low temperature tolerance and/or increasing nutrient use efficiency, increasing i, with a nucleic acid molecule as shown in column 5 or 7 of table I A or B, or a functional homologue thereof;
[0506] (b) identifying the nucleic acid molecules, which hybridize under relaxed stringent conditions with said nucleic acid molecule, in particular to the nucleic acid molecule sequence shown in column 5 or 7 of table I, and, optionally, isolating the full length cDNA clone or complete genomic clone;
[0507] (c) identifying the candidate nucleic acid molecules or a fragment thereof in host cells, preferably in a plant cell;
[0508] (d) increasing the expressing of the identified nucleic acid molecules in the host cells for which enhanced tolerance to abiotic environmental stress and/or increased yield are desired;
[0509] (e) assaying the level of enhanced tolerance to abiotic environmental stress and/or increased yield of the host cells; and
[0510] (f) identifying the nucleic acid molecule and its gene product which confers increasing yield, e.g. increasing a yield-related trait, for example enhancing tolerance to abiotic environmental stress, for example increasing drought tolerance and/or low temperature tolerance and/or increasing nutrient use efficiency, increasing intrinsic yield and/or another mentioned yield-related trait in the host cell compared to the wild type.

[0511] Relaxed hybridization conditions are: After standard hybridization procedures washing steps can be performed at low to medium stringency conditions usually with washing conditions of 40°-55° C. and salt conditions between 2×SSC and 0.2×SSC with 0.1% SDS in comparison to stringent washing conditions as e.g. 60° to 68° C. with 0.1% SDS. Further examples can be found in the references listed above for the stringend hybridization conditions. Usually washing steps are repeated with increasing stringency and length until a useful signal to noise ratio is detected and depend on many factors as the target, e.g. its purity, GC-content, size etc, the probe, e.g. its length, is it a RNA or a DNA probe, salt conditions, washing or hybridization temperature, washing or hybridization time etc.

[0512] In another embodiment, the present invention relates to a method for the identification of a gene product the expression of which confers increased yield, e.g. an increased yield-related trait, for example enhanced tolerance to abiotic environmental stress, for example an increased drought tolerance and/or low temperature tolerance and/or an increased nutrient use efficiency, intrinsic yield and/or another mentioned yield-related trait in a cell, comprising the following steps:
[0513] (a) identifying a nucleic acid molecule in an organism, which is at least 20%, preferably 25%, more preferably 30%, even more preferred are 35%. 40% or 50%, even more preferred are 60%, 70% or 80%, most preferred are 90% or 95% or more homolog to the nucleic acid molecule encoding a protein comprising the polypeptide molecule as shown in column 5 or 7 of table II, or comprising a consensus sequence or a polypeptide motif as shown in column 7 of table IV, or being encoded by a nucleic acid molecule comprising a polynucleotide as shown in column 5 or 7 of table I, or a homologue thereof as described herein, for example via homology search in a data bank;
[0514] (b) enhancing the expression of the identified nucleic acid molecules in the host cells;
[0515] (c) assaying the level of enhancement of in increasing yield, e.g. increasing a yield-related trait, for example enhancing tolerance to abiotic environmental stress, for example increasing drought tolerance and/or low temperature tolerance and/or increasing nutrient use efficiency, increasing intrinsic yield and/or another mentioned yield-related trait in the host cells; and
[0516] (d) identifying the host cell, in which the enhanced expression confers in increasing yield, e.g. increasing a yield-related trait, for example enhancing tolerance to abiotic environmental stress, for example increasing drought tolerance and/or low temperature tolerance and/or increasing nutrient use efficiency, increasing intrinsic yield and/or another mentioned yield-related trait in the host cell compared to a wild type.

[0517] Further, the nucleic acid molecule disclosed herein, in particular the nucleic acid molecule shown column 5 or 7 of table I A or B, may be sufficiently homologous to the sequences of related species such that these nucleic acid molecules may serve as markers for the construction of a genomic map in related organism or for association mapping. Furthermore natural variation in the genomic regions corresponding to nucleic acids disclosed herein, in particular the nucleic acid molecule shown column 5 or 7 of table I A or B, or homologous thereof may lead to variation in the activity of the proteins disclosed herein, in particular the proteins comprising polypeptides as shown in column 5 or 7 of table II A or B, or comprising the consensus sequence or the polypeptide motif as shown in column 7 of table IV, and their homolgous and in consequence in a natural variation of an increased yield, e.g. an increased yield-related trait, for example enhanced tolerance to abiotic environmental stress, for example an increased drought tolerance and/or low temperature tolerance and/or an increased nutrient use efficiency, and/or another mentioned yield-related trait.

[0518] In consequence natural variation eventually also exists in form of more active allelic variants leading already to a relative increase in yield, e.g. an increase in an yield-related trait, for example enhanced tolerance to abiotic environmental stress, for example drought tolerance and/or low temperature tolerance and/or nutrient use efficiency, and/or another mentioned yield-related trait. Different variants of the nucleic acids molecule disclosed herein, in particular the nucleic acid comprising the nucleic acid molecule as shown column 5 or 7 of table I A or B, which corresponds to different levels of increased yield, e.g. different levels of increased yield-related trait, for example different enhancing tolerance to abiotic environmental stress, for example increased drought tolerance and/or low temperature tolerance and/or increasing nutrient use efficiency, increasing intrinsic yield and/or another mentioned yield-related trait, can be identified and used for marker assisted breeding for an increased yield, e.g. an increased yield-related trait, for example enhanced tolerance to abiotic environmental stress, for example an increased drought tolerance and/or low temperature tolerance and/or an increased nutrient use efficiency, and/or another mentioned yield-related trait.

[0519] Accordingly, the present invention relates to a method for breeding plants with an increased yield, e.g. an increased yield-related trait, for example enhanced tolerance to abiotic environmental stress, for example an increased drought tolerance and/or low temperature tolerance and/or an increased nutrient use efficiency, and/or anot, comprising
[0520] (a) selecting a first plant variety with an increased yield, e.g. an increased yield-related trait, for example enhanced tolerance to abiotic environmental stress, for example an increased drought tolerance and/or low temperature tolerance and/or an increased nutrient use efficiency, and/or anot based on increased expression of a nucleic acid of the invention as disclosed herein, in particular of a nucleic acid molecule comprising a nucleic acid molecule as shown in column 5 or 7 of table I A or B, or a polypeptide comprising a polypeptide as shown in column 5 or 7 of table II A or B, or comprising a consensus sequence or a polypeptide motif as shown in column 7 of table IV, or a homologue thereof as described herein;
[0521] (b) associating the level of increased yield, e.g. increased yield-related trait, for example enhanced tolerance to abiotic environmental stress, for example increased drought tolerance and/or low temperature tolerance and/or an increased nutrient use efficiency, and/or another mentioned yield-related trait with the expression level or the genomic structure of a gene encoding said polypeptide or said nucleic acid molecule;
[0522] (c) crossing the first plant variety with a second plant variety, which significantly differs in its level of increased yield, e.g. increased yield-related trait, for example enhanced tolerance to abiotic environmental stress, for example an increased drought tolerance and/or low temperature tolerance and/or an increased nutrient use efficiency, and/or another mentioned yield-related trait; and
[0523] (d) identifying, which of the offspring varieties has got increased levels of an increased yield, e.g. an increased yield-related trait, for example enhanced tolerance to abiotic environmental stress, for example an increased drought tolerance and/or low temperature tolerance and/or an increased nutrient use efficiency, and/or another mentioned yield-related trait

[0524] In another embodiment, the present invention relates to a kit comprising the nucleic acid molecule, the vector, the host cell, the polypeptide, or the antisense, RNAi, snRNA, dsRNA, siRNA, miRNA, ta-siRNA, cosuppression molecule, or ribozyme molecule, or the viral nucleic acid molecule, the antibody, plant cell, the plant or plant tissue, the harvestable part, the propagation material and/or the compound and/or agonist identified according to the method of the invention.

[0525] The compounds of the kit of the present invention may be packaged in containers such as vials, optionally with/in buffers and/or solution. If appropriate, one or more of said components might be packaged in one and the same container. Additionally or alternatively, one or more of said components might be adsorbed to a solid support as, e.g. a nitrocellulose filter, a glass plate, a chip, or a nylon membrane or to the well of a micro titerplate. The kit can be used for any of the herein described methods and embodiments, e.g. for the production of the host cells, transgenic plants, pharmaceutical compositions, detection of homologous sequences, identification of antagonists or agonists, as food or feed or as a supplement thereof or as supplement for the treating of plants, etc. Further, the kit can comprise instructions for the use of the kit for any of said embodiments. In one embodiment said kit comprises further a nucleic acid molecule encoding one or more of the aforementioned protein, and/or an antibody, a vector, a host cell, an antisense nucleic acid, a plant cell or plant tissue or a plant. In another embodiment said kit comprises PCR primers to detect and discrimante the nucleic acid molecule to be reduced in the process of the invention, e.g. of the nucleic acid molecule of the invention.

[0526] In a further embodiment, the present invention relates to a method for the production of an agricultural composition providing the nucleic acid molecule for the use according to the process of the invention, the nucleic acid molecule of the invention, the vector of the invention, the antisense, RNAi, snRNA, dsRNA, siRNA, miRNA, ta-siRNA, cosuppression molecule, ribozyme, or antibody of the invention, the viral nucleic acid molecule of the invention, or the polypeptide of the invention or comprising the steps of the method according to the invention for the identification of said compound or agonist; and formulating the nucleic acid molecule, the vector or the polypeptide of the invention or the agonist, or compound identified according to the methods or processes of the present invention or with use of the subject matters of the present invention in a form applicable as plant agricultural composition.

[0527] In another embodiment, the present invention relates to a method for the production of the plant culture composition comprising the steps of the method of the present invention; and formulating the compound identified in a form acceptable as agricultural composition.

[0528] Under “acceptable as agricultural composition” is understood, that such a composition is in agreement with the laws regulating the content of fungicides, plant nutrients, herbizides, etc. Preferably such a composition is without any harm for the protected plants and the animals (humans included) fed therewith. said polypeptide or nucleic acid molecule or the genomic structure of the genes encoding said polypeptide or nucleic acid molecule of the invention.

[0529] Throughout this application, various publications are referenced. The disclosures of all of these publications and those references cited within those publications in their entireties are hereby incorporated by reference into this application in order to more fully describe the state of the art to which this invention pertains.

[0530] It should also be understood that the foregoing relates to preferred embodiments of the present invention and that numerous changes and variations may be made therein without departing from the scope of the invention. The invention is further illustrated by the following examples, which are not to be construed in any way as limiting. On the contrary, it is to be clearly understood that various other embodiments, modifications and equivalents thereof, which, after reading the description herein, may suggest themselves to those skilled in the art without departing from the spirit of the present invention and/or the scope of the claims.

[0531] In one embodiment, the increased yield results in an increase of the production of a specific ingredient including, without limitation, an enhanced and/or improved sugar content or sugar composition, an enhanced or improved starch content and/or starch composition, an enhanced and/or improved oil content and/or oil composition (such as enhanced seed oil content), an enhanced or improved protein content and/or protein composition (such as enhanced seed protein content), an enhanced and/or improved vitamin content and/or vitamin composition, or the like.

[0532] Further, in one embodiment, the method of the present invention comprises harvesting the plant or a part of the plant produced or planted and producing fuel with or from the harvested plant or part thereof. Further, in one embodiment, the method of the present invention comprises harvesting a plant part useful for starch isolation and isolating starch from this plant part, wherein the plant is plant useful for starch production, e.g. potato. Further, in one embodiment, the method of the present invention comprises harvesting a plant part useful for oil isolation and isolating oil from this plant part, wherein the plant is plant useful for oil production, e.g. oil seed rape or Canola, cotton, soy, or sunflower.

[0533] For example, in one embodiment, the oil content in the corn seed is increased. Thus, the present invention relates to the production of plants with increased oil content per acre (harvestable oil).

[0534] For example, in one embodiment, the oil content in the soy seed is increased. Thus, the present invention relates to the production of soy plants with increased oil content per acre (harvestable oil).

[0535] For example, in one embodiment, the oil content in the OSR seed is increased. Thus, the present invention relates to the production of OSR plants with increased oil content per acre (harvestable oil).

[0536] For example, the present invention relates to the production of cotton plants with increased oil content per acre (harvestable oil).

[0537] Incorporated by reference are further the following applications of which the present application claims the priority: U.S. patent applications US61/227,839 and US61/261,775 as well as EP patent applications EP09166280.9 and EP09176194.0. The present invention is further illustrated by the following examples which are not meant to be limiting.

### Example 1a

[0538] Engineering Arabidopsis plants with an increased yield, e.g. an increased yield-related trait, for example enhanced tolerance to abiotic environmental stress, for example an increased drought tolerance and/or low temperature tolerance and/or an increased nutrient use efficiency, and/or another mentioned yield-related trait by over-expressing the genes of Table I, e.g. expressing genes of the present invention.

[0539] Cloning of the sequences of the present invention as shown in table I, column 5 and 7, for the expression in plants.

[0540] Unless otherwise specified, standard methods as described in Sambrook et al., Molecular Cloning: A laboratory manual, Cold Spring Harbor 1989, Cold Spring Harbor Laboratory

[0541] Press are used.

[0542] The inventive sequences as shown in table I, column 5, were amplified by PCR as described in the protocol of the Pfu Ultra, Pfu Turbo or Herculase DNA polymerase (Stratagene). The composition for the protocol of the Pfu Ultra, Pfu Turbo or Herculase DNA polymerase was as follows: 1×PCR buffer (Stratagene), 0.2 mM of each dNTP, 100 ng genomic DNA of Saccharomyces cerevisiae (strain S288C; Research Genetics, Inc., now Invitrogen), Escherichia coli (strain MG1655; E. coli Genetic Stock Center), Synechocystis sp. (strain PCC6803), Azotobacter vinelandii (strain N. R. Smith, 16), Thermus thermophilus (HB8) or 50 ng cDNA from various tissues and development stages of Arabidopsis thaliana (ecotype Columbia), Physcomitrella patens, Glycine max (variety Resnick), or Zea mays (variety B73, Mo17, A188), 50 μmol forward primer, 50 μmol reverse primer, with or without 1 M Betaine, 2.5 u Pfu Ultra, Pfu Turbo or Herculase DNA polymerase.

[0543] The amplification cycles were as follows:

[0544] 1 cycle of 2-3 minutes at 94-95° C., then 25-36 cycles with 30-60 seconds at 94-95° C., 30-45 seconds at 50-60° C. and 210-480 seconds at 72° C., followed by 1 cycle of 5-10 minutes at 72° C., then 4-16° C.—preferably for Saccharomyces cerevisiae, Escherichia coli, Synechocystis sp., Azotobacter vinelandii, Thermus thermophilus.

[0545] In case of Arabidopsis thaliana, Brassica napus, Glycine max, Oryza sativa, Physcomitrella patens, Zea mays the amplification cycles were as follows:

1 cycle with 30 seconds at 94° C., 30 seconds at 61° C., 15 minutes at 72° C.,
then 2 cycles with 30 seconds at 94° C., 30 seconds at 60° C., 15 minutes at 72° C.,
then 3 cycles with 30 seconds at 94° C., 30 seconds at 59° C., 15 minutes at 72° C.,
then 4 cycles with 30 seconds at 94° C., 30 seconds at 58° C., 15 minutes at 72° C.,
then 25 cycles with 30 seconds at 94° C., 30 seconds at 57° C., 15 minutes at 72° C.,
then 1 cycle with 10 minutes at 72° C.,
then finally 4-16° C.

[0546] RNA were generated with the RNeasy Plant Kit according to the standard protocol (Qiagen) and Superscript II Reverse Transkriptase was used to produce double stranded cDNA according to the standard protocol (Invitrogen).

[0547] ORF specific primer pairs for the genes to be expressed are shown in table III, column 7. The following adapter sequences were added to Saccharomyces cerevisiae ORF specific primers (see table III) for cloning purposes:

| SEQ ID NO: 1 | |
|---|---|
| i) | foward primer: 5′-GGAATTCCAGCTGACCACC-3′ |
| SEQ ID NO: 2 | |
| ii) | reverse primer: 5′-GATCCCCGGGAATTGCCATG-3′ |

[0548] These adaptor sequences allow cloning of the ORF into the various vectors containing the Resgen adaptors, see table column E of table VII.

[0549] The following adapter sequences were added to Saccharomyces cerevisiae, Escherichia coli, Synechocystis sp., Azotobacter vinelandii, Thermus thermophilus, Arabidopsis thaliana, Brassica napus, Glycine max, Oryza sativa, Physcomitrella patens, or Zea mays ORF specific primers for cloning purposes:

| SEQ ID NO: 3 | |
|---|---|
| iii) | forward primer: 5′-TTGCTCTTCC-3′ |
| SEQ ID NO: 4 | |
| iiii) | reverse primer: 5′-TTGCTCTTCG-3′ |

[0550] The adaptor sequences allow cloning of the ORF into the various vectors containing the Colic adaptors, see table column E of table VII.

[0551] Therefore for amplification and cloning of Saccharomyces cerevisiae SEQ ID NO: 3153, a primer consisting of the adaptor sequence i) and the ORF specific sequence SEQ ID NO: 3155 and a second primer consisting of the adaptor sequence ii) and the ORF specific sequence SEQ ID NO: 3156 were used.

[0552] For amplification and cloning of Escherichia coli SEQ ID NO: 1783, a primer consisting of the adaptor sequence iii) and the ORF specific sequence SEQ ID NO: 1951 and a second primer consisting of the adaptor sequence iiii) and the ORF specific sequence SEQ ID NO: 1952 were used.

[0553] For amplification and cloning of Azotobacter vinelandii SEQ ID NO: 1030, a primer consisting of the adaptor sequence iii) and the ORF specific sequence SEQ ID NO: 1778 and a second primer consisting of the adaptor sequence iiii) and the ORF specific sequence SEQ ID NO: 1779 were used.

[0554] For amplification and cloning of Arabidopsis thaliana SEQ ID NO: 22, a primer consisting of the adaptor sequence iii) and the ORF specific sequence SEQ ID NO:1022 and a second primer consisting of the adaptor sequence iiii) and the ORF specific sequence SEQ ID NO: 1023 were used.

[0555] For amplification and cloning of Glycine max SEQ ID NO: 5241, a primer consisting of the adaptor sequence iii) and the ORF specific sequence SEQ ID NO: 5269 and a second primer consisting of the adaptor sequence iiii) and the ORF specific sequence SEQ ID NO: 5270 were used.

[0556] Following these examples every sequence disclosed in table I, preferably column 5, can be cloned by fusing the adaptor sequences to the respective specific primers sequences as disclosed in table III, column 7 using the respective vectors shown in Table VII.

TABLE VII
Overview of the different vectors used for cloning the ORFs and shows their SEQIDs
(column A), their vector names (column B), the promotors they contain for expression
of the ORFs (column C), the additional artificial targeting sequence column D),
the adapter sequence (column E), the expression type conferred by the promoter
mentioned in column B (column F) and the figure number (column G).

| | B | C | D | E | | |
|---|---|---|---|---|---|---|
| A | Vector | Promoter | Target | Adapter | F | G |
| SeqID | Name | Name | Sequence | Sequence | Expression Type | Figure |
| 9 | pMTX0270p | Super | | Colic | non targeted con- | 6 |
| | | | | | stitutive expression | |
| | | | | | preferentially in | |
| | | | | | green tissues | |
| 12 | pMTX155 | Big35S | | Resgen | non targeted con- | 7 |
| | | | | | stitutive expression | |
| | | | | | preferentially in | |
| | | | | | green tissues | |
| 13 | VC-MME354- | Super | FNR | Resgen | plastidic targeted | 3 |
| | 1QCZ | | | | constitutive ex- | |
| | | | | | pression preferen- | |
| | | | | | tially in green tis- | |
| | | | | | sues | |
| 15 | VC-MME220- | Super | | Colic | non targeted con- | 1 |
| | 1qcz | | | | stitutive expression | |
| | | | | | preferentially in | |
| | | | | | green tissues | |
| 16 | VC-MME432- | Super | FNR | Colic | plastidic targeted | 4 |
| | 1qcz | | | | constitutive ex- | |
| | | | | | pression preferen- | |
| | | | | | tially in green tis- | |
| | | | | | sues | |
| 18 | VC-MME221- | PcUbi | | Colic | non targeted con- | 2 |
| | 1qcz | | | | stitutive expression | |
| | | | | | preferentially in | |
| | | | | | green tissues | |
| 19 | pMTX447korr | PcUbi | FNR | Colic | plastidic targeted | 8 |
| | | | | | constitutive ex- | |
| | | | | | pression preferen- | |
| | | | | | tially in green tis- | |
| | | | | | sues | |
| 21 | VC-MME489- | Super | | Resgen | non targeted con- | 5 |
| | 1QCZ | | | | stitutive expression | |
| | | | | | preferentially in | |
| | | | | | green tissues | |
| 6207 | VC-MME301- | USP | | Resgen | non targeted ex- | 9 |
| | 1QCZ | | | | pression preferen- | |
| | | | | | tially in seeds | |
| 6208 | VC-MME289- | USP | | Colic | non targeted ex- | 10 |
| | 1qcz | | | | pression preferen- | |
| | | | | | tially in seeds | |

### Example 1b)

[0557] Construction of binary vectors for non-targeted expression of proteins.

[0558] “Non-targeted” expression in this context means, that no additional targeting sequence were added to the ORF to be expressed.

[0559] For non-targeted expression the binary vectors used for cloning were VC-MME220-1qcz SEQ ID NO 15 (FIG. 1), VC-MME221-1qcz SEQ ID NO 18 (FIG. 2), VC-MME489-1QCZ SEQ ID NO: 21 (FIG. 5), VC-MME301-1QCZ SEQ ID NO 6207 (FIG. 9) and VC-MME289-1qcz SEQ ID NO 6208 (FIG. 10), respectively. The binary vectors used for cloning the targeting sequence were VC-MME489-1QCZ SEQ ID NO: 21 (FIG. 5) and pMTX0270p SEQ ID NO 9 (FIG. 6), respectively. Other useful binary vectors are known to the skilled worker; an overview of binary vectors and their use can be found in Hellens R., Mullineaux P. and Klee H., (Trends in Plant Science, 5 (10), 446 (2000)). Such vectors have to be equally equipped with appropriate promoters and targeting sequences.

### Example 1c)

[0560] Amplification of the plastidic targeting sequence of the gene FNR from Spinacia oleracea and construction of vector for plastid-targeted expression in preferential green tissues or preferential in seeds.

[0561] In order to amplify the targeting sequence of the FNR gene from S. oleracea, genomic DNA was extracted from leaves of 4 weeks old S. oleracea plants (DNeasy Plant Mini Kit, Qiagen, Hilden). The gDNA was used as the template for a PCR.

[0562] To enable cloning of the transit sequence into the vector VC-MME489-1QCZ an EcoRI restriction enzyme recognition sequence was added to both the forward and reverse primers, whereas for cloning in the vectors pMTX0270p, VC-MME220-1qcz and VC-MME221-1qcz a PmeI restriction enzyme recognition sequence was added to the forward primer and a NcoI site was added to the reverse primer.

FNR5EcoResgen
SEQ ID NO: 5
ATA GAA TTC GCA TAA ACT TAT CTT CAT AGT TGC C
FNR3EcoResgen
SEQ ID NO: 6
ATA GAA TTC AGA GGC GAT CTG GGC CCT
FNR5PmeColic
SEQ ID NO: 7
ATA GTT TAA ACG CAT AAA CTT ATC TTC ATA GTT GCC
FNR3NcoColic
SEQ ID NO: 8
ATA CCA TGG AAG AGC AAG AGG CGA TCT GGG CCC T

[0563] The resulting sequence SEQ ID NO: 10 amplified from genomic spinach DNA, comprised a 511TR (bp 1-165), and the coding region (bp 166-273 and 351-419). The coding sequence is interrupted by an intronic sequence from by 274 to by 350:

(SEQ ID NO: 10)
gcataaacttatcttcatagttgccactccaatttgctccttgaatctcctccacccaatacataatccactcctccatcaccc
acttcactactaaatcaaacttaactctgtttttctctctcctcctttcatttcttattcttccaatcatcgtactccgccatgaccac
cgctgtcaccgccgctgtttctttcccctctaccaaaaccacctctctctccgcccgaagctcctccgtcatttcccctgaca
aaatcagctacaaaaaggtgattcccaatttcactgtgttttttattaataatttgttattttgatgatgagatgattaatttgggt
gctgcaggttcctttgtactacaggaatgtatctgcaactgggaaaatgggacccatcagggcccagatcgcctct

[0564] The PCR fragment derived with the primers FNR5EcoResgen and FNR3EcoResgen was digested with EcoRI and ligated in the vector VC-MME489-1QCZ that had also been digested with EcoRI. The correct orientation of the FNR targeting sequence was tested by sequencing. The vector generated in this ligation step were VC-MME354-1 QCZ.

[0565] The PCR fragment derived with the primers FNR5PmeColic and FNR3NcoColic was digested with PmeI and NcoI and ligated in the vectors VC-MME220-1qcz and VC-MME221-1qcz that had been digested with SmaI and NcoI. The vectors generated in this ligation step were VC-MME432-1qcz and pMTX447korr, respectively.

[0566] For plastidic-targeted constitutive expression in preferentially green tissues an artificial promoter A(ocs)3AmasPmas promoter (Super promotor)) (Ni et al., Plant Journal 7, 661 (1995), WO 95/14098) was used in context of the vector VC-MME354-1QCZ for ORFs from Saccharomyces cerevisiae and in context of the vector VC-MME432-1qcz for ORFs from Escherichia coli, resulting in each case in an “in-frame” fusion of the FNR targeting sequence with the ORFs.

[0567] For plastidic-targeted constitutive expression in preferentially green tissues and seeds the PcUbi promoter was used in context of the vector pMTX447korr for ORFs from Saccharomyces cerevisiae, Escherichia coli, Synechocystis sp., Azotobacter vinelandii, Thermus thermophilus, Arabidopsis thaliana, Brassica napus, Glycine max, Oryza sativa, Physcomitrella patens, or Zea mays, resulting in each case in an “in-frame” fusion of the FNR targeting sequence with the ORFs.

### Example 1d)

[0568] Cloning of inventive sequences as shown in table I, column 5 in the different expression vectors.

[0569] For cloning the ORFs of SEQ ID NO: 3153 from S. cerevisiae into vectors containing the Resgen adaptor sequence the respective vector DNA was treated with the restriction enzyme NcoI. For cloning of ORFs from Saccharomyces cerevisiae into vectors containing the Colic adaptor sequence, the respective vector DNA was treated with the restriction enzymes PacI and NcoI following the standard protocol (MBI Fermentas). For cloning of ORFs from Escherichia coli, Synechocystis sp., Azotobacter vinelandii, Thermus thermophilus, Arabidopsis thaliana, Brassica napus, Glycine max, Oryza sativa, Physcomitrella patens, or Zea mays the vector DNA was treated with the restriction enzymes PacI and NcoI following the standard protocol (MBI Fermentas). In all cases the reaction was stopped by inactivation at 70° C. for 20 minutes and purified over QIAquick or NucleoSpin Extract II columns following the standard protocol (Qiagen or Macherey-Nagel).

[0570] Then the PCR-product representing the amplified ORF with the respective adapter sequences and the vector DNA were treated with T4 DNA polymerase according to the standard protocol (MBI Fermentas) to produce single stranded overhangs with the parameters 1 unit T4 DNA polymerase at 37° C. for 2-10 minutes for the vector and 1-2 u T4 DNA polymerase at 15-17° C. for 10-60 minutes for the PCR product representing SEQ ID NO: 3153.

[0571] The reaction was stopped by addition of high-salt buffer and purified over QIAquick or NucleoSpin Extract II columns following the standard protocol (Qiagen or Macherey-Nagel).

[0572] According to this example the skilled person is able to clone all sequences disclosed in table I, preferably column 5.

[0573] Approximately 30-60 ng of prepared vector and a defined amount of prepared amplificate were mixed and hybridized at 65° C. for 15 minutes followed by 37° C. 0.1° C./1 seconds, followed by 37° C. 10 minutes, followed by 0.1° C./1 seconds, then 4-10° C.

[0574] The ligated constructs were transformed in the same reaction vessel by addition of competent E. coli cells (strain DH5alpha) and incubation for 20 minutes at 1° C. followed by a heat shock for 90 seconds at 42° C. and cooling to 1-4° C. Then, complete medium (SOC) was added and the mixture was incubated for 45 minutes at 37° C. The entire mixture was subsequently plated onto an agar plate with 0.05 mg/ml kanamycin and incubated overnight at 37° C.

[0575] The outcome of the cloning step was verified by amplification with the aid of primers which bind upstream and downstream of the integration site, thus allowing the amplification of the insertion. The amplifications were carried out as described in the protocol of Taq DNA polymerase (Gibco-BRL). The amplification cycles were as follows:

[0576] 1 cycle of 1-5 minutes at 94° C., followed by 35 cycles of in each case 15-60 seconds at 94° C., 15-60 seconds at 50-66° C. and 5-15 minutes at 72° C., followed by 1 cycle of 10 minutes at 72° C., then 4-16° C.

[0577] Several colonies were checked, but only one colony for which a PCR product of the expected size was detected was used in the following steps.

[0578] A portion of this positive colony was transferred into a reaction vessel filled with complete medium (LB) supplemented with kanamycin and incubated overnight at 37° C.

[0579] The plasmid preparation was carried out as specified in the Qiaprep or NucleoSpin Multi-96 Plus standard protocol (Qiagen or Macherey-Nagel).

[0580] Generation of transgenic plants which express SEQ ID NO: 3153 or any other sequence disclosed in table I, preferably column 5

[0581] 1-5 ng of the plasmid DNA isolated was transformed by electroporation or transformation into competent cells of Agrobacterium tumefaciens, of strain GV 3101 pMP90 (Koncz and Schell, Mol. Gen. Gent. 204, 383 (1986)). Thereafter, complete medium (YEP) was added and the mixture was transferred into a fresh reaction vessel for 3 hours at 28° C. Thereafter, all of the reaction mixture was plated onto YEP agar plates supplemented with the respective antibiotics, e.g. rifampicine (0.1 mg/ml), gentamycine (0.025 mg/ml and kanamycin (0.05 mg/ml) and incubated for 48 hours at 28° C.

[0582] The agrobacteria that contains the plasmid construct were then used for the trans-formation of plants.

[0583] A colony was picked from the agar plate with the aid of a pipette tip and taken up in 3 ml of liquid TB medium, which also contained suitable antibiotics as described above. The preculture was grown for 48 hours at 28° C. and 120 rpm.

[0584] 400 ml of LB medium containing the same antibiotics as above were used for the main culture. The preculture was transferred into the main culture. It was grown for 18 hours at 28° C. and 120 rpm. After centrifugation at 4 000 rpm, the pellet was resuspended in infiltration medium (MS medium, 10% sucrose).

[0585] In order to grow the plants for the transformation, dishes (Piki Saat 80, green, provided with a screen bottom, 30×20×4.5 cm, from Wiesauplast, Kunststofftechnik, Germany) were half-filled with a GS 90 substrate (standard soil, Werkverband E.V., Germany). The dishes were watered overnight with 0.05% Proplant solution (Chimac-Apriphar, Belgium). A. thaliana C24 seeds (Nottingham Arabidopsis Stock Centre, UK; NASC Stock N906) were scattered over the dish, approximately 1 000 seeds per dish. The dishes were covered with a hood and placed in the stratification facility (8 h, 110 μmol/m²s¹, 22° C.; 16 h, dark, 6° C.). After 5 days, the dishes were placed into the short-day controlled environment chamber (8 h, 130 μmol/m²s¹, 22° C.; 16 h, dark, 20° C.), where they remained for approximately 10 days until the first true leaves had formed.

[0586] The seedlings were transferred into pots containing the same substrate (Teku pots, 7 cm, LC series, manufactured by Pöppelmann GmbH & Co, Germany). Five plants were pricked out into each pot. The pots were then returned into the short-day controlled environment chamber for the plant to continue growing.

[0587] After 10 days, the plants were transferred into the greenhouse cabinet (supplementary illumination, 16 h, 340 μE/m²s, 22° C.; 8 h, dark, 20° C.), where they were allowed to grow for further 17 days.

[0588] For the transformation, 6-week-old Arabidopsis plants, which had just started flowering were immersed for 10 seconds into the above-described agrobacterial suspension which had previously been treated with 10 μl Silwett L77 (Crompton S. A., Osi Specialties, Switzerland). The method in question is described by Clough J. C. and Bent A. F. (Plant J. 16, 735 (1998)).

[0589] The plants were subsequently placed for 18 hours into a humid chamber. Thereafter, the pots were returned to the greenhouse for the plants to continue growing. The plants remained in the greenhouse for another 10 weeks until the seeds were ready for harvesting.

[0590] Depending on the tolerance marker used for the selection of the transformed plants the harvested seeds were planted in the greenhouse and subjected to a spray selection or else first sterilized and then grown on agar plates supplemented with the respective selection agent. Since the vector contained the bar gene as the tolerance marker, plantlets were sprayed four times at an interval of 2 to 3 days with 0.02% BASTA® and transformed plants were allowed to set seeds.

[0591] The seeds of the transgenic A. thaliana plants were stored in the freezer (at −20° C.).

### Example 1e

### Plant Screening (Arabidopsis) for Growth Under Limited Nitrogen Supply

[0592] Arabidopsis thaliana seeds were sown in pots containing a 1:1 (v/v) mixture of nutrient depleted soil (“Einheitserde Typ 0”, 30% clay, Tantau, Wansdorf Germany) and sand. Germination was induced by a four day period at 4° C., in the dark. Subsequently the plants were grown under standard growth conditions (photoperiod of 16 h light and 8 h dark, 20° C., 60% relative humidity, and a photon flux density of 200 μE/m²s). The plants were grown and cultured, inter alia they were watered every second day with a N-depleted nutrient solution. The N-depleted nutrient solution e.g. contained beneath water

| mineral nutrient | final concentration | |
|---|---|---|
| KCl | 3.00 | mM |
| MgSO₄ × 7 H₂O | 0.5 | mM |
| CaCl₂ × 6 H₂O | 1.5 | mM |
| K₂SO₄ | 1.5 | mM |
| NaH₂PO₄ | 1.5 | mM |
| Fe-EDTA | 40 | μM |
| H₃BO₃ | 25 | μM |
| MnSO₄ × H₂O | 1 | μM |
| ZnSO₄ × 7 H₂O | 0.5 | μM |
| Cu₂SO₄ × 5 H₂O | 0.3 | μM |
| Na₂MoO₄ × 2 H₂O | 0.05 | μM |

[0593] After 9 to 10 days the plants were individualized. After a total time of 29 to 31 days the plants were harvested and rated by the fresh weight of the aerial parts of the plants. Per transgenic construct 4 independent transgenic lines (=events) were tested (28 plants per construct). The results thereof are summarized in table VIII-A.

TABLE VIII-A
Biomass production of transgenic Arabidopsis thaliana
grown under limited nitrogen supply (increased NUE).

| SeqID | Target | Locus | Biomass Increase |
|---|---|---|---|
| 1958 | cytoplasmic | B1430 | 1.338 |

Biomass increase was calculated as ratio of the mean of the weights for transgenic plants compared to the mean of the weights of wild type control plants from the same experiment, grown in the same culture facility as the transformed plants and harvested on the same day. Transgenic plants containing the indicated SeqIDs showed a biomass increase of 10% or more in comparison to control plants with a p-value of a two-sided T-test below 0.1.

### Example 1f

### Plant Screening for Growth Under Low Temperature Conditions

[0594] In a standard experiment soil was prepared as 3.5:1 (v/v) mixture of nutrient rich soil (GS90, Tantau, Wansdorf, Germany) and sand. Pots were filled with soil mixture and placed into trays. Water was added to the trays to let the soil mixture take up appropriate amount of water for the sowing procedure. The seeds for transgenic A. thaliana plants were sown in pots (6 cm diameter). Stratification was established for a period of 3 days in the dark at 4° C.-5° C. Germination of seeds and growth was initiated at a growth condition of 20° C., approx. 60% relative humidity, 16 h photoperiod and illumination with fluorescent light at 150-200 μmol/m²s. BASTA selection was done at day 9 after sowing by spraying pots with plantlets from the top. Therefore, a 0.07% (v/v) solution of BASTA concentrate (183 g/l glufosinate-ammonium) in tap water was sprayed. The wild-type control plants were sprayed with tap water only (instead of spraying with BASTA dissolved in tap water) but were otherwise treated identically. Watering was carried out every two days after covers were removed from the trays. Plants were individualized 12-13 days after sowing by removing the surplus of seedlings leaving one seedling in a pot. Cold (chilling to 11° C.-12° C.) was applied 14-16 days after sowing until the end of the experiment. For measuring biomass performance, plant fresh weight was determined at harvest time (35-37 days after sowing) by cutting shoots and weighing them. Plants were in the stage prior to flowering and prior to growth of inflorescence when harvested. Transgenic plants were compared to the non-transgenic wild-type control plants harvested at the same day. Significance values for the statistical significance of the biomass changes were calculated by applying the ‘student's’ t test (parameters: two-sided, unequal variance).

[0595] Up to five lines per transgenic construct were tested in 2 to 3 successive experimental levels. Only constructs that displayed positive performance were subjected to the next experimental level. In the final experimental level 20-58 plants were tested. Biomass performance was evaluated as described above. Data are shown for constructs that displayed increased biomass performance in at least two successive experimental levels.

TABLE VIII-B
Biomass production of transgenic A. thaliana
after imposition of chilling stress.

| SeqID | Target | Locus | Biomass Increase |
|---|---|---|---|
| 1958 | cytoplasmic | B1430 | 1.610 |
| 3882 | cytoplasmic | YDR046C | 1.206 |
| 6079 | cytoplasmic | YDR046C_2 | 1.206 |

Biomass production was measured by weighing plant rosettes. Biomass increase was calculated as ratio of average weight of transgenic plants compared to average weight of wild-type control plants from the same experiment. The mean biomass increase of transgenic constructs is given. Transgenic plants containing the indicated SeqIDs showed a biomass increase of 10% or more in comparison to control plants with a p-value of a two-sided T-test below 0.1.

### Example 1g

### Plant Screening for Growth Under Cycling Drought Conditions

[0596] In the cycling drought assay repetitive stress is applied to plants without leading to desiccation. In a standard experiment soil is prepared as 1:1 (v/v) mixture of nutrient rich soil (GS90, Tantau, Wansdorf, Germany) and quarz sand. Pots (6 cm diameter) are filled with this mixture and placed into trays. Water is added to the trays to let the soil mixture take up appropriate amount of water for the sowing procedure (day 1) and subsequently seeds of transgenic A. thaliana plants and their wild-type controls are sown in pots. Then the filled tray is covered with a transparent lid and transferred into a precooled (4° C.-5° C.) and darkened growth chamber. Stratification is established for a period of 3 days in the dark at 4° C.-5° C. or, alternatively, for 4 days in the dark at 4° C. Germination of seeds and growth is initiated at a growth condition of 20° C., 60% relative humidity, 16 h photoperiod and illumination with fluorescent light at approximately 200 μmol/m2s. Covers are removed 7-8 days after sowing. BASTA selection is done at day 10 or day 11 (9 or 10 days after sowing) by spraying pots with plantlets from the top. In the standard experiment, a 0.07% (v/v) solution of BASTA concentrate (183 g/l glufosinate-ammonium) in tap water is sprayed once or, alternatively, a 0.02% (v/v) solution of BASTA is sprayed three times. The wild-type control plants are sprayed with tap water only (instead of spraying with BASTA dissolved in tap water) but are otherwise treated identically. Plants are individualized 13-14 days after sowing by removing the surplus of seedlings and leaving one seedling in soil. Transgenic events and wild-type control plants are evenly distributed over the chamber.

[0597] The water supply throughout the experiment is limited and plants are subjected to cycles of drought and re-watering. Watering is carried out at day 1 (before sowing), day 14 or day 15, day 21 or day 22, and, finally, day 27 or day 28. For measuring biomass production, plant fresh weight is determined one day after the final watering (day 28 or day 29) by cutting shoots and weighing them. Besides weighing, phenotypic information can be added in case of plants that differ from the wild type control. Plants are in the stage prior to flowering and prior to growth of inflorescence when harvested. Significance values for the statistical significance of the biomass changes are calculated by applying the ‘student's’ t test (parameters: two-sided, unequal variance).

[0598] Up to four lines (events) per transgenic construct were tested in successive experimental levels (up to 3). Transgenic lines showing increased biomass production compared to wild-type plants were subjected to the next experimental level. Usually in the first level five plants per construct were tested and in the subsequent levels 14-40 plants were tested. Biomass performance was evaluated as described above. Data from level 3 are shown in table VIII-C.

TABLE VIII-C
Biomass production of transgenic A. thaliana
developed under cycling drought

| SeqID | Target | Locus | Biomass Increase |
|---|---|---|---|
| 3882 | plastidic | YDR046C | 1.351 |
| 6079 | plastidic | YDR046C_2 | 1.351 |

Biomass production was measured by weighing plant rosettes. Biomass increase was calculated as ratio of average weight for transgenic plants compared to average weight of wild type control plants from the same experiment. The mean biomass increase of transgenic plants is given (significance value <0.05).

### Example 2

[0599] Engineering Arabidopsis plants with an increased yield, e.g. an increased yield-related trait, for example enhanced tolerance to abiotic environmental stress, for example an increased drought tolerance and/or low temperature tolerance and/or an increased nutrient use efficiency, and/or another mentioned yield-related trait by over-expressing, the yield-increasing, e.g. the polypeptide according to the invention, e.g. low temperature resistance and/or tolerance related protein encoding genes from Saccharomyces cerevisiae or Synechocystis or E. coli using tissue-specific and/or stress inducible promoters.

[0600] Transgenic Arabidopsis plants can be created as in example 1 to express the polypeptide according to the invention, e.g. yield increasing, e.g. low temperature resistance and/or tolerance related protein encoding transgenes under the control of a tissue-specific and/or stress inducible promoter.

[0601] T2 generation plants are produced and are grown under stress conditions, preferably conditions of low temperature. Biomass production is determined after a total time of 29 to 30 days starting with the sowing. The transgenic Arabidopsis plant produces more biomass than non-transgenic control plants.

### Example 3

[0602] Over-expression of the yield-increasing, e.g. the polypeptide according to the invention, e.g. low temperature resistance and/or tolerance related protein, e.g. stress related genes from Saccharomyces cerevisiae or Synechocystis or E. coli provides tolerance of multiple abiotic stresses

[0603] Plants that exhibit tolerance of one abiotic stress often exhibit tolerance of another environmental stress. This phenomenon of cross-tolerance is not understood at a mechanistic level (McKersie and Leshem, 1994). Nonetheless, it is reasonable to expect that plants exhibiting enhanced tolerance to low temperature, e.g. chilling temperatures and/or freezing temperatures, due to the expression of a transgene might also exhibit tolerance to drought and/or salt and/or other abiotic stresses. In support of this hypothesis, the expression of several genes are up or down-regulated by multiple abiotic stress factors including low temperature, drought, salt, osmoticum, ABA, etc. (e.g. Hong et al., Plant Mol Biol 18, 663 (1992); Jagendorf and Takabe, Plant Physiol 127, 1827 (2001)); Mizoguchi et al., Proc Natl Acad Sci USA 93, 765 (1996); Zhu, Curr Opin Plant Biol 4, 401 (2001)).

[0604] To determine salt tolerance, seeds of A. thaliana can be sterilized (100% bleach, 0.1% TritonX for five minutes two times and rinsed five times with ddH2O). Seeds were plated on non-selection media (1/2 MS, 0.6% phytagar, 0.5 g/L MES, 1% sucrose, 2 μg/ml benamyl). Seeds are allowed to germinate for approximately ten days. At the 4-5 leaf stage, transgenic plants were potted into 5.5 cm diameter pots and allowed to grow (22° C., continuous light) for approximately seven days, watering as needed. To begin the assay, two liters of 100 mM NaCl and ⅛ MS are added to the tray under the pots. To the tray containing the control plants, three liters of ⅛ MS are added. The concentrations of NaCl supplementation are increased stepwise by 50 mM every 4 days up to 200 mM. After the salt treatment with 200 mM, fresh and survival and biomass production of the plants is determined.

[0605] To determine drought tolerance, seeds of the transgenic and low temperature lines can be germinated and grown for approximately 10 days to the 4-5 leaf stage as above. The plants are then transferred to drought conditions and can be grown through the flowering and seed set stages of development. Photosynthesis can be measured using chlorophyll fluorescence as an indicator of photosynthetic fitness and integrity of the photosystems. Survival and plant biomass production as an indicators for seed yield is determined.

[0606] Plants that have tolerance to salinity or low temperature have higher survival rates and biomass production including seed yield and dry matter production than susceptible plants.

### Example 4

[0607] Engineering alfalfa plants with an increased yield, e.g. an increased yield-related trait, for example enhanced tolerance to abiotic environmental stress, for example an increased drought tolerance and/or low temperature tolerance and/or an increased nutrient use efficiency, and/or another mentioned yield-related trait, e.g. enhanced abiotic environmental stress tolerance and/or increased biomass production by over-expressing yield-increasing, e.g. the polypeptide according to the invention-coding, e.g. low temperature resistance and/or tolerance related genes from Saccharomyces cerevisiae or Synechocystis or E. coli or Azotobacter vinelandii.

[0608] A regenerating clone of alfalfa (Medicago sativa) can be transformed using state of the art methods (e.g. McKersie et al., Plant Physiol 119, 839 (1999)). Regeneration and trans-formation of alfalfa is genotype dependent and therefore a regenerating plant is required. Methods to obtain regenerating plants have been described. For example, these can be selected from the cultivar Rangelander (Agriculture Canada) or any other commercial alfalfa variety as described by Brown D. C. W. and Atanassov A. (Plant Cell Tissue Organ Culture 4, 111 (1985)). Alternatively, the RA3 variety (University of Wisconsin) is selected for use in tissue culture (Walker et al., Am. J. Bot. 65, 654 (1978)).

[0609] Petiole explants are cocultivated with an overnight culture of Agrobacterium tumefaciens C58C1 pMP90 (McKersie et al., Plant Physiol 119, 839 (1999)) or LBA4404 containing a binary vector. Many different binary vector systems have been described for plant transformation (e.g. An G., in Agrobacterium Protocols, Methods in Molecular Biology, Vol 44, pp 47-62, Gartland K. M. A. and Davey M. R. eds. Humana Press, Totowa, N.J.). Many are based on the vector pBIN19 described by Bevan (Nucleic Acid Research. 12, 8711 (1984)) that includes a plant gene expression cassette flanked by the left and right border sequences from the Ti plasmid of Agrobacterium tumefaciens. A plant gene expression cassette consists of at least two genes—a selection marker gene and a plant promoter regulating the transcription of the cDNA or genomic DNA of the trait gene. Various selection marker genes can be used including the Arabidopsis gene encoding a mutated acetohydroxy acid synthase (AHAS) enzyme (U.S. Pat. Nos. 5,7673,666 and 6,225,105). Similarly, various promoters can be used to regulate the trait gene that provides constitutive, developmental, tissue or environmental regulation of gene transcription. In this example, the 34S promoter (GenBank Accession numbers M59930 and X16673) is used to provide constitutive expression of the trait gene.

[0610] The explants are cocultivated for 3 days in the dark on SH induction medium containing 288 mg/L Pro, 53 mg/L thioproline, 4.35 g/L K₂SO₄, and 100 μm acetosyringinone. The explants are washed in half-strength Murashige-Skoog medium (Murashige and Skoog, 1962) and plated on the same SH induction medium without acetosyringinone but with a suitable selection agent and suitable antibiotic to inhibit Agrobacterium growth. After several weeks, somatic embryos are transferred to BOi2Y development medium containing no growth regulators, no antibiotics, and 50 g/L sucrose. Somatic embryos are subsequently germinated on half-strength Murashige-Skoog medium. Rooted seedlings are transplanted into pots and grown in a greenhouse.

[0611] T1 or T2 generation plants are produced and subjected to low temperature experiments, e.g. as described above in example 1. For the assessment of yield increase, e.g. tolerance to low temperature, biomass production, intrinsic yield and/or dry matter production and/or seed yield is compared to plants lacking the transgene, e.g. corresponding non-transgenic wild type plants.

### Example 5

[0612] Engineering ryegrass plants with an increased yield, e.g. an increased yield-related trait, for example enhanced tolerance to abiotic environmental stress, for example an increased drought tolerance and/or low temperature tolerance and/or an increased nutrient use efficiency, and/or another mentioned yield-related trait e.g. enhanced stress tolerance, preferably tolerance to low temperature, and/or increased biomass production by over-expressing yield-increasing, e.g. the polypeptide according to the invention-coding, e.g. tolerance to low temperature related genes from Saccharomyces cerevisiae or Synechocystis or E. coli or Azotobacter vinelandii.

[0613] Seeds of several different ryegrass varieties may be used as explant sources for transformation, including the commercial variety Gunne available from Svalof Weibull seed company or the variety Affinity. Seeds are surface-sterilized sequentially with 1% Tween-20 for 1 minute, 100% bleach for 60 minutes, 3 rinses with 5 minutes each with deionized and distilled H₂O, and then germinated for 3-4 days on moist, sterile filter paper in the dark. Seedlings are further sterilized for 1 minute with 1% Tween-20, 5 minutes with 75% bleach, and rinsed 3 times with dd H₂O, 5 min each.

[0614] Surface-sterilized seeds are placed on the callus induction medium containing Murashige and Skoog basal salts and vitamins, 20 g/L sucrose, 150 mg/L asparagine, 500 mg/L casein hydrolysate, 3 g/L Phytagel, 10 mg/L BAP, and 5 mg/L dicamba. Plates are incubated in the dark at 25° C. for 4 weeks for seed germination and embryogenic callus induction.

[0615] After 4 weeks on the callus induction medium, the shoots and roots of the seedlings are trimmed away, the callus is transferred to fresh media, maintained in culture for another 4 weeks, and then transferred to MSO medium in light for 2 weeks. Several pieces of callus (11-17 weeks old) are either strained through a 10 mesh sieve and put onto callus induction medium, or cultured in 100 ml of liquid ryegrass callus induction media (same medium as for callus induction with agar) in a 250 ml flask. The flask is wrapped in foil and shaken at 175 rpm in the dark at 23° C. for 1 week. Sieving the liquid culture with a 40-mesh sieve collected the cells. The fraction collected on the sieve is plated and cultured on solid ryegrass callus induction medium for 1 week in the dark at 25° C. The callus is then transferred to and cultured on MS medium containing 1% sucrose for 2 weeks.

[0616] Transformation can be accomplished with either Agrobacterium of with particle bombardment methods. An expression vector is created containing a constitutive plant promoter and the cDNA of the gene in a pUC vector. The plasmid DNA is prepared from E. coli cells using with Qiagen kit according to manufacturer's instruction. Approximately 2 g of embryogenic callus is spread in the center of a sterile filter paper in a Petri dish. An aliquot of liquid MSO with 10 g/L sucrose is added to the filter paper. Gold particles (1.0 μm in size) are coated with plasmid DNA according to method of Sanford et al., 1993 and delivered to the embryogenic callus with the following parameters: 500 μg particles and 2 μg DNA per shot, 1300 psi and a target distance of 8.5 cm from stopping plate to plate of callus and 1 shot per plate of callus.

[0617] After the bombardment, calli are transferred back to the fresh callus development medium and maintained in the dark at room temperature for a 1-week period. The callus is then transferred to growth conditions in the light at 25° C. to initiate embryo differentiation with the appropriate selection agent, e.g. 250 nM Arsenal, 5 mg/L PPT or 50 mg/L kanamycin. Shoots resistant to the selection agent are appearing and once rotted are transferred to soil.

[0618] Samples of the primary transgenic plants (T0) are analyzed by PCR to confirm the presence of T-DNA. These results are confirmed by Southern hybridization in which DNA is electrophoresed on a 1% agarose gel and transferred to a positively charged nylon membrane (Roche Diagnostics). The PCR DIG Probe Synthesis Kit (Roche Diagnostics) is used to prepare a digoxigenin-labelled probe by PCR, and used as recommended by the manufacturer.

[0619] Transgenic T0 ryegrass plants can be propagated vegetatively by excising tillers. The transplanted tillers are maintained in the greenhouse for 2 months until well established. The shoots are defoliated and allowed to grow for 2 weeks.

[0620] T1 or T2 generation plants are produced and subjected to low temperature experiments, e.g. as described above in example 1. For the assessment of t yield increase, e.g. tolerance to low temperature, biomass production, intrinsic yield and/or dry matter production and/or seed yield is compared to plants lacking the transgene, e.g. corresponding non-transgenic wild type plants.

### Example 6

[0621] Engineering soybean plants with an increased yield, e.g. an increased yield-related trait, for example enhanced tolerance to abiotic environmental stress, for example an increased drought tolerance and/or low temperature tolerance and/or an increased nutrient use efficiency, and/or another mentioned yield-related trait e.g. enhanced stress tolerance, preferably tolerance to low temperature, and/or increased biomass production by over-expressing yield-increasing, e.g. the polypeptide according to the invention-coding, e.g. tolerance to low temperature related genes from Saccharomyces cerevisiae or Synechocystis or E. coli or Azotobacter vinelandii.

[0622] Soybean can be transformed according to the following modification of the method described in the Texas A&M patent U.S. Pat. No. 5,164,310. Several commercial soybean varieties are amenable to transformation by this method. The cultivar Jack (available from the Illinois Seed Foundation) is a commonly used for transformation. Seeds are sterilized by immersion in 70% (v/v) ethanol for 6 min and in 25% commercial bleach (NaOCl) supplemented with 0.1% (v/v) Tween for 20 min, followed by rinsing 4 times with sterile double distilled water. Seven-day seedlings are propagated by removing the radicle, hypocotyl and one cotyledon from each seedling. Then, the epicotyl with one cotyledon is transferred to fresh germination media in petri dishes and incubated at 25° C. under a 16-h photoperiod (approx. 100 μmol/m²s) for three weeks. Axillary nodes (approx. 4 mm in length) were cut from 3-4 week-old plants. Axillary nodes are excised and incubated in Agrobacterium LBA4404 culture.

[0623] Many different binary vector systems have been described for plant transformation (e.g. An G., in Agrobacterium Protocols. Methods in Molecular Biology Vol. 44, p. 47-62, Gartland K. M. A. and Davey M. R. eds. Humana Press, Totowa, N.J.). Many are based on the vector pBIN19 described by Bevan (Nucleic Acid Research. 12, 8711 (1984)) that includes a plant gene expression cassette flanked by the left and right border sequences from the Ti plasmid of Agrobacterium tumefaciens. A plant gene expression cassette consists of at least two genes—a selection marker gene and a plant promoter regulating the transcription of the cDNA or genomic DNA of the trait gene. Various selection marker genes can be used including the Arabidopsis gene encoding a mutated acetohydroxy acid synthase (AHAS) enzyme (U.S. Pat. Nos. 5,7673,666 and 6,225,105). Similarly, various promoters can be used to regulate the trait gene to provide constitutive, developmental, tissue or environmental regulation of gene transcription. In this example, the 34S promoter (GenBank Accession numbers M59930 and X16673) can be used to provide constitutive expression of the trait gene.

[0624] After the co-cultivation treatment, the explants are washed and transferred to selection media supplemented with 500 mg/L timentin. Shoots are excised and placed on a shoot elongation medium. Shoots longer than 1 cm are placed on rooting medium for two to four weeks prior to transplanting to soil.

[0625] The primary transgenic plants (TO) are analyzed by PCR to confirm the presence of T-DNA. These results are confirmed by Southern hybridization in which DNA is electrophoresed on a 1% agarose gel and transferred to a positively charged nylon membrane (Roche Diagnostics). The PCR DIG Probe Synthesis Kit (Roche Diagnostics) is used to prepare a digoxigenin-labelled probe by PCR, and used as recommended by the manufacturer.

[0626] T1 or T2 generation plants are produced and subjected to low temperature experiments, e.g. as described above in example 1. For the assessment of yield increase, e.g. tolerance to low temperature, biomass production, intrinsic yield and/or dry matter production and/or seed yield is compared to plants lacking the transgene, e.g. corresponding non-transgenic wild type plants.

### Example 7

[0627] Engineering Rapeseed/Canola plants with an increased yield, e.g. an increased yield-related trait, for example enhanced tolerance to abiotic environmental stress, for example an increased drought tolerance and/or low temperature tolerance and/or an increased nutrient use efficiency, and/or another mentioned yield-related trait, e.g. enhanced stress tolerance, preferably tolerance to low temperature, and/or increased biomass production by overexpressing yield-increasing, e.g. the polypeptide according to the invention-coding, e.g. tolerance to low temperature related genes from Saccharomyces cerevisiae or Synechocystis or E. coli or Azotobacter vinelandii.

[0628] Cotyledonary petioles and hypocotyls of 5-6 day-old young seedlings can be used as explants for tissue culture and transformed according to Babic et al. (Plant Cell Rep 17, 183 (1998)). The commercial cultivar Westar (Agriculture Canada) is the standard variety used for transformation, but other varieties can be used.

[0629] Agrobacterium tumefaciens LBA4404 containing a binary vector can be used for canola transformation. Many different binary vector systems have been described for plant transformation (e.g. An G., in Agrobacterium Protocols. Methods in Molecular Biology Vol. 44, p. 47-62, Gartland K. M. A. and Davey M. R. eds. Humana Press, Totowa, N.J.). Many are based on the vector pBIN19 described by Bevan (Nucleic Acid Research. 12, 8711 (1984)) that includes a plant gene expression cassette flanked by the left and right border sequences from the Ti plasmid of Agrobacterium tumefaciens. A plant gene expression cassette consists of at least two genes—a selection marker gene and a plant promoter regulating the transcription of the cDNA or genomic DNA of the trait gene. Various selection marker genes can be used including the Arabidopsis gene encoding a mutated acetohydroxy acid synthase (AHAS) enzyme (U.S. Pat. Nos. 5,7673,666 and 6,225,105). Similarly, various promoters can be used to regulate the trait gene to provide constitutive, developmental, tissue or environmental regulation of gene transcription. In this example, the 34S promoter (GenBank Accession numbers M59930 and X16673) can be used to provide constitutive expression of the trait gene.

[0630] Canola seeds are surface-sterilized in 70% ethanol for 2 min., and then in 30% Clorox with a drop of Tween-20 for 10 min, followed by three rinses with sterilized distilled water. Seeds are then germinated in vitro 5 days on half strength MS medium without hormones, 1% sucrose, 0.7% Phytagar at 23° C., 16 h light. The cotyledon petiole explants with the cotyledon attached are excised from the in vitro seedlings, and inoculated with Agrobacterium by dipping the cut end of the petiole explant into the bacterial suspension. The explants are then cultured for 2 days on MSBAP-3 medium containing 3 mg/L BAP, 3% sucrose, 0.7% Phytagar at 23° C., 16 h light. After two days of co-cultivation with Agrobacterium, the petiole explants are transferred to MSBAP-3 medium containing 3 mg/L BAP, cefotaxime, carbenicillin, or timentin (300 mg/L) for 7 days, and then cultured on MSBAP-3 medium with cefotaxime, carbenicillin, or timentin and selection agent until shoot regeneration. When the shoots were 5-10 mm in length, they are cut and transferred to shoot elongation medium (MSBAP-0.5, containing 0.5 mg/L BAP). Shoots of about 2 cm in length are transferred to the rooting medium (MSO) for root induction

[0631] Samples of the primary transgenic plants (TO) are analyzed by PCR to confirm the presence of T-DNA. These results are confirmed by Southern hybridization in which DNA is electrophoresed on a 1% agarose gel and transferred to a positively charged nylon membrane (Roche Diagnostics). The PCR DIG Probe Synthesis Kit (Roche Diagnostics) is used to prepare a digoxigenin-labelled probe by PCR, and used as recommended by the manufacturer. T1 or T2 generation plants are produced and subjected to low temperature experiments, e.g. as described above in example 1. For the assessment of yield increase, e.g. tolerance to low temperature, biomass production, intrinsic yield and/or dry matter production and/or seed yield is compared to plants lacking the transgene, e.g. corresponding non-transgenic wild type plants.

### Example 8

[0632] Engineering corn plants with an increased yield, e.g. an increased yield-related trait, for example enhanced tolerance to abiotic environmental stress, for example an increased drought tolerance and/or low temperature tolerance and/or an increased nutrient use efficiency, and/or another mentioned yield-related trait, e.g. enhanced stress tolerance, preferably tolerance to low temperature, and/or increased biomass production by over-expressing yield-increasing, e.g. the polypeptide according to the invention-coding, e.g. low temperature resistance and/or tolerance related genes from Saccharomyces cerevisiae or Synechocystis or E. coli or Azotobacter vinelandii.

[0633] Transformation of maize (Zea Mays L.) can be performed with a modification of the method described by Ishida et al. (Nature Biotech 14745 (1996)). Transformation is genotype-dependent in corn and only specific genotypes are amenable to transformation and regeneration. The inbred line A188 (University of Minnesota) or hybrids with A188 as a parent are good sources of donor material for transformation (Fromm et al. Biotech 8, 833 (1990)), but other genotypes can be used successfully as well. Ears are harvested from corn plants at approximately 11 days after pollination (DAP) when the length of immature embryos is about 1 to 1.2 mm. Immature embryos are co-cultivated with Agrobacterium tumefaciens that carry “super binary” vectors and transgenic plants are recovered through organogenesis. The super binary vector system of Japan Tobacco is described in WO patents WO 94/00977 and WO 95/06722. Vectors were constructed as described. Various selection marker genes can be used including the maize gene encoding a mutated acetohydroxy acid synthase (AHAS) enzyme (U.S. Pat. No. 6,025,541). Similarly, various promoters can be used to regulate the trait gene to provide constitutive, developmental, tissue or environmental regulation of gene transcription. In this example, the 34S promoter (GenBank Accession numbers M59930 and X16673) was used to provide constitutive expression of the trait gene.

[0634] Excised embryos are grown on callus induction medium, then maize regeneration medium, containing imidazolinone as a selection agent. The Petri plates are incubated in the light at 25° C. for 2-3 weeks, or until shoots develop. The green shoots are transferred from each embryo to maize rooting medium and incubated at 25° C. for 2-3 weeks, until roots develop. The rooted shoots are transplanted to soil in the greenhouse. T1 seeds are produced from plants that exhibit tolerance to the imidazolinone herbicides and which are PCR positive for the transgenes.

[0635] The T1 transgenic plants are then evaluated for their enhanced stress tolerance, like tolerance to low temperature, and/or increased biomass production according to the method described in Example 1. The T1 generation of single locus insertions of the T-DNA will segregate for the transgene in a 3:1 ratio. Those progeny containing one or two copies of the trans-gene are tolerant regarding the imidazolinone herbicide, and exhibit an increased yield, e.g. an increased yield-related trait, for example an enhancement of stress tolerance, like tolerance to low temperature, and/or increased biomass production than those progeny lacking the transgenes.

[0636] T1 or T2 generation plants are produced and subjected to low temperature experiments, e.g. as described above in example 2. For the assessment of yield increase, e.g. tolerance to low temperature, biomass production, intrinsic yield and/or dry matter production and/or seed yield is compared to e.g. corresponding non-transgenic wild type plants.

[0637] Homozygous T2 plants exhibited similar phenotypes. Hybrid plants (F1 progeny) of homozygous transgenic plants and non-transgenic plants also exhibited increased yield, e.g. an increased yield-related trait, for example enhanced tolerance to abiotic environmental stress, for example an increased drought tolerance and/or an increased nutrient use efficiency, and/or another mentioned yield-related trait, e.g. enhanced tolerance to low temperature.

### Example 9

[0638] Engineering wheat plants with an increased yield, e.g. an increased yield-related trait, for example enhanced tolerance to abiotic environmental stress, for example an increased drought tolerance and/or low temperature tolerance and/or an increased nutrient use efficiency, and/or another mentioned yield-related trait, e.g. enhanced stress tolerance, preferably tolerance to low temperature, and/or increased biomass production by over-expressing yield-increasing, e.g. the polypeptide according to the invention-coding, e.g. low temperature resistance and/or tolerance related genes from Saccharomyces cerevisiae or Synechocystis or E. coli or Azotobacter vinelandii.

[0639] Transformation of wheat can be performed with the method described by Ishida et al. (Nature Biotech. 14745 (1996)). The cultivar Bobwhite (available from CYMMIT, Mexico) is commonly used in transformation. Immature embryos are co-cultivated with Agrobacterium tumefaciens that carry “super binary” vectors, and transgenic plants are recovered through or ganogenesis. The super binary vector system of Japan Tobacco is described in WO patents WO 94/00977 and WO 95/06722. Vectors were constructed as described. Various selection marker genes can be used including the maize gene encoding a mutated acetohydroxy acid synthase (AHAS) enzyme (U.S. Pat. No. 6,025,541). Similarly, various promoters can be used to regulate the trait gene to provide constitutive, developmental, tissue or environmental regulation of gene transcription. In this example, the 34S promoter (GenBank Accession numbers M59930 and X16673) was used to provide constitutive expression of the trait gene.

[0640] After incubation with Agrobacterium, the embryos are grown on callus induction medium, then regeneration medium, containing imidazolinone as a selection agent. The Petri plates are incubated in the light at 25° C. for 2-3 weeks, or until shoots develop. The green shoots are transferred from each embryo to rooting medium and incubated at 25° C. for 2-3 weeks, until roots develop. The rooted shoots are transplanted to soil in the greenhouse. T1 seeds are produced from plants that exhibit tolerance to the imidazolinone herbicides and which are PCR positive for the transgenes.

[0641] The T1 transgenic plants are then evaluated for their enhanced tolerance to low temperature and/or increased biomass production according to the method described in example 2. The T1 generation of single locus insertions of the T-DNA will segregate for the transgene in a 3:1 ratio. Those progeny containing one or two copies of the transgene are tolerant regarding the imidazolinone herbicide, and exhibit an increased yield, e.g. an increased yield-related trait, for example an enhanced tolerance to low temperature and/or increased biomass production compared to the progeny lacking the transgenes. Homozygous T2 plants exhibit similar phenotypes.

[0642] For the assessment of yield increase, e.g. tolerance to low temperature, biomass production, intrinsic yield and/or dry matter production and/or seed yield can be compared to e.g. corresponding non-transgenic wild type plants. For example, plants with an increased yield, e.g. an increased yield-related trait, e.g. higher tolerance to stress, e.g. with an increased nutrient use efficiency or an increased intrinsic yield, and e.g. with higher tolerance to low temperature may show increased biomass production and/or dry matter production and/or seed yield under low temperature when compared to plants lacking the transgene, e.g. to corresponding non-transgenic wild type plants.

### Example 10

### Identification of Identical and Heterologous Genes

[0643] Gene sequences can be used to identify identical or heterologous genes from cDNA or genomic libraries. Identical genes (e.g. full-length cDNA clones) can be isolated via nucleic acid hybridization using for example cDNA libraries. Depending on the abundance of the gene of interest, 100,000 up to 1,000,000 recombinant bacteriophages are plated and transferred to nylon membranes. After denaturation with alkali, DNA is immobilized on the membrane by e.g. UV cross linking. Hybridization is carried out at high stringency conditions. In aqueous solution, hybridization and washing is performed at an ionic strength of 1 M NaCl and a temperature of 68° C. Hybridization probes are generated by e.g. radioactive (32P) nick transcription labeling (High Prime, Roche, Mannheim, Germany). Signals are detected by autoradiography.

[0644] Partially identical or heterologous genes that are related but not identical can be identified in a manner analogous to the above-described procedure using low stringency hybridization and washing conditions. For aqueous hybridization, the ionic strength is normally kept at 1 M NaCl while the temperature is progressively lowered from 68 to 42° C.

[0645] Isolation of gene sequences with homology (or sequence identity/similarity) only in a distinct domain of (for example 10-20 amino acids) can be carried out by using synthetic radio labeled oligonucleotide probes. Radiolabeled oligonucleotides are prepared by phosphorylation of the 5-prime end of two complementary oligonucleotides with T4 polynucleotide kinase. The complementary oligonucleotides are annealed and ligated to form concatemers. The double stranded concatemers are than radiolabeled by, for example, nick transcription. Hybridization is normally performed at low stringency conditions using high oligonucleotide concentrations.

[0646] Oligonucleotide hybridization solution:

### 6×SSC

[0647] 0.01 M sodium phosphate

### 1 mM EDTA (pH 8)

### 0.5% SDS

[0648] 100 μg/ml denatured salmon sperm DNA
0.1% nonfat dried milk
During hybridization, temperature is lowered stepwise to 5-10° C. below the estimated oligonucleotide Tₘ or down to room temperature followed by washing steps and autoradiography. Washing is performed with low stringency such as 3 washing steps using 4×SSC. Further details are described by Sambrook J. et al., 1989, “Molecular Cloning: A Laboratory Manual,” Cold Spring Harbor Laboratory Press or Ausubel F. M. et al., 1994, “Current Protocols in Molecular Biology,” John Wiley & Sons.

### Example 11

### Identification of Identical Genes by Screening Expression Libraries with Antibodies

[0649] c-DNA clones can be used to produce recombinant polypeptide for example in E. coli (e.g. Qiagen QIAexpress pQE system). Recombinant polypeptides are then normally affinity purified via Ni-NTA affinity chromatography (Qiagen). Recombinant polypeptides are then used to produce specific antibodies for example by using standard techniques for rabbit immunization. Antibodies are affinity purified using a Ni-NTA column saturated with the recombinant anti-gen as described by Gu et al., BioTechniques 17, 257 (1994). The antibody can than be used to screen expression cDNA libraries to identify identical or heterologous genes via an immunological screening (Sambrook, J. et al., 1989, “Molecular Cloning: A Laboratory Manual,” Cold Spring Harbor Laboratory Press or Ausubel, F. M. et al., 1994, “Current Protocols in Molecular Biology”, John Wiley & Sons).

### Example 12

### In Vivo Mutagenesis

[0650] In vivo mutagenesis of microorganisms can be performed by passage of plasmid (or other vector) DNA through E. coli or other microorganisms (e.g. Bacillus spp. or yeasts such as S. cerevisiae) which are impaired in their capabilities to maintain the integrity of their genetic information. Typical mutator strains have mutations in the genes for the DNA repair system (e.g., mutHLS, mutD, mutT, etc.; for reference, see Rupp W. D., DNA repair mechanisms, in: E. coli and Salmonella, p. 2277-2294, ASM, 1996, Washington.) Such strains are well known to those skilled in the art. The use of such strains is illustrated, for example, in Greener A. and Callahan M., Strategies 7, 32 (1994). Transfer of mutated DNA molecules into plants is preferably done after selection and testing in microorganisms. Transgenic plants are generated according to various examples within the exemplification of this document.

### Example 13

[0651] Engineering Arabidopsis plants with increased yield, e.g. an increased yield-related trait, for example an enhanced stress tolerance, preferably tolerance to low temperature, and/or increased biomass production by over-expressing the polypeptide according to the invention-encoding genes for example from A. thaliana, Brassica napus, Glycine max, Zea mays or Oryza sativa using tissue-specific or stress-inducible promoters.

[0652] Transgenic Arabidopsis plants over-expressing genes encoding the polypeptide according to the invention, e.g. low temperature resistance and/or tolerance related protein encoding genes, from for example Brassica napus, Glycine max, Zea mays and Oryza sativa can be created as described in example 1 to express the polypeptide according to the invention-encoding transgenes under the control of a tissue-specific or stress-inducible promoter. T2 generation plants are produced and grown under stress or non-stress conditions, e.g. low temperature conditions. Plants with an increased yield, e.g. an increased yield-related trait, e.g. higher tolerance to stress, e.g. low temperature, or with an increased nutrient use efficiency or an increased intrinsic yield, show increased biomass production and/or dry matter production and/or seed yield under low temperature conditions when compared to plants lacking the transgene, e.g. to corresponding non-transgenic wild type plants.

### Example 14

[0653] Engineering alfalfa plants with increased yield, e.g. an increased yield-related trait, for example an enhanced stress tolerance, preferably tolerance to low temperature, and/or increased biomass production by over-expressing genes encoding the polypeptide according to the invention, e.g. low temperature resistance and/or tolerance related genes for example from A. thaliana, Brassica napus, Glycine max, Zea mays or Oryza sativa for example

[0654] A regenerating clone of alfalfa (Medicago sativa) can be transformed using the method of McKersie et al., (Plant Physiol. 119, 839 (1999)). Regeneration and transformation of alfalfa is genotype dependent and therefore a regenerating plant is required. Methods to obtain regenerating plants have been described. For example, these can be selected from the cultivar Rangelander (Agriculture Canada) or any other commercial alfalfa variety as described by Brown and Atanassov (Plant Cell Tissue Organ Culture 4, 111 (1985)). Alternatively, the RA3 variety (University of Wisconsin) has been selected for use in tissue culture (Walker et al., Am. J. Bot. 65, 54 (1978)).

[0655] Petiole explants are cocultivated with an overnight culture of Agrobacterium tumefaciens C58C1 pMP90 (McKersie et al., Plant Physiol 119, 839 (1999)) or LBA4404 containing a binary vector. Many different binary vector systems have been described for plant transformation (e.g. An G., in Agrobacterium Protocols. Methods in Molecular Biology Vol. 44, p. 47-62, Gartland K. M. A. and Davey M. R. eds. Humana Press, Totowa, N.J.). Many are based on the vector pBIN19 described by Bevan (Nucleic Acid Research. 12, 8711 (1984)) that includes a plant gene expression cassette flanked by the left and right border sequences from the Ti plasmid of Agrobacterium tumefaciens. A plant gene expression cassette consists of at least two genes—a selection marker gene and a plant promoter regulating the transcription of the cDNA or genomic DNA of the trait gene. Various selection marker genes can be used including the Arabidopsis gene encoding a mutated acetohydroxy acid synthase (AHAS) enzyme (U.S. Pat. Nos. 5,7673,666 and 6,225,105). Similarly, various promoters can be used to regulate the trait gene that provides constitutive, developmental, tissue or environmental regulation of gene transcription. In this example, the 34S promoter (GenBank Accession numbers M59930 and X16673) was used to provide constitutive expression of the trait gene.

[0656] The explants are cocultivated for 3 days in the dark on SH induction medium containing 288 mg/L Pro, 53 mg/L thioproline, 4.35 g/L K₂SO₄, and 100 μm acetosyringinone. The explants were washed in half-strength Murashige-Skoog medium (Murashige and Skoog, 1962) and plated on the same SH induction medium without acetosyringinone but with a suitable selection agent and suitable antibiotic to inhibit Agrobacterium growth. After several weeks, somatic embryos are transferred to BOi2Y development medium containing no growth regulators, no antibiotics, and 50 g/L sucrose. Somatic embryos are subsequently germinated on half-strength Murashige-Skoog medium. Rooted seedlings are transplanted into pots and grown in a greenhouse.

[0657] The T0 transgenic plants are propagated by node cuttings and rooted in Turface growth medium.T1 or T2 generation plants are produced and subjected to experiments comprising stress or non-stress conditions, e.g. low temperature conditions as described in previous examples.

[0658] For the assessment of yield increase, e.g. tolerance to low temperature, biomass production, intrinsic yield and/or dry matter production and/or seed yield is compared to e.g. corresponding non-transgenic wild type plants.

[0659] For example, plants with an increased yield, e.g. an increased yield-related trait, e.g. higher tolerance to stress, e.g. with an increased nutrient use efficiency or an increased intrinsic yield, and e.g. with higher tolerance to low temperature may show increased biomass production and/or dry matter production and/or seed yield under low temperature when compared to plants lacking the transgene, e.g. to corresponding non-transgenic wild type plants.

### Example 15

[0660] Engineering ryegrass plants with increased yield, e.g. an increased yield-related trait, for example an enhanced stress tolerance, preferably tolerance to low temperature, and/or increased biomass production by over-expressing genes encoding the polypeptide according to the invention, e.g. low temperature resistance and/or tolerance related genes for example from A. thaliana, Brassica napus, Glycine max, Zea mays or Oryza sativa

[0661] Seeds of several different ryegrass varieties may be used as explant sources for transformation, including the commercial variety Gunne available from Svalöf Weibull seed company or the variety Affinity. Seeds are surface-sterilized sequentially with 1% Tween-20 for 1 minute, 100% bleach for 60 minutes, 3 rinses of 5 minutes each with deionized and distilled H₂O, and then germinated for 3-4 days on moist, sterile filter paper in the dark. Seedlings are further sterilized for 1 minute with 1% Tween-20, 5 minutes with 75% bleach, and rinsed 3 times with double destilled H₂O, 5 min each.

[0662] Surface-sterilized seeds are placed on the callus induction medium containing Murashige and Skoog basal salts and vitamins, 20 g/L sucrose, 150 mg/L asparagine, 500 mg/L casein hydrolysate, 3 g/L Phytagel, 10 mg/L BAP, and 5 mg/L dicamba. Plates are incubated in the dark at 25° C. for 4 weeks for seed germination and embryogenic callus induction.

[0663] After 4 weeks on the callus induction medium, the shoots and roots of the seedlings are trimmed away, the callus is transferred to fresh media, maintained in culture for another 4 weeks, and then transferred to MSO medium in light for 2 weeks. Several pieces of callus (11-17 weeks old) are either strained through a 10 mesh sieve and put onto callus induction medium, or cultured in 100 ml of liquid ryegrass callus induction media (same medium as for callus induction with agar) in a 250 ml flask. The flask is wrapped in foil and shaken at 175 rpm in the dark at 23° C. for 1 week. Sieving the liquid culture with a 40-mesh sieve collect the cells. The fraction collected on the sieve is plated and cultured on solid ryegrass callus induction medium for 1 week in the dark at 25° C. The callus is then transferred to and cultured on MS medium containing 1% sucrose for 2 weeks.

[0664] Transformation can be accomplished with either Agrobacterium of with particle bombardment methods. An expression vector is created containing a constitutive plant promoter and the cDNA of the gene in a pUC vector. The plasmid DNA is prepared from E. coli cells using with Qiagen kit according to manufacturer's instruction. Approximately 2 g of embryogenic callus is spread in the center of a sterile filter paper in a Petri dish. An aliquot of liquid MSO with 10 g/l sucrose is added to the filter paper. Gold particles (1.0 μm in size) are coated with plasmid DNA according to method of Sanford et al., 1993 and delivered to the embryogenic callus with the following parameters: 500 μg particles and 2 μg DNA per shot, 1300 psi and a target distance of 8.5 cm from stopping plate to plate of callus and 1 shot per plate of callus.

[0665] After the bombardment, calli are transferred back to the fresh callus development medium and maintained in the dark at room temperature for a 1-week period. The callus is then transferred to growth conditions in the light at 25° C. to initiate embryo differentiation with the appropriate selection agent, e.g. 250 nM Arsenal, 5 mg/L PPT or 50 mg/L kanamycin. Shoots resistant to the selection agent appeared and once rooted are transferred to soil.

[0666] Samples of the primary transgenic plants (T0) are analyzed by PCR to confirm the presence of T-DNA. These results are confirmed by Southern hybridization in which DNA is electrophoresed on a 1% agarose gel and transferred to a positively charged nylon membrane (Roche Diagnostics). The PCR DIG Probe Synthesis Kit (Roche Diagnostics) is used to prepare a digoxigenin-labelled probe by PCR, and used as recommended by the manufacturer.

[0667] Transgenic T0 ryegrass plants are propagated vegetatively by excising tillers. The transplanted tillers are maintained in the greenhouse for 2 months until well established. T1 or T2 generation plants are produced and subjected to stress or non-stress conditions, e.g. low temperature experiments, e.g. as described above in example 1.

[0668] For the assessment of yield increase, e.g. tolerance to low temperature, biomass production, intrinsic yield and/or dry matter production and/or seed yield is compared to e.g. corresponding non-transgenic wild type plants. For example, plants with an increased yield, e.g. an increased yield-related trait, e.g. higher tolerance to stress, e.g. with an increased nutrient use efficiency or an increased intrinsic yield, and e.g. with higher tolerance to low temperature may show increased biomass production and/or dry matter production and/or seed yield under low temperature when compared to plants lacking the transgene, e.g. to corresponding non-transgenic wild type plants.

### Example 16

[0669] Engineering soybean plants with increased yield, e.g. an increased yield-related trait, for example an enhanced stress tolerance, preferably tolerance to low temperature, and/or increased biomass production by over-expressing genes encoding the polypeptide according to the invention, e.g. low temperature resistance and/or tolerance related genes, for example from A. thaliana, Brassica napus, Glycine max, Zea mays or Oryza sativa

[0670] Soybean can be transformed according to the following modification of the method described in the Texas A&M patent U.S. Pat. No. 5,164,310. Several commercial soybean varieties are amenable to transformation by this method. The cultivar Jack (available from the Illinois Seed Foundation) is a commonly used for transformation. Seeds are sterilized by immersion in 70% (v/v) ethanol for 6 min and in 25% commercial bleach (NaOCl) supplemented with 0.1% (v/v) Tween for 20 min, followed by rinsing 4 times with sterile double distilled water. Seven-day old seedlings are propagated by removing the radicle, hypocotyl and one cotyledon from each seedling. Then, the epicotyl with one cotyledon is transferred to fresh germination media in petri dishes and incubated at 25° C. under a 16 h photoperiod (approx. 100 μmol/ms) for three weeks. Axillary nodes (approx. 4 mm in length) are cut from 3-4 week-old plants. Axillary nodes are excised and incubated in Agrobacterium LBA4404 culture.

[0671] Many different binary vector systems have been described for plant transformation (e.g. An G., in Agrobacterium Protocols. Methods in Molecular Biology Vol 44, p. 47-62, Gartland K. M. A. and Davey M. R. eds. Humana Press, Totowa, N.J.). Many are based on the vector pBIN19 described by Bevan (Nucleic Acid Research. 12, 8711 (1984)) that includes a plant gene expression cassette flanked by the left and right border sequences from the Ti plasmid of Agrobacterium tumefaciens. A plant gene expression cassette consists of at least two genes—a selection marker gene and a plant promoter regulating the transcription of the cDNA or genomic DNA of the trait gene. Various selection marker genes can be used including the Arabidopsis gene encoding a mutated acetohydroxy acid synthase (AHAS) enzyme (U.S. Pat. Nos. 5,7673,666 and 6,225,105). Similarly, various promoters can be used to regulate the trait gene to provide constitutive, developmental, tissue or environmental regulation of gene transcription. In this example, the 34S promoter (GenBank Accession numbers M59930 and X16673) is used to provide constitutive expression of the trait gene.

[0672] After the co-cultivation treatment, the explants are washed and transferred to selection media supplemented with 500 mg/L timentin. Shoots are excised and placed on a shoot elongation medium. Shoots longer than 1 cm are placed on rooting medium for two to four weeks prior to transplanting to soil.

[0673] The primary transgenic plants (T0) are analyzed by PCR to confirm the presence of T-DNA. These results are confirmed by Southern hybridization in which DNA is electrophoresed on a 1% agarose gel and transferred to a positively charged nylon membrane (Roche Diagnostics). The PCR DIG Probe Synthesis Kit (Roche Diagnostics) is used to prepare a digoxigenin-labelled probe by PCR, and used as recommended by the manufacturer.

[0674] Soybean plants over-expressing genes encoding the polypeptide according to the invention, e.g. low temperature resistance and/or tolerance related genes from A. thaliana, Brassica napus, Glycine max, Zea mays or Oryza sativa, show increased yield, for example, have higher seed yields.

[0675] T1 or T2 generation plants are produced and subjected to stress and non-stress conditions, e.g. low temperature experiments, e.g. as described above in example 1.

[0676] For the assessment of yield increase, e.g. tolerance to low temperature, biomass production, intrinsic yield and/or dry matter production and/or seed yield is compared to e.g. corresponding non-transgenic wild type plants. For example, plants with an increased yield, e.g. an increased yield-related trait, e.g. higher tolerance to stress, e.g. with an increased nutrient use efficiency or an increased intrinsic yield, and e.g. with higher tolerance to low temperature may show increased biomass production and/or dry matter production and/or seed yield under low temperature when compared to plants lacking the transgene, e.g. to corresponding non-transgenic wild type plants.

### Example 17

[0677] Engineering rapeseed/canola plants with increased yield, e.g. an increased yield-related trait, for example an enhanced stress tolerance, preferably tolerance to low temperature, and/or increased biomass production by over-expressing genes encoding the polypeptide according to the invention, e.g. low temperature resistance and/or tolerance related genes for example from A. thaliana, Brassica napus, Glycine max, Zea mays or Oryza sativa

[0678] Cotyledonary petioles and hypocotyls of 5-6 day-old young seedlings can be used as explants for tissue culture and transformed according to Babic et al. (Plant Cell Rep 17, 183 (1998)). The commercial cultivar Westar (Agriculture Canada) is the standard variety used for transformation, but other varieties can be used.

[0679] Agrobacterium tumefaciens LBA4404 containing a binary vector can be used for canola transformation. Many different binary vector systems have been described for plant transformation (e.g. An G., in Agrobacterium Protocols. Methods in Molecular Biology Vol. 44, p. 47-62, Gartland K. M. A. and Davey M. R. eds. Humana Press, Totowa, N.J.). Many are based on the vector pBI N19 described by Bevan (Nucleic Acid Research. 12, 8711 (1984)) that includes a plant gene expression cassette flanked by the left and right border sequences from the Ti plasmid of Agrobacterium tumefaciens. A plant gene expression cassette consists of at least two genes—a selection marker gene and a plant promoter regulating the transcription of the cDNA or genomic DNA of the trait gene. Various selection marker genes can be used including the Arabidopsis gene encoding a mutated acetohydroxy acid synthase (AHAS) enzyme (U.S. Pat. Nos. 5,7673,666 and 6,225,105). Similarly, various promoters can be used to regulate the trait gene to provide constitutive, developmental, tissue or environmental regulation of gene transcription. In this example, the 34S promoter (GenBank Accession numbers M59930 and X16673) is used to provide constitutive expression of the trait gene.

[0680] Canola seeds are surface-sterilized in 70% ethanol for 2 min., and then in 30% Clorox with a drop of Tween-20 for 10 min, followed by three rinses with sterilized distilled water. Seeds are then germinated in vitro 5 days on half strength MS medium without hormones, 1% sucrose, 0.7% Phytagar at 23° C., 16 h light. The cotyledon petiole explants with the cotyledon attached are excised from the in vitro seedlings, and inoculated with Agrobacterium by dipping the cut end of the petiole explant into the bacterial suspension. The explants are then cultured for 2 days on MSBAP-3 medium containing 3 mg/L BAP, 3% sucrose, 0.7% Phytagar at 23° C., 16 h light. After two days of co-cultivation with Agrobacterium, the petiole explants are transferred to MSBAP-3 medium containing 3 mg/l BAP, cefotaxime, carbenicillin, or timentin (300 mg/L) for 7 days, and then cultured on MSBAP-3 medium with cefotaxime, carbenicillin, or timentin and selection agent until shoot regeneration. When the shoots are 5-10 mm in length, they are cut and transferred to shoot elongation medium (MSBAP-0.5, containing 0.5 mg/L BAP). Shoots of about 2 cm in length are transferred to the rooting medium (MSO) for root induction

[0681] Samples of the primary transgenic plants (TO) are analyzed by PCR to confirm the presence of T-DNA. These results are confirmed by Southern hybridization in which DNA is electrophoresed on a 1% agarose gel and transferred to a positively charged nylon membrane (Roche Diagnostics). The PCR DIG Probe Synthesis Kit (Roche Diagnostics) is used to prepare a digoxigenin-labelled probe by PCR, and used as recommended by the manufacturer.

[0682] The transgenic plants can then be evaluated for their increased yield, e.g. an increased yield-related trait, e.g. higher tolerance to stress, e.g. enhanced tolerance to low temperature and/or increased biomass production according to the method described in Example 2. It is found that transgenic rapeseed/canola over-expressing genes encoding the polypeptide according to the invention, e.g. low temperature resistance and/or tolerance related genes, from A. thaliana, Brassica napus, Glycine max, Zea mays or Oryza sativa show increased yield, for example show an increased yield, e.g. an increased yield-related trait, e.g. higher tolerance to stress, e.g. with enhanced tolerance to low temperature and/or increased biomass production compared to plants without the transgene, e.g. corresponding non-transgenic control plants.

### Example 18

[0683] Engineering corn plants with increased yield, e.g. an increased yield-related trait, for example an enhanced stress tolerance, preferably tolerance to low temperature, and/or increased biomass production by over-expressing genes encoding the polypeptide according to the invention, e.g. tolerance to low temperature related genes for example from A. thaliana, Brassica napus, Glycine max, Zea mays or Oryza sativa

[0684] Transformation of corn (Zea mays L.) can be performed with a modification of the method described by Ishida et al. (Nature Biotech 14745 (1996)). Transformation is genotype-dependent in corn and only specific genotypes are amenable to transformation and regeneration. The inbred line A188 (University of Minnesota) or hybrids with A188 as a parent are good sources of donor material for transformation (Fromm et al. Biotech 8, 833 (1990), but other genotypes can be used successfully as well. Ears are harvested from corn plants at approximately 11 days after pollination (DAP) when the length of immature embryos is about 1 to 1.2 mm. Immature embryos can be co-cultivated with Agrobacterium tumefaciens that carry “super binary” vectors and transgenic plants are recovered through organogenesis. The super binary vector system of Japan Tobacco is described in WO patents WO 94/00977 and WO 95/06722. Vectors are constructed as described. Various selection marker genes can be used including the corn gene encoding a mutated acetohydroxy acid synthase (AHAS) enzyme (U.S. Pat. No. 6,025,541). Similarly, various promoters can be used to regulate the trait gene to provide constitutive, developmental, tissue or environmental regulation of gene transcription. In this example, the 34S promoter (GenBank Accession numbers M59930 and X16673) is used to provide constitutive expression of the trait gene.

[0685] Excised embryos are grown on callus induction medium, then corn regeneration medium, containing imidazolinone as a selection agent. The Petri plates were incubated in the light at 25° C. for 2-3 weeks, or until shoots develop. The green shoots from each embryo are transferred to corn rooting medium and incubated at 25° C. for 2-3 weeks, until roots develop. The rooted shoots are transplanted to soil in the greenhouse. T1 seeds are produced from plants that exhibit tolerance to the imidazolinone herbicides and are PCR positive for the transgenes.

[0686] The T1 transgenic plants can then be evaluated for increased yield, e.g. an increased yield-related trait, e.g. higher tolerance to stress, e.g. with enhanced tolerance to low temperature and/or increased biomass production according to the methods described in Example 2. The T1 generation of single locus insertions of the T-DNA will segregate for the trans-gene in a 1:2:1 ratio. Those progeny containing one or two copies of the transgene (3/4 of the progeny) are tolerant regarding the imidazolinone herbicide, and exhibit an increased yield, e.g. an increased yield-related trait, e.g. higher tolerance to stress, e.g. with enhanced tolerance to low temperature and/or increased biomass production compared to those progeny lacking the transgenes. Tolerant plants have higher seed yields. Homozygous T2 plants exhibited similar phenotypes. Hybrid plants (F1 progeny) of homozygous transgenic plants and non-transgenic plants also exhibited an increased yield, e.g. an increased yield-related trait, e.g. higher tolerance to stress, e.g. with enhanced tolerance to low temperature and/or increased biomass production.

### Example 19

[0687] Engineering wheat plants with increased yield, e.g. an increased yield-related trait, for example an enhanced stress tolerance, preferably tolerance to low temperature, and/or increased biomass production by over-expressing genes encoding the polypeptide according to the invention, e.g. low temperature resistance and/or tolerance related genes, for example from A. thaliana, Brassica napus, Glycine max, Zea mays or Oryza sativa

[0688] Transformation of wheat can be performed with the method described by Ishida et al. (Nature Biotech. 14745 (1996)). The cultivar Bobwhite (available from CYMMIT, Mexico) is commonly used in transformation. Immature embryos are co-cultivated with Agrobacterium tumefaciens that carry “super binary” vectors, and transgenic plants are recovered through or ganogenesis. The super binary vector system of Japan Tobacco is described in WO patents WO 94/00977 and WO 95/06722. Vectors are constructed as described. Various selection marker genes can be used including the maize gene encoding a mutated acetohydroxy acid synthase (AHAS) enzyme (U.S. Pat. No. 6,025,541). Similarly, various promoters can be used to regulate the trait gene to provide constitutive, developmental, tissue or environmental regulation of gene transcription. In this example, the 34S promoter (GenBank Accession numbers M59930 and X16673) is used to provide constitutive expression of the trait gene.

[0689] After incubation with Agrobacterium, the embryos are grown on callus induction medium, then regeneration medium, containing imidazolinone as a selection agent. The Petri plates are incubated in the light at 25° C. for 2-3 weeks, or until shoots develop. The green shoots are transferred from each embryo to rooting medium and incubated at 25° C. for 2-3 weeks, until roots develop. The rooted shoots are transplanted to soil in the greenhouse. T1 seeds are produced from plants that exhibit tolerance to the imidazolinone herbicides and which are PCR positive for the transgenes.

[0690] The T1 transgenic plants can then be evaluated for their increased yield, e.g. an increased yield-related trait, e.g. higher tolerance to stress, e.g. with enhanced tolerance to low temperature and/or increased biomass production according to the method described in example 2. The T1 generation of single locus insertions of the T-DNA will segregate for the transgene in a 1:2:1 ratio. Those progeny containing one or two copies of the transgene (3/4 of the progeny) are tolerant regarding the imidazolinone herbicide, and exhibit an increased yield, e.g. an increased yield-related trait, e.g. higher tolerance to stress, e.g. with enhanced tolerance to low temperature and/or increased biomass production compared to those progeny lacking the transgenes.

[0691] For the assessment of yield increase, e.g. tolerance to low temperature, biomass production, intrinsic yield and/or dry matter production and/or seed yield can be compared to e.g. corresponding non-transgenic wild type plants. For example, plants with an increased yield, e.g. an increased yield-related trait, e.g. higher tolerance to stress, e.g. with an increased nutrient use efficiency or an increased intrinsic yield, and e.g. with higher tolerance to low temperature may show increased biomass production and/or dry matter production and/or seed yield under low temperature when compared plants lacking the transgene, e.g. to corresponding non-transgenic wild type plants.

### Example 20

[0692] Engineering rice plants with increased yield under condition of transient and repetitive abiotic stress by over-expressing stress related genes from Saccharomyces cerevisiae or E. coli or Synechocystis

### Rice Transformation

[0693] The Agrobacterium containing the expression vector of the invention can be used to transform Oryza sativa plants. Mature dry seeds of the rice japonica cultivar Nipponbare are dehusked. Sterilization is carried out by incubating for one minute in 70% ethanol, followed by 30 minutes in 0.2% HgCl₂, followed by a 6 times 15 minutes wash with sterile distilled water. The sterile seeds are then germinated on a medium containing 2,4-D (callus induction medium). After incubation in the dark for four weeks, embryogenic, scutellum-derived calli are excised and propagated on the same medium. After two weeks, the calli are multiplied or propagated by subculture on the same medium for another 2 weeks. Embryogenic callus pieces are subcultured on fresh medium 3 days before co-cultivation (to boost cell division activity).

[0694] Agrobacterium strain LBA4404 containing the expression vector of the invention can be used for co-cultivation. Agrobacterium is inoculated on AB medium with the appropriate anti-biotics and cultured for 3 days at 28° C. The bacteria are then collected and suspended in liquid co-cultivation medium to a density (OD₆₀₀) of about 1. The suspension is then transferred to a Petri dish and the calli immersed in the suspension for 15 minutes. The callus tissues are then blotted dry on a filter paper and transferred to solidified, co-cultivation medium and incubated for 3 days in the dark at 25° C. Co-cultivated calli are grown on 2,4-D-containing medium for 4 weeks in the dark at 28° C. in the presence of a selection agent. During this period, rapidly growing resistant callus islands developed. After transfer of this material to a regeneration medium and incubation in the light, the embryogenic potential is released and shoots developed in the next four to five weeks. Shoots are excised from the calli and incubated for 2 to 3 weeks on an auxin-containing medium from which they are transferred to soil. Hardened shoots are grown under high humidity and short days in a greenhouse.

[0695] Approximately 35 independent TO rice transformants are generated for one construct. The primary transformants are transferred from a tissue culture chamber to a greenhouse. After a quantitative PCR analysis to verify copy number of the T-DNA insert, only single copy transgenic plants that exhibit tolerance to the selection agent are kept for harvest of T1 seed. Seeds are then harvested three to five months after transplanting. The method yielded single locus transformants at a rate of over 50% (Aldemita and Hodges 1996, Chan et al. 1993, Hiei et al. 1994).

[0696] For the cycling drought assay repetitive stress is applied to plants without leading to desiccation. The water supply throughout the experiment is limited and plants are subjected to cycles of drought and re-watering. For measuring biomass production, plant fresh weight is determined one day after the final watering by cutting shoots and weighing them.

### Example 21

[0697] Engineering rice plants with increased yield under condition of transient and repetitive abiotic stress by over-expressing yield and stress related genes for example from A. thaliana, Brassica napus, Glycine max, Zea mays or Oryza sativa for example

[0698] Rice Transformation:

[0699] The Agrobacterium containing the expression vector of the invention can be used to transform Oryza sativa plants. Mature dry seeds of the rice japonica cultivar Nipponbare are dehusked. Sterilization is carried out by incubating for one minute in 70% ethanol, followed by 30 minutes in 0.2% HgCl2, followed by a 6 times 15 minutes wash with sterile distilled water. The sterile seeds are then germinated on a medium containing 2,4-D (callus induction medium). After incubation in the dark for four weeks, embryogenic, scutellum-derived calli are excised and propagated on the same medium. After two weeks, the calli are multiplied or propagated by subculture on the same medium for another 2 weeks. Embryogenic callus pieces are subcultured on fresh medium 3 days before co-cultivation (to boost cell division activity).

[0700] Agrobacterium strain LBA4404 containing the expression vector of the invention can be used for co-cultivation. Agrobacterium is inoculated on AB medium with the appropriate anti-biotics and cultured for 3 days at 28° C. The bacteria are then collected and suspended in liquid co-cultivation medium to a density (OD600) of about 1. The suspension is then transferred to a Petri dish and the calli immersed in the suspension for 15 minutes. The callus tissues are then blotted dry on a filter paper and transferred to solidified, co-cultivation medium and incubated for 3 days in the dark at 25° C. Co-cultivated calli are grown on 2,4-D-containing medium for 4 weeks in the dark at 28° C. in the presence of a selection agent. During this period, rapidly growing resistant callus islands developed. After transfer of this material to a regeneration medium and incubation in the light, the embryogenic potential is released and shoots developed in the next four to five weeks. Shoots are excised from the calli and incubated for 2 to 3 weeks on an auxin-containing medium from which they are transferred to soil. Hardened shoots are grown under high humidity and short days in a greenhouse.

[0701] Approximately 35 independent T0 rice transformants are generated for one construct. The primary transformants are transferred from a tissue culture chamber to a greenhouse. After a quantitative PCR analysis to verify copy number of the T-DNA insert, only single copy transgenic plants that exhibit tolerance to the selection agent are kept for harvest of T1 seed. Seeds are then harvested three to five months after transplanting. The method yielded single locus transformants at a rate of over 50% (Aldemita and Hodges 1996, Chan et al. 1993, Hiei et al. 1994).

[0702] For the cycling drought assay repetitive stress is applied to plants without leading to desiccation. The water supply throughout the experiment is limited and plants are subjected to cycles of drought and re-watering. For measuring biomass production, plant fresh weight is determined one day after the final watering by cutting shoots and weighing them. At an equivalent degree of drought stress, tolerant plants are able to resume normal growth whereas susceptible plants have died or suffer significant injury resulting in shorter leaves and less dry matter.

### FIGURES

[0703] FIG. 1. Vector VC-MME220-1qcz (SEQ ID NO: 15) used for cloning gene of interest for non-targeted expression.

[0704] FIG. 2. Vector VC-MME221-1qcz (SEQ ID NO: 18) used for cloning gene of interest for non-targeted expression.

[0705] FIG. 3. Vector VC-MME354-1 QCZ (SEQ ID NO: 13) used for cloning gene of interest for plastidic targeted expression.

[0706] FIG. 4. Vector VC-MME432-1qcz (SEQ ID NO: 16) used for cloning gene of interest for plastidic targeted expression.

[0707] FIG. 5. Vector VC-MME489-1 QCZ (SEQ ID NO: 21) used for cloning gene of interest for non-targeted expression and cloning of a targeting sequence.

[0708] FIG. 6. Vector pMTX0270p (SEQ ID NO: 9) used for cloning of a targeting sequence.

[0709] FIG. 7. Vector pMTX155 (SEQ ID NO: 12) used for used for cloning gene of interest for non-targeted expression.

[0710] FIG. 8: Vector pMTX447korr (SEQ ID NO: 19) used for plastidic targeted expression.

[0711] FIG. 9. Vector VC-MME301-1QCZ (SEQ ID NO: 6207) used for non-targeted expression in preferentially seeds.

[0712] FIG. 10. Vector VC-MME289-1qcz (SEQ ID NO: 6208) used for non targeted expression in preferentially seeds.

TABLE IA
Nucleic acid sequence ID numbers

| | 1. | 2. | 3. | 4. | 5. | 6. |
|---|---|---|---|---|---|---|
| Application | Hit | Project | Locus | Organism | Lead SEQ ID | Target |
| 1 | 1 | SYSBIOL_IY_prio_1 | At5g63680 | A. th. | 22 | plastidic |
| 1 | 2 | SYSBIOL_IY_prio_1 | AvinDRAFT_2380 | A. vinelandii | 1030 | cytoplasmic |
| 1 | 3 | SYSBIOL_IY_prio_1 | B1298 | E. coli. | 1783 | cytoplasmic |
| 1 | 4 | SYSBIOL_IY_prio_1 | B1430 | E. coli. | 1958 | cytoplasmic |
| 1 | 5 | SYSBIOL_IY_prio_1 | B2696 | E. coli. | 2021 | cytoplasmic |
| 1 | 6 | SYSBIOL_IY_prio_1 | B2882 | E. coli. | 2374 | cytoplasmic |
| 1 | 7 | SYSBIOL_IY_prio_1 | B3728 | E. coli. | 2675 | cytoplasmic |
| 1 | 8 | SYSBIOL_IY_prio_1 | YAR047C | S. cerevisiae | 3153 | plastidic |
| 1 | 9 | SYSBIOL_IY_prio_1 | YBL022C | S. cerevisiae | 3157 | cytoplasmic |
| 1 | 10 | SYSBIOL_IY_prio_1 | YBR109C | S. cerevisiae | 3268 | cytoplasmic |
| 1 | 11 | SYSBIOL_IY_prio_1 | YDR046C | S. cerevisiae | 3882 | cytoplasmic |
| 1 | 12 | SYSBIOL_IY_prio_1 | YEL036C | S. cerevisiae | 3948 | cytoplasmic |
| 1 | 13 | SYSBIOL_IY_prio_1 | YHR120W | S. cerevisiae | 3992 | cytoplasmic |
| 1 | 14 | SYSBIOL_IY_prio_1 | YMR212C | S. cerevisiae | 4292 | cytoplasmic |
| 1 | 15 | SYSBIOL_IY_prio_1 | YNL135C | S. cerevisiae | 4322 | cytoplasmic |
| 1 | 16 | SYSBIOL_IY_prio_1 | YPR185W | S. cerevisiae | 4778 | cytoplasmic |
| 1 | 17 | SYSBIOL_IY_prio_1 | At5g54070 | A. th. | 4804, or 4836 | cytoplasmic |
| 1 | 18 | SYSBIOL_IY_prio_1 | B0050 | E. coli | 4842 | cytoplasmic |
| 1 | 19 | SYSBIOL_IY_prio_1 | GM02LC38418 | G. max | 5241 | cytoplasmic |
| 1 | 20 | SYSBIOL_IY_prio_1 | YDL007W | S. cerevisiae | 5274 | cytoplasmic |
| 1 | 21 | SYSBIOL_IY_prio_1 | YBL022C_2 | S. cerevisiae | 5974 | cytoplasmic |
| 1 | 22 | SYSBIOL_IY_prio_1 | YDR046C_2 | S. cerevisiae | 6079 | cytoplasmic |
| 1 | 23 | SYSBIOL_IY_prio_1 | YEL036C_2 | S. cerevisiae | 6145 | cytoplasmic |
| 1 | 24 | SYSBIOL_IY_prio_1 | GM02LC38418_2 | G. max | 5941 | cytoplasmic |

| | 7. |
|---|---|
| Application | SEQ IDs of Nucleic Acid Homologs |
| 1 | 24, 26, 28, 30, 32, 34, 36, 38, 40, 42, 44, 46, 48, 50, 52, 54, 56, 58, 60, 62, |
| | 64, 66, 68, 70, 72, 74, 76, 78, 80, 82, 84, 86, 88, 90, 92, 94, 96, 98, 100, 102, |
| | 104, 106, 108, 110, 112, 114, 116, 118, 120, 122, 124, 126, 128, 130, 132, |
| | 134, 136, 138, 140, 142, 144, 146, 148, 150, 152, 154, 156, 158, 160, 162, |
| | 164, 166, 168, 170, 172, 174, 176, 178, 180, 182, 184, 186, 188, 190, 192, |
| | 194, 196, 198, 200, 202, 204, 206, 208, 210, 212, 214, 216, 218, 220, 222, |
| | 224, 226, 228, 230, 232, 234, 236, 238, 240, 242, 244, 246, 248, 250, 252, |
| | 254, 256, 258, 260, 262, 264, 266, 268, 270, 272, 274, 276, 278, 280, 282, |
| | 284, 286, 288, 290, 292, 294, 296, 298, 300, 302, 304, 306, 308, 310, 312, |
| | 314, 316, 318, 320, 322, 324, 326, 328, 330, 332, 334, 336, 338, 340, 342, |
| | 344, 346, 348, 350, 352, 354, 356, 358, 360, 362, 364, 366, 368, 370, 372, |
| | 374, 376, 378, 380, 382, 384, 386, 388, 390, 392, 394, 396, 398, 400, 402, |
| | 404, 406, 408, 410, 412, 414, 416, 418, 420, 422, 424, 426, 428, 430, 432, |
| | 434, 436, 438, 440, 442, 444, 446, 448, 450, 452, 454, 456, 458, 460, 462, |
| | 464, 466, 468, 470, 472, 474, 476, 478, 480, 482, 484, 486, 488, 490, 492, |
| | 494, 496, 498, 500, 502, 504, 506, 508, 510, 512, 514, 516, 518, 520, 522, |
| | 524, 526, 528, 530, 532, 534, 536, 538, 540, 542, 544, 546, 548, 550, 552, |
| | 554, 556, 558, 560, 562, 564, 566, 568, 570, 572, 574, 576, 578, 580, 582, |
| | 584, 586, 588, 590, 592, 594, 596, 598, 600, 602, 604, 606, 608, 610, 612, |
| | 614, 616, 618, 620, 622, 624, 626, 628, 630, 632, 634, 636, 638, 640, 642, |
| | 644, 646, 648, 650, 652, 654, 656, 658, 660, 662, 664, 666, 668, 670, 672, |
| | 674, 676, 678, 680, 682, 684, 686, 688, 690, 692, 694, 696, 698, 700, 702, |
| | 704, 706, 708, 710, 712, 714, 716, 718, 720, 722, 724, 726, 728, 730, 732, |
| | 734, 736, 738, 740, 742, 744, 746, 748, 750, 752, 754, 756, 758, 760, 762, |
| | 764, 766, 768, 770, 772, 774, 776, 778, 780, 782, 784, 786, 788, 790, 792, |
| | 794, 796, 798, 800, 802, 804, 806, 808, 810, 812, 814, 816, 818, 820, 822, |
| | 824, 826, 828, 830, 832, 834, 836, 838, 840, 842, 844, 846, 848, 850, 852, |
| | 854, 856, 858, 860, 862, 864, 866, 868, 870, 872, 874, 876, 878, 880, 882, |
| | 884, 886, 888, 890, 892, 894, 896, 898, 900, 902, 904, 906, 908, 910, 912, |
| | 914, 916, 918, 920, 922, 924, 926, 928, 930, 932, 934, 936, 938, 940 |
| 1 | 1032, 1034, 1036, 1038, 1040, 1042, 1044, 1046, 1048, 1050, 1052, 1054, |
| | 1056, 1058, 1060, 1062, 1064, 1066, 1068, 1070, 1072, 1074, 1076, 1078, |
| | 1080, 1082, 1084, 1086, 1088, 1090, 1092, 1094, 1096, 1098, 1100, 1102, |
| | 1104, 1106, 1108, 1110, 1112, 1114, 1116, 1118, 1120, 1122, 1124, 1126, |
| | 1128, 1130, 1132, 1134, 1136, 1138, 1140, 1142, 1144, 1146, 1148, 1150, |
| | 1152, 1154, 1156, 1158, 1160, 1162, 1164, 1166, 1168, 1170, 1172, 1174, |
| | 1176, 1178, 1180, 1182, 1184, 1186, 1188, 1190, 1192, 1194, 1196, 1198, |
| | 1200, 1202, 1204, 1206, 1208, 1210, 1212, 1214, 1216, 1218, 1220, 1222, |
| | 1224, 1226, 1228, 1230, 1232, 1234, 1236, 1238, 1240, 1242, 1244, 1246, |
| | 1248, 1250, 1252, 1254, 1256, 1258, 1260, 1262, 1264, 1266, 1268, 1270, |
| | 1272, 1274, 1276, 1278, 1280, 1282, 1284, 1286, 1288, 1290, 1292, 1294, |
| | 1296, 1298, 1300, 1302, 1304, 1306, 1308, 1310, 1312, 1314, 1316, 1318, |
| | 1320, 1322, 1324, 1326, 1328, 1330, 1332, 1334, 1336, 1338, 1340, 1342, |
| | 1344, 1346, 1348, 1350, 1352, 1354, 1356, 1358, 1360, 1362, 1364, 1366, |
| | 1368, 1370, 1372, 1374, 1376, 1378, 1380, 1382, 1384, 1386, 1388, 1390, |
| | 1392, 1394, 1396, 1398, 1400, 1402, 1404, 1406, 1408, 1410, 1412, 1414, |
| | 1416, 1418, 1420, 1422, 1424, 1426, 1428, 1430, 1432, 1434, 1436, 1438, |
| | 1440, 1442, 1444, 1446, 1448, 1450, 1452, 1454, 1456, 1458, 1460, 1462, |
| | 1464, 1466, 1468, 1470, 1472, 1474, 1476, 1478, 1480, 1482, 1484, 1486, |
| | 1488, 1490, 1492, 1494, 1496, 1498, 1500, 1502, 1504, 1506, 1508, 1510, |
| | 1512, 1514, 1516, 1518, 1520, 1522, 1524, 1526, 1528, 1530, 1532, 1534, |
| | 1536, 1538, 1540, 1542, 1544, 1546, 1548, 1550, 1552, 1554, 1556, 1558, |
| | 1560, 1562, 1564, 1566, 1568, 1570, 1572, 1574, 1576, 1578, 1580, 1582, |
| | 1584, 1586, 1588, 1590, 1592, 1594, 1596, 1598, 1600, 1602, 1604, 1606, |
| | 1608, 1610, 1612, 1614, 1616, 1618, 1620, 1622, 1624, 1626, 1628, 1630, |
| | 1632, 1634, 1636, 1638, 1640, 1642, 1644, 1646, 1648, 1650, 1652, 1654, |
| | 1656, 1658, 1660, 1662, 1664, 1666, 1668, 1670, 1672, 1674, 1676, 1678, |
| | 1680, 1682, 1684, 1686, 1688, 1690, 1692, 1694, 1696, 1698, 1700, 1702, |
| | 1704, 1706, 1708, 1710, 1712, 1714, 1716, 1718, 1720, 1722, 1724, 1726, |
| | 1728, 1730, 1732, 1734, 1736, 1738, 1740, 1742, 1744, 1746, 1748, 1750, |
| | 1752, 1754, 1756, 1758, 1760, 1762, 1764, 1766, 1768, 1770, 1772, 1774, |
| | 1776 |
| 1 | 1785, 1787, 1789, 1791, 1793, 1795, 1797, 1799, 1801, 1803, 1805, 1807, |
| | 1809, 1811, 1813, 1815, 1817, 1819, 1821, 1823, 1825, 1827, 1829, 1831, |
| | 1833, 1835, 1837, 1839, 1841, 1843, 1845, 1847, 1849, 1851, 1853, 1855, |
| | 1857, 1859, 1861, 1863, 1865, 1867, 1869, 1871, 1873, 1875, 1877, 1879, |
| | 1881, 1883, 1885, 1887, 1889, 1891, 1893, 1895, 1897, 1899, 1901, 1903, |
| | 1905, 1907, 1909, 1911, 1913, 1915, 1917, 1919, 1921, 1923, 1925, 1927, |
| | 1929, 1931, 1933, 1935, 1937, 1939, 1941, 1943, 1945, 1947, 1949 |
| 1 | 1960, 1962, 1964, 1966, 1968, 1970, 1972, 1974, 1976, 1978, 1980, 1982, |
| | 1984, 1986, 1988, 1990, 1992, 1994, 1996, 1998, 2000, 2002, 2004, 2006, |
| | 2008, 2010, 2012 |
| 1 | 2023, 2025, 2027, 2029, 2031, 2033, 2035, 2037, 2039, 2041, 2043, 2045, |
| | 2047, 2049, 2051, 2053, 2055, 2057, 2059, 2061, 2063, 2065, 2067, 2069, |
| | 2071, 2073, 2075, 2077, 2079, 2081, 2083, 2085, 2087, 2089, 2091, 2093, |
| | 2095, 2097, 2099, 2101, 2103, 2105, 2107, 2109, 2111, 2113, 2115, 2117, |
| | 2119, 2121, 2123, 2125, 2127, 2129, 2131, 2133, 2135, 2137, 2139, 2141, |
| | 2143, 2145, 2147, 2149, 2151, 2153, 2155, 2157, 2159, 2161, 2163, 2165, |
| | 2167, 2169, 2171, 2173, 2175, 2177, 2179, 2181, 2183, 2185, 2187, 2189, |
| | 2191, 2193, 2195, 2197, 2199, 2201, 2203, 2205, 2207, 2209, 2211, 2213, |
| | 2215, 2217, 2219, 2221, 2223, 2225, 2227, 2229, 2231, 2233, 2235, 2237, |
| | 2239, 2241, 2243, 2245, 2247, 2249, 2251, 2253, 2255, 2257, 2259, 2261, |
| | 2263, 2265, 2267, 2269, 2271, 2273, 2275, 2277, 2279, 2281, 2283, 2285, |
| | 2287, 2289, 2291, 2293, 2295, 2297, 2299, 2301, 2303, 2305, 2307, 2309, |
| | 2311, 2313, 2315, 2317, 2319, 2321, 2323, 2325, 2327, 2329, 2331, 2333, |
| | 2335, 2337, 2339, 2341, 2343, 2345, 2347, 2349, 2351, 2353, 2355, 2357, |
| | 2359, 2361, 2363, 2365, 2367 |
| 1 | 2376, 2378, 2380, 2382, 2384, 2386, 2388, 2390, 2392, 2394, 2396, 2398, |
| | 2400, 2402, 2404, 2406, 2408, 2410, 2412, 2414, 2416, 2418, 2420, 2422, |
| | 2424, 2426, 2428, 2430, 2432, 2434, 2436, 2438, 2440, 2442, 2444, 2446, |
| | 2448, 2450, 2452, 2454, 2456, 2458, 2460, 2462, 2464, 2466, 2468, 2470, |
| | 2472, 2474, 2476, 2478, 2480, 2482, 2484, 2486, 2488, 2490, 2492, 2494, |
| | 2496, 2498, 2500, 2502, 2504, 2506, 2508, 2510, 2512, 2514, 2516, 2518, |
| | 2520, 2522, 2524, 2526, 2528, 2530, 2532, 2534, 2536, 2538, 2540, 2542, |
| | 2544, 2546, 2548, 2550, 2552, 2554, 2556, 2558, 2560, 2562, 2564, 2566, |
| | 2568, 2570, 2572, 2574, 2576, 2578, 2580, 2582, 2584, 2586, 2588, 2590, |
| | 2592, 2594, 2596, 2598, 2600, 2602, 2604, 2606, 2608, 2610, 2612, 2614, |
| | 2616, 2618, 2620, 2622, 2624, 2626, 2628, 2630, 2632, 2634, 2636, 2638, |
| | 2640, 2642, 2644, 2646, 2648, 2650, 2652, 2654, 2656, 2658, 2660, 2662, |
| | 2664 |
| 1 | 2677, 2679, 2681, 2683, 2685, 2687, 2689, 2691, 2693, 2695, 2697, 2699, |
| | 2701, 2703, 2705, 2707, 2709, 2711, 2713, 2715, 2717, 2719, 2721, 2723, |
| | 2725, 2727, 2729, 2731, 2733, 2735, 2737, 2739, 2741, 2743, 2745, 2747, |
| | 2749, 2751, 2753, 2755, 2757, 2759, 2761, 2763, 2765, 2767, 2769, 2771, |
| | 2773, 2775, 2777, 2779, 2781, 2783, 2785, 2787, 2789, 2791, 2793, 2795, |
| | 2797, 2799, 2801, 2803, 2805, 2807, 2809, 2811, 2813, 2815, 2817, 2819, |
| | 2821, 2823, 2825, 2827, 2829, 2831, 2833, 2835, 2837, 2839, 2841, 2843, |
| | 2845, 2847, 2849, 2851, 2853, 2855, 2857, 2859, 2861, 2863, 2865, 2867, |
| | 2869, 2871, 2873, 2875, 2877, 2879, 2881, 2883, 2885, 2887, 2889, 2891, |
| | 2893, 2895, 2897, 2899, 2901, 2903, 2905, 2907, 2909, 2911, 2913, 2915, |
| | 2917, 2919, 2921, 2923, 2925, 2927, 2929, 2931, 2933, 2935, 2937, 2939, |
| | 2941, 2943, 2945, 2947, 2949, 2951, 2953, 2955, 2957, 2959, 2961, 2963, |
| | 2965, 2967, 2969, 2971, 2973, 2975, 2977, 2979, 2981, 2983, 2985, 2987, |
| | 2989, 2991, 2993, 2995, 2997, 2999, 3001, 3003, 3005, 3007, 3009, 3011, |
| | 3013, 3015, 3017, 3019, 3021, 3023, 3025, 3027, 3029, 3031, 3033, 3035, |
| | 3037, 3039, 3041, 3043, 3045, 3047, 3049, 3051, 3053, 3055, 3057, 3059, |
| | 3061, 3063, 3065, 3067, 3069, 3071, 3073, 3075, 3077, 3079, 3081, 3083, |
| | 3085, 3087, 3089, 3091, 3093, 3095, 3097, 3099, 3101, 3103, 3105, 3107, |
| | 3109, 3111, 3113, 3115, 3117, 3119, 3121, 3123, 3125, 3127, 3129, 3131, |
| | 3133, 3135, 3137, 3139, 3141, 3143 |
| 1 | — |
| 1 | 3159, 3161, 3163, 3165, 3167, 3169, 3171, 3173, 3175, 3177, 3179, 3181, |
| | 3183, 3185, 3187, 3189, 3191, 3193, 3195, 3197, 3199, 3201, 3203, 3205, |
| | 3207, 3209, 3211, 3213, 3215, 3217, 3219, 3221, 3223, 3225, 3227, 3229, |
| | 3231, 3233, 3235, 3237, 3239, 3241, 3243, 3245, 3247, 3249, 3251 |
| 1 | 3270, 3272, 3274, 3276, 3278, 3280, 3282, 3284, 3286, 3288, 3290, 3292, |
| | 3294, 3296, 3298, 3300, 3302, 3304, 3306, 3308, 3310, 3312, 3314, 3316, |
| | 3318, 3320, 3322, 3324, 3326, 3328, 3330, 3332, 3334, 3336, 3338, 3340, |
| | 3342, 3344, 3346, 3348, 3350, 3352, 3354, 3356, 3358, 3360, 3362, 3364, |
| | 3366, 3368, 3370, 3372, 3374, 3376, 3378, 3380, 3382, 3384, 3386, 3388, |
| | 3390, 3392, 3394, 3396, 3398, 3400, 3402, 3404, 3406, 3408, 3410, 3412, |
| | 3414, 3416, 3418, 3420, 3422, 3424, 3426, 3428, 3430, 3432, 3434, 3436, |
| | 3438, 3440, 3442, 3444, 3446, 3448, 3450, 3452, 3454, 3456, 3458, 3460, |
| | 3462, 3464, 3466, 3468, 3470, 3472, 3474, 3476, 3478, 3480, 3482, 3484, |
| | 3486, 3488, 3490, 3492, 3494, 3496, 3498, 3500, 3502, 3504, 3506, 3508, |
| | 3510, 3512, 3514, 3516, 3518, 3520, 3522, 3524, 3526, 3528, 3530, 3532, |
| | 3534, 3536, 3538, 3540, 3542, 3544, 3546, 3548, 3550, 3552, 3554, 3556, |
| | 3558, 3560, 3562, 3564, 3566, 3568, 3570, 3572, 3574, 3576, 3578, 3580, |
| | 3582, 3584, 3586, 3588, 3590, 3592, 3594, 3596, 3598, 3600, 3602, 3604, |
| | 3606, 3608, 3610, 3612, 3614, 3616, 3618, 3620, 3622, 3624, 3626, 3628, |
| | 3630, 3632, 3634, 3636, 3638, 3640, 3642, 3644, 3646, 3648, 3650, 3652, |
| | 3654, 3656, 3658, 3660, 3662, 3664, 3666, 3668, 3670, 3672, 3674, 3676, |
| | 3678, 3680, 3682, 3684, 3686, 3688, 3690, 3692, 3694, 3696, 3698, 3700, |
| | 3702, 3704, 3706, 3708, 3710, 3712, 3714, 3716, 3718, 3720, 3722, 3724, |
| | 3726, 3728, 3730, 3732, 3734, 3736, 3738, 3740, 3742, 3744, 3746, 3748, |
| | 3750, 3752, 3754, 3756, 3758, 3760, 3762, 3764, 3766, 3768, 3770, 3772, |
| | 3774, 3776, 3778, 3780, 3782 |
| 1 | 3884, 3886, 3888, 3890, 3892, 3894, 3896, 3898, 3900, 3902, 3904, 3906, |
| | 3908, 3910, 3912, 3914, 3916, 3918, 3920, 3922, 3924, 3926, 3928, 3930, |
| | 3932, 3934, 3936 |
| 1 | 3950, 3952, 3954, 3956, 3958, 3960, 3962, 3964, 3966, 3968, 3970, 3972, |
| | 3974, 3976, 3978, 3980, 3982 |
| 1 | 3994, 3996, 3998, 4000, 4002, 4004, 4006, 4008, 4010, 4012, 4014, 4016, |
| | 4018, 4020, 4022, 4024, 4026, 4028, 4030, 4032, 4034, 4036, 4038, 4040, |
| | 4042, 4044, 4046, 4048, 4050, 4052, 4054, 4056, 4058, 4060, 4062, 4064, |
| | 4066, 4068, 4070, 4072, 4074, 4076, 4078, 4080, 4082, 4084, 4086, 4088, |
| | 4090, 4092, 4094, 4096, 4098, 4100, 4102, 4104, 4106, 4108, 4110, 4112, |
| | 4114, 4116, 4118, 4120, 4122, 4124, 4126, 4128, 4130, 4132, 4134, 4136, |
| | 4138, 4140, 4142, 4144, 4146, 4148, 4150, 4152, 4154, 4156, 4158, 4160, |
| | 4162, 4164, 4166, 4168, 4170, 4172, 4174, 4176, 4178, 4180, 4182, 4184, |
| | 4186, 4188, 4190, 4192, 4194, 4196, 4198, 4200, 4202, 4204, 4206, 4208, |
| | 4210, 4212, 4214, 4216, 4218, 4220, 4222, 4224, 4226, 4228, 4230, 4232, |
| | 4234, 4236, 4238, 4240, 4242, 4244, 4246, 4248, 4250, 4252, 4254, 4256, |
| | 4258, 4260, 4262, 4264, 4266, 4268, 4270, 4272, 4274, 4276, 4278, 4280, |
| | 4282 |
| 1 | 4294, 4296, 4298, 4300, 4302 |
| 1 | 4324, 4326, 4328, 4330, 4332, 4334, 4336, 4338, 4340, 4342, 4344, 4346, |
| | 4348, 4350, 4352, 4354, 4356, 4358, 4360, 4362, 4364, 4366, 4368, 4370, |
| | 4372, 4374, 4376, 4378, 4380, 4382, 4384, 4386, 4388, 4390, 4392, 4394, |
| | 4396, 4398, 4400, 4402, 4404, 4406, 4408, 4410, 4412, 4414, 4416, 4418, |
| | 4420, 4422, 4424, 4426, 4428, 4430, 4432, 4434, 4436, 4438, 4440, 4442, |
| | 4444, 4446, 4448, 4450, 4452, 4454, 4456, 4458, 4460, 4462, 4464, 4466, |
| | 4468, 4470, 4472, 4474, 4476, 4478, 4480, 4482, 4484, 4486, 4488, 4490, |
| | 4492, 4494, 4496, 4498, 4500, 4502, 4504, 4506, 4508, 4510, 4512, 4514, |
| | 4516, 4518, 4520, 4522, 4524, 4526, 4528, 4530, 4532, 4534, 4536, 4538, |
| | 4540, 4542, 4544, 4546, 4548, 4550, 4552, 4554, 4556, 4558, 4560, 4562, |
| | 4564, 4566, 4568, 4570, 4572, 4574, 4576, 4578, 4580, 4582, 4584, 4586, |
| | 4588, 4590, 4592, 4594, 4596, 4598, 4600, 4602, 4604, 4606, 4608, 4610, |
| | 4612, 4614, 4616, 4618, 4620, 4622, 4624, 4626, 4628, 4630, 4632, 4634, |
| | 4636, 4638, 4640, 4642, 4644, 4646, 4648, 4650, 4652, 4654, 4656, 4658, |
| | 4660, 4662, 4664, 4666, 4668, 4670, 4672, 4674, 4676, 4678, 4680, 4682, |
| | 4684, 4686, 4688, 4690, 4692, 4694, 4696, 4698, 4700 |
| 1 | 4780, 4782, 4784, 4786, 4788, 4790 |
| 1 | 4806, 4808, 4810, 4812, 4814, 4816, 4818, 4820, 4822, 4824, 4826, 4828 |
| 1 | 4844, 4846, 4848, 4850, 4852, 4854, 4856, 4858, 4860, 4862, 4864, 4866, |
| | 4868, 4870, 4872, 4874, 4876, 4878, 4880, 4882, 4884, 4886, 4888, 4890, |
| | 4892, 4894, 4896, 4898, 4900, 4902, 4904, 4906, 4908, 4910, 4912, 4914, |
| | 4916, 4918, 4920, 4922, 4924, 4926, 4928, 4930, 4932, 4934, 4936, 4938, |
| | 4940, 4942, 4944, 4946, 4948, 4950, 4952, 4954, 4956, 4958, 4960, 4962, |
| | 4964, 4966, 4968, 4970, 4972, 4974, 4976, 4978, 4980, 4982, 4984, 4986, |
| | 4988, 4990, 4992, 4994, 4996, 4998, 5000, 5002, 5004, 5006, 5008, 5010, |
| | 5012, 5014, 5016, 5018, 5020, 5022, 5024, 5026, 5028, 5030, 5032, 5034, |
| | 5036, 5038, 5040, 5042, 5044, 5046, 5048, 5050, 5052, 5054, 5056, 5058, |
| | 5060, 5062, 5064, 5066, 5068, 5070, 5072, 5074, 5076, 5078, 5080, 5082, |
| | 5084, 5086, 5088, 5090, 5092, 5094, 5096, 5098, 5100, 5102, 5104, 5106, |
| | 5108, 5110, 5112, 5114, 5116, 5118, 5120, 5122, 5124, 5126, 5128, 5130, |
| | 5132, 5134, 5136, 5138, 5140, 5142, 5144, 5146, 5148, 5150, 5152, 5154, |
| | 5156, 5158, 5160, 5162, 5164, 5166, 5168, 5170, 5172, 5174, 5176, 5178, |
| | 5180, 5182, 5184, 5186, 5188, 5190, 5192, 5194, 5196, 5198, 5200, 5202, |
| | 5204, 5206, 5208, 5210, 5212, 5214, 5216, 5218, 5220, 5222, 5224, 5226, |
| | 5228, 5230, 5232 |
| 1 | 5243, 5245, 5247, 5249, 5251, 5253, 5255, 5257, 5259 |
| 1 | 5276, 5278, 5280, 5282, 5284, 5286, 5288, 5290, 5292, 5294, 5296, 5298, |
| | 5300, 5302, 5304, 5306, 5308, 5310, 5312, 5314, 5316, 5318, 5320, 5322, |
| | 5324, 5326, 5328, 5330, 5332, 5334, 5336, 5338, 5340, 5342, 5344, 5346, |
| | 5348, 5350, 5352, 5354, 5356, 5358, 5360, 5362, 5364, 5366, 5368, 5370, |
| | 5372, 5374, 5376, 5378, 5380, 5382, 5384, 5386, 5388, 5390, 5392, 5394, |
| | 5396, 5398, 5400, 5402, 5404, 5406, 5408, 5410, 5412, 5414, 5416, 5418, |
| | 5420, 5422, 5424, 5426, 5428, 5430, 5432, 5434, 5436, 5438, 5440, 5442, |
| | 5444, 5446, 5448, 5450, 5452, 5454, 5456, 5458, 5460, 5462, 5464, 5466, |
| | 5468, 5470, 5472, 5474, 5476, 5478, 5480, 5482, 5484, 5486, 5488, 5490, |
| | 5492, 5494, 5496, 5498, 5500, 5502, 5504, 5506, 5508, 5510, 5512, 5514, |
| | 5516, 5518, 5520, 5522, 5524, 5526, 5528, 5530, 5532, 5534, 5536, 5538, |
| | 5540, 5542, 5544, 5546, 5548, 5550, 5552, 5554, 5556, 5558, 5560, 5562, |
| | 5564, 5566, 5568, 5570, 5572, 5574, 5576, 5578, 5580, 5582, 5584, 5586, |
| | 5588, 5590, 5592, 5594, 5596, 5598, 5600, 5602, 5604, 5606, 5608, 5610, |
| | 5612, 5614, 5616, 5618, 5620, 5622, 5624, 5626, 5628, 5630, 5632, 5634, |
| | 5636, 5638, 5640, 5642, 5644, 5646, 5648, 5650, 5652, 5654, 5656, 5658, |
| | 5660, 5662, 5664, 5666, 5668, 5670, 5672, 5674, 5676, 5678, 5680, 5682, |
| | 5684, 5686, 5688, 5690, 5692, 5694, 5696, 5698, 5700, 5702, 5704, 5706, |
| | 5708, 5710, 5712, 5714, 5716, 5718, 5720, 5722, 5724, 5726, 5728, 5730, |
| | 5732, 5734, 5736, 5738, 5740, 5742, 5744, 5746, 5748, 5750, 5752, 5754, |
| | 5756, 5758, 5760, 5762, 5764, 5766, 5768, 5770, 5772, 5774, 5776, 5778, |
| | 5780, 5782, 5784, 5786, 5788, 5790, 5792, 5794, 5796, 5798, 5800, 5802, |
| | 5804, 5806, 5808, 5810, 5812, 5814, 5816, 5818, 5820, 5822, 5824, 5826, |
| | 5828, 5830, 5832, 5834, 5836, 5838 |
| 1 | 5976, 5978, 5980, 5982, 5984, 5986, 5988, 5990, 5992, 5994, 5996, 5998, |
| | 6000, 6002, 6004, 6006, 6008, 6010, 6012, 6014, 6016, 6018, 6020, 6022, |
| | 6024, 6026, 6028, 6030, 6032, 6034, 6036, 6038, 6040, 6042, 6044, 6046, |
| | 6048, 6050, 6052, 6054, 6056, 6058, 6060, 6062 |
| 1 | 6081, 6083, 6085, 6087, 6089, 6091, 6093, 6095, 6097, 6099, 6101, 6103, |
| | 6105, 6107, 6109, 6111, 6113, 6115, 6117, 6119, 6121, 6123, 6125, 6127, |
| | 6129, 6131, 6133 |
| 1 | 6147, 6149, 6151, 6153, 6155, 6157, 6159, 6161, 6163, 6165, 6167, 6169, |
| | 6171, 6173, 6175, 6177, 6179 |
| 1 | 5943, 5945, 5947, 5949, 5951, 5953, 5955, 5957, 5959 |

TABLE IB
Nucleic acid sequence ID numbers

| | | | | | 5. | | |
|---|---|---|---|---|---|---|---|
| Applica- | 1. | 2. | 3. | 4. | Lead | 6. | 7. |
| tion | Hit | Project | Locus | Organism | SEQ ID | Target | SEQ IDs of Nucleic Acid Homologs |
| 1 | 1 | SYSBIOL_IY_prio_1 | At5g63680 | A. th. | 22 | plastidic | 942, 944, 946, 948, 950, 952, 954, 956, 958, |
| | | | | | | | 960, 962, 964, 966, 968, 970, 972, 974, 976, |
| | | | | | | | 978, 980, 982, 984, 986, 988, 990, 992, 994, |
| | | | | | | | 996, 998, 1000, 1002, 1004, 1006, 1008, |
| | | | | | | | 1010, 1012, 1014, 1016, 1018, 1020 |
| 1 | 2 | SYSBIOL_IY_prio_1 | AvinDRAFT_2380 | A. vinelandii | 1030 | cytoplasmic | — |
| 1 | 3 | SYSBIOL_IY_prio_1 | B1298 | E. coli. | 1783 | cytoplasmic | — |
| 1 | 4 | SYSBIOL_IY_prio_1 | B1430 | E. coli. | 1958 | cytoplasmic | — |
| 1 | 5 | SYSBIOL_IY_prio_1 | B2696 | E. coli. | 2021 | cytoplasmic | — |
| 1 | 6 | SYSBIOL_IY_prio_1 | B2882 | E. coli. | 2374 | cytoplasmic | — |
| 1 | 7 | SYSBIOL_IY_prio_1 | B3728 | E. coli. | 2675 | cytoplasmic | — |
| 1 | 8 | SYSBIOL_IY_prio_1 | YAR047C | S. cerevisiae | 3153 | plastidic | — |
| 1 | 9 | SYSBIOL_IY_prio_1 | YBL022C | S. cerevisiae | 3157 | cytoplasmic | — |
| 1 | 10 | SYSBIOL_IY_prio_1 | YBR109C | S. cerevisiae | 3268 | cytoplasmic | 3784, 3786, 3788, 3790, 3792, 3794, 3796, |
| | | | | | | | 3798, 3800, 3802, 3804, 3806, 3808, 3810, |
| | | | | | | | 3812, 3814, 3816, 3818, 3820, 3822, 3824, |
| | | | | | | | 3826, 3828, 3830, 3832, 3834, 3836, 3838, |
| | | | | | | | 3840, 3842, 3844, 3846, 3848, 3850, 3852, |
| | | | | | | | 3854, 3856, 3858, 3860, 3862, 3864, 3866, |
| | | | | | | | 3868, 3870, 3872, 3874, 3876, 6191, 6193, |
| | | | | | | | 6195, 6197, 6199, 6201, 6203, 6205 |
| 1 | 11 | SYSBIOL_IY_prio_1 | YDR046C | S. cerevisiae | 3882 | cytoplasmic | — |
| 1 | 12 | SYSBIOL_IY_prio_1 | YEL036C | S. cerevisiae | 3948 | cytoplasmic | — |
| 1 | 13 | SYSBIOL_IY_prio_1 | YHR120W | S. cerevisiae. | 3992 | cytoplasmic | 4284 |
| 1 | 14 | SYSBIOL_IY_prio_1 | YMR212C | S. cerevisiae | 4292 | cytoplasmic | — |
| 1 | 15 | SYSBIOL_IY_prio_1 | YNL135C | S. cerevisiae | 4322 | cytoplasmic | 4702, 4704, 4706, 4708, 4710, 4712, 4714, |
| | | | | | | | 4716, 4718, 4720, 4722, 4724, 4726, 4728, |
| | | | | | | | 4730, 4732, 4734, 4736, 4738, 4740, 4742, |
| | | | | | | | 4744, 4746, 4748, 4750, 4752, 4754, 4756, |
| | | | | | | | 4758, 4760, 4762, 4764, 4766, 4768, 4770, |
| | | | | | | | 4772 |
| 1 | 16 | SYSBIOL_IY_prio_1 | YPR185W | S. cerevisiae | 4778 | cytoplasmic | — |
| 1 | 17 | SYSBIOL_IY_prio_1 | At5g54070 | A. th. | 4804, or | cytoplasmic | 4830, 4832, 4834, 4836 |
| | | | | | 4836 | | |
| 1 | 18 | SYSBIOL_IY_prio_1 | B0050 | E. coli | 4842 | cytoplasmic | 5234 |
| 1 | 19 | SYSBIOL_IY_prio_1 | GM02LC38418 | G. max | 5241 | cytoplasmic | 5261, 5263, 5265, 5267 |
| 1 | 20 | SYSBIOL_IY_prio_1 | YDL007W | S. cerevisiae | 5274 | cytoplasmic | 5840, 5842, 5844, 5846, 5848, 5850, 5852, |
| | | | | | | | 5854, 5856, 5858, 5860, 5862, 5864, 5866, |
| | | | | | | | 5868, 5870, 5872, 5874, 5876, 5878, 5880, |
| | | | | | | | 5882, 5884, 5886, 5888, 5890, 5892, 5894, |
| | | | | | | | 5896, 5898, 5900, 5902, 5904, 5906, 5908, |
| | | | | | | | 5910, 5912, 5914, 5916, 5918, 5920, 5922, |
| | | | | | | | 5924, 5926, 5928, 5930 |
| 1 | 21 | SYSBIOL_IY_prio_1 | YBL022C_2 | S. cerevisiae | 5974 | cytoplasmic | — |
| 1 | 22 | SYSBIOL_IY_prio_1 | YDR046C_2 | S. cerevisiae | 6079 | cytoplasmic | — |
| 1 | 23 | SYSBIOL_IY_prio_1 | YEL036C_2 | S. cerevisiae | 6145 | cytoplasmic | — |
| 1 | 24 | SYSBIOL_IY_prio_1 | GM02LC38418_2 | G. max | 5941 | cytoplasmic | 5961, 5963, 5965, 5967 |

TABLE IIA
Amino acid sequence ID numbers

| | | | | | 5. | |
|---|---|---|---|---|---|---|
| | 1. | 2. | 3. | 4. | Lead | 6. |
| Application | Hit | Project | Locus | Organism | SEQ ID | Target |
| 1 | 1 | SYSBIOL_IY_prio_1 | At5g63680 | A. th. | 23 | plastidic |
| 1 | 2 | SYSBIOL_IY_prio_1 | AvinDRAFT_2380 | A. vinelandii | 1031 | cytoplasmic |
| 1 | 3 | SYSBIOL_IY_prio_1 | B1298 | E. coli. | 1784 | cytoplasmic |
| 1 | 4 | SYSBIOL_IY_prio_1 | B1430 | E. coli. | 1959 | cytoplasmic |
| 1 | 5 | SYSBIOL_IY_prio_1 | B2696 | E. coli. | 2022 | cytoplasmic |
| 1 | 6 | SYSBIOL_IY_prio_1 | B2882 | E. coli. | 2375 | cytoplasmic |
| 1 | 7 | SYSBIOL_IY_prio_1 | B3728 | E. coli. | 2676 | cytoplasmic |
| 1 | 8 | SYSBIOL_IY_prio_1 | YAR047C | S. cerevisiae | 3154 | plastidic |
| 1 | 9 | SYSBIOL_IY_prio_1 | YBL022C | S. cerevisiae | 3158 | cytoplasmic |
| 1 | 10 | SYSBIOL_IY_prio_1 | YBR109C | S. cerevisiae | 3269 | cytoplasmic |
| 1 | 11 | SYSBIOL_IY_prio_1 | YDR046C | S. cerevisiae | 3883 | cytoplasmic |
| 1 | 12 | SYSBIOL_IY_prio_1 | YEL036C | S. cerevisiae | 3949 | cytoplasmic |
| 1 | 13 | SYSBIOL_IY_prio_1 | YHR120W | S. cerevisiae. | 3993 | cytoplasmic |
| 1 | 14 | SYSBIOL_IY_prio_1 | YMR212C | S. cerevisiae | 4293 | cytoplasmic |
| 1 | 15 | SYSBIOL_IY_prio_1 | YNL135C | S. cerevisiae | 4323 | cytoplasmic |
| 1 | 16 | SYSBIOL_IY_prio_1 | YPR185W | S. cerevisiae | 4779 | cytoplasmic |
| 1 | 17 | SYSBIOL_IY_prio_1 | At5g54070 | A. th. | 4805, | cytoplasmic |
| | | | | | 4837 | |
| 1 | 18 | SYSBIOL_IY_prio_1 | B0050 | E. coli | 4843 | cytoplasmic |
| 1 | 19 | SYSBIOL_IY_prio_1 | GM02LC38418 | G. max | 5242 | cytoplasmic |
| 1 | 20 | SYSBIOL_IY_prio_1 | YDL007W | S. cerevisiae | 5275 | cytoplasmic |
| 1 | 21 | SYSBIOL_IY_prio_1 | YBL022C_2 | S. cerevisiae | 5975 | cytoplasmic |
| 1 | 22 | SYSBIOL_IY_prio_1 | YDR046C_2 | S. cerevisiae | 6080 | cytoplasmic |
| 1 | 23 | SYSBIOL_IY_prio_1 | YEL036C_2 | S. cerevisiae | 6146 | cytoplasmic |
| 1 | 24 | SYSBIOL_IY_prio_1 | GM02LC38418_2 | G. max | 5942 | cytoplasmic |

| | 7. |
|---|---|
| Application | SEQ IDs of Polypeptide Homologs |
| 1 | 25, 27, 29, 31, 33, 35, 37, 39, 41, 43, 45, 47, 49, 51, 53, 55, 57, |
| | 59, 61, 63, 65, 67, 69, 71, 73, 75, 77, 79, 81, 83, 85, 87, 89, 91, |
| | 93, 95, 97, 99, 101, 103, 105, 107, 109, 111, 113, 115, 117, 119, |
| | 121, 123, 125, 127, 129, 131, 133, 135, 137, 139, 141, 143, 145, |
| | 147, 149, 151, 153, 155, 157, 159, 161, 163, 165, 167, 169, 171, |
| | 173, 175, 177, 179, 181, 183, 185, 187, 189, 191, 193, 195, 197, |
| | 199, 201, 203, 205, 207, 209, 211, 213, 215, 217, 219, 221, 223, |
| | 225, 227, 229, 231, 233, 235, 237, 239, 241, 243, 245, 247, 249, |
| | 251, 253, 255, 257, 259, 261, 263, 265, 267, 269, 271, 273, 275, |
| | 277, 279, 281, 283, 285, 287, 289, 291, 293, 295, 297, 299, 301, |
| | 303, 305, 307, 309, 311, 313, 315, 317, 319, 321, 323, 325, 327, |
| | 329, 331, 333, 335, 337, 339, 341, 343, 345, 347, 349, 351, 353, |
| | 355, 357, 359, 361, 363, 365, 367, 369, 371, 373, 375, 377, 379, |
| | 381, 383, 385, 387, 389, 391, 393, 395, 397, 399, 401, 403, 405, |
| | 407, 409, 411, 413, 415, 417, 419, 421, 423, 425, 427, 429, 431, |
| | 433, 435, 437, 439, 441, 443, 445, 447, 449, 451, 453, 455, 457, |
| | 459, 461, 463, 465, 467, 469, 471, 473, 475, 477, 479, 481, 483, |
| | 485, 487, 489, 491, 493, 495, 497, 499, 501, 503, 505, 507, 509, |
| | 511, 513, 515, 517, 519, 521, 523, 525, 527, 529, 531, 533, 535, |
| | 537, 539, 541, 543, 545, 547, 549, 551, 553, 555, 557, 559, 561, |
| | 563, 565, 567, 569, 571, 573, 575, 577, 579, 581, 583, 585, 587, |
| | 589, 591, 593, 595, 597, 599, 601, 603, 605, 607, 609, 611, 613, |
| | 615, 617, 619, 621, 623, 625, 627, 629, 631, 633, 635, 637, 639, |
| | 641, 643, 645, 647, 649, 651, 653, 655, 657, 659, 661, 663, 665, |
| | 667, 669, 671, 673, 675, 677, 679, 681, 683, 685, 687, 689, 691, |
| | 693, 695, 697, 699, 701, 703, 705, 707, 709, 711, 713, 715, 717, |
| | 719, 721, 723, 725, 727, 729, 731, 733, 735, 737, 739, 741, 743, |
| | 745, 747, 749, 751, 753, 755, 757, 759, 761, 763, 765, 767, 769, |
| | 771, 773, 775, 777, 779, 781, 783, 785, 787, 789, 791, 793, 795, |
| | 797, 799, 801, 803, 805, 807, 809, 811, 813, 815, 817, 819, 821, |
| | 823, 825, 827, 829, 831, 833, 835, 837, 839, 841, 843, 845, 847, |
| | 849, 851, 853, 855, 857, 859, 861, 863, 865, 867, 869, 871, 873, |
| | 875, 877, 879, 881, 883, 885, 887, 889, 891, 893, 895, 897, 899, |
| | 901, 903, 905, 907, 909, 911, 913, 915, 917, 919, 921, 923, 925, |
| | 927, 929, 931, 933, 935, 937, 939, 941 |
| 1 | 1033, 1035, 1037, 1039, 1041, 1043, 1045, 1047, 1049, 1051, |
| | 1053, 1055, 1057, 1059, 1061, 1063, 1065, 1067, 1069, 1071, |
| | 1073, 1075, 1077, 1079, 1081, 1083, 1085, 1087, 1089, 1091, |
| | 1093, 1095, 1097, 1099, 1101, 1103, 1105, 1107, 1109, 1111, |
| | 1113, 1115, 1117, 1119, 1121, 1123, 1125, 1127, 1129, 1131, |
| | 1133, 1135, 1137, 1139, 1141, 1143, 1145, 1147, 1149, 1151, |
| | 1153, 1155, 1157, 1159, 1161, 1163, 1165, 1167, 1169, 1171, |
| | 1173, 1175, 1177, 1179, 1181, 1183, 1185, 1187, 1189, 1191, |
| | 1193, 1195, 1197, 1199, 1201, 1203, 1205, 1207, 1209, 1211, |
| | 1213, 1215, 1217, 1219, 1221, 1223, 1225, 1227, 1229, 1231, |
| | 1233, 1235, 1237, 1239, 1241, 1243, 1245, 1247, 1249, 1251, |
| | 1253, 1255, 1257, 1259, 1261, 1263, 1265, 1267, 1269, 1271, |
| | 1273, 1275, 1277, 1279, 1281, 1283, 1285, 1287, 1289, 1291, |
| | 1293, 1295, 1297, 1299, 1301, 1303, 1305, 1307, 1309, 1311, |
| | 1313, 1315, 1317, 1319, 1321, 1323, 1325, 1327, 1329, 1331, |
| | 1333, 1335, 1337, 1339, 1341, 1343, 1345, 1347, 1349, 1351, |
| | 1353, 1355, 1357, 1359, 1361, 1363, 1365, 1367, 1369, 1371, |
| | 1373, 1375, 1377, 1379, 1381, 1383, 1385, 1387, 1389, 1391, |
| | 1393, 1395, 1397, 1399, 1401, 1403, 1405, 1407, 1409, 1411, |
| | 1413, 1415, 1417, 1419, 1421, 1423, 1425, 1427, 1429, 1431, |
| | 1433, 1435, 1437, 1439, 1441, 1443, 1445, 1447, 1449, 1451, |
| | 1453, 1455, 1457, 1459, 1461, 1463, 1465, 1467, 1469, 1471, |
| | 1473, 1475, 1477, 1479, 1481, 1483, 1485, 1487, 1489, 1491, |
| | 1493, 1495, 1497, 1499, 1501, 1503, 1505, 1507, 1509, 1511, |
| | 1513, 1515, 1517, 1519, 1521, 1523, 1525, 1527, 1529, 1531, |
| | 1533, 1535, 1537, 1539, 1541, 1543, 1545, 1547, 1549, 1551, |
| | 1553, 1555, 1557, 1559, 1561, 1563, 1565, 1567, 1569, 1571, |
| | 1573, 1575, 1577, 1579, 1581, 1583, 1585, 1587, 1589, 1591, |
| | 1593, 1595, 1597, 1599, 1601, 1603, 1605, 1607, 1609, 1611, |
| | 1613, 1615, 1617, 1619, 1621, 1623, 1625, 1627, 1629, 1631, |
| | 1633, 1635, 1637, 1639, 1641, 1643, 1645, 1647, 1649, 1651, |
| | 1653, 1655, 1657, 1659, 1661, 1663, 1665, 1667, 1669, 1671, |
| | 1673, 1675, 1677, 1679, 1681, 1683, 1685, 1687, 1689, 1691, |
| | 1693, 1695, 1697, 1699, 1701, 1703, 1705, 1707, 1709, 1711, |
| | 1713, 1715, 1717, 1719, 1721, 1723, 1725, 1727, 1729, 1731, |
| | 1733, 1735, 1737, 1739, 1741, 1743, 1745, 1747, 1749, 1751, |
| | 1753, 1755, 1757, 1759, 1761, 1763, 1765, 1767, 1769, 1771, |
| | 1773, 1775, 1777 |
| 1 | 1786, 1788, 1790, 1792, 1794, 1796, 1798, 1800, 1802, 1804, |
| | 1806, 1808, 1810, 1812, 1814, 1816, 1818, 1820, 1822, 1824, |
| | 1826, 1828, 1830, 1832, 1834, 1836, 1838, 1840, 1842, 1844, |
| | 1846, 1848, 1850, 1852, 1854, 1856, 1858, 1860, 1862, 1864, |
| | 1866, 1868, 1870, 1872, 1874, 1876, 1878, 1880, 1882, 1884, |
| | 1886, 1888, 1890, 1892, 1894, 1896, 1898, 1900, 1902, 1904, |
| | 1906, 1908, 1910, 1912, 1914, 1916, 1918, 1920, 1922, 1924, |
| | 1926, 1928, 1930, 1932, 1934, 1936, 1938, 1940, 1942, 1944, |
| | 1946, 1948, 1950 |
| 1 | 1961, 1963, 1965, 1967, 1969, 1971, 1973, 1975, 1977, 1979, |
| | 1981, 1983, 1985, 1987, 1989, 1991, 1993, 1995, 1997, 1999, |
| | 2001, 2003, 2005, 2007, 2009, 2011, 2013 |
| 1 | 2024, 2026, 2028, 2030, 2032, 2034, 2036, 2038, 2040, 2042, |
| | 2044, 2046, 2048, 2050, 2052, 2054, 2056, 2058, 2060, 2062, |
| | 2064, 2066, 2068, 2070, 2072, 2074, 2076, 2078, 2080, 2082, |
| | 2084, 2086, 2088, 2090, 2092, 2094, 2096, 2098, 2100, 2102, |
| | 2104, 2106, 2108, 2110, 2112, 2114, 2116, 2118, 2120, 2122, |
| | 2124, 2126, 2128, 2130, 2132, 2134, 2136, 2138, 2140, 2142, |
| | 2144, 2146, 2148, 2150, 2152, 2154, 2156, 2158, 2160, 2162, |
| | 2164, 2166, 2168, 2170, 2172, 2174, 2176, 2178, 2180, 2182, |
| | 2184, 2186, 2188, 2190, 2192, 2194, 2196, 2198, 2200, 2202, |
| | 2204, 2206, 2208, 2210, 2212, 2214, 2216, 2218, 2220, 2222, |
| | 2224, 2226, 2228, 2230, 2232, 2234, 2236, 2238, 2240, 2242, |
| | 2244, 2246, 2248, 2250, 2252, 2254, 2256, 2258, 2260, 2262, |
| | 2264, 2266, 2268, 2270, 2272, 2274, 2276, 2278, 2280, 2282, |
| | 2284, 2286, 2288, 2290, 2292, 2294, 2296, 2298, 2300, 2302, |
| | 2304, 2306, 2308, 2310, 2312, 2314, 2316, 2318, 2320, 2322, |
| | 2324, 2326, 2328, 2330, 2332, 2334, 2336, 2338, 2340, 2342, |
| | 2344, 2346, 2348, 2350, 2352, 2354, 2356, 2358, 2360, 2362, |
| | 2364, 2366, 2368 |
| 1 | 2377, 2379, 2381, 2383, 2385, 2387, 2389, 2391, 2393, 2395, |
| | 2397, 2399, 2401, 2403, 2405, 2407, 2409, 2411, 2413, 2415, |
| | 2417, 2419, 2421, 2423, 2425, 2427, 2429, 2431, 2433, 2435, |
| | 2437, 2439, 2441, 2443, 2445, 2447, 2449, 2451, 2453, 2455, |
| | 2457, 2459, 2461, 2463, 2465, 2467, 2469, 2471, 2473, 2475, |
| | 2477, 2479, 2481, 2483, 2485, 2487, 2489, 2491, 2493, 2495, |
| | 2497, 2499, 2501, 2503, 2505, 2507, 2509, 2511, 2513, 2515, |
| | 2517, 2519, 2521, 2523, 2525, 2527, 2529, 2531, 2533, 2535, |
| | 2537, 2539, 2541, 2543, 2545, 2547, 2549, 2551, 2553, 2555, |
| | 2557, 2559, 2561, 2563, 2565, 2567, 2569, 2571, 2573, 2575, |
| | 2577, 2579, 2581, 2583, 2585, 2587, 2589, 2591, 2593, 2595, |
| | 2597, 2599, 2601, 2603, 2605, 2607, 2609, 2611, 2613, 2615, |
| | 2617, 2619, 2621, 2623, 2625, 2627, 2629, 2631, 2633, 2635, |
| | 2637, 2639, 2641, 2643, 2645, 2647, 2649, 2651, 2653, 2655, |
| | 2657, 2659, 2661, 2663, 2665 |
| 1 | 2678, 2680, 2682, 2684, 2686, 2688, 2690, 2692, 2694, 2696, |
| | 2698, 2700, 2702, 2704, 2706, 2708, 2710, 2712, 2714, 2716, |
| | 2718, 2720, 2722, 2724, 2726, 2728, 2730, 2732, 2734, 2736, |
| | 2738, 2740, 2742, 2744, 2746, 2748, 2750, 2752, 2754, 2756, |
| | 2758, 2760, 2762, 2764, 2766, 2768, 2770, 2772, 2774, 2776, |
| | 2778, 2780, 2782, 2784, 2786, 2788, 2790, 2792, 2794, 2796, |
| | 2798, 2800, 2802, 2804, 2806, 2808, 2810, 2812, 2814, 2816, |
| | 2818, 2820, 2822, 2824, 2826, 2828, 2830, 2832, 2834, 2836, |
| | 2838, 2840, 2842, 2844, 2846, 2848, 2850, 2852, 2854, 2856, |
| | 2858, 2860, 2862, 2864, 2866, 2868, 2870, 2872, 2874, 2876, |
| | 2878, 2880, 2882, 2884, 2886, 2888, 2890, 2892, 2894, 2896, |
| | 2898, 2900, 2902, 2904, 2906, 2908, 2910, 2912, 2914, 2916, |
| | 2918, 2920, 2922, 2924, 2926, 2928, 2930, 2932, 2934, 2936, |
| | 2938, 2940, 2942, 2944, 2946, 2948, 2950, 2952, 2954, 2956, |
| | 2958, 2960, 2962, 2964, 2966, 2968, 2970, 2972, 2974, 2976, |
| | 2978, 2980, 2982, 2984, 2986, 2988, 2990, 2992, 2994, 2996, |
| | 2998, 3000, 3002, 3004, 3006, 3008, 3010, 3012, 3014, 3016, |
| | 3018, 3020, 3022, 3024, 3026, 3028, 3030, 3032, 3034, 3036, |
| | 3038, 3040, 3042, 3044, 3046, 3048, 3050, 3052, 3054, 3056, |
| | 3058, 3060, 3062, 3064, 3066, 3068, 3070, 3072, 3074, 3076, |
| | 3078, 3080, 3082, 3084, 3086, 3088, 3090, 3092, 3094, 3096, |
| | 3098, 3100, 3102, 3104, 3106, 3108, 3110, 3112, 3114, 3116, |
| | 3118, 3120, 3122, 3124, 3126, 3128, 3130, 3132, 3134, 3136, |
| | 3138, 3140, 3142, 3144 |
| 1 | — |
| 1 | 3160, 3162, 3164, 3166, 3168, 3170, 3172, 3174, 3176, 3178, |
| | 3180, 3182, 3184, 3186, 3188, 3190, 3192, 3194, 3196, 3198, |
| | 3200, 3202, 3204, 3206, 3208, 3210, 3212, 3214, 3216, 3218, |
| | 3220, 3222, 3224, 3226, 3228, 3230, 3232, 3234, 3236, 3238, |
| | 3240, 3242, 3244, 3246, 3248, 3250, 3252 |
| 1 | 3271, 3273, 3275, 3277, 3279, 3281, 3283, 3285, 3287, 3289, |
| | 3291, 3293, 3295, 3297, 3299, 3301, 3303, 3305, 3307, 3309, |
| | 3311, 3313, 3315, 3317, 3319, 3321, 3323, 3325, 3327, 3329, |
| | 3331, 3333, 3335, 3337, 3339, 3341, 3343, 3345, 3347, 3349, |
| | 3351, 3353, 3355, 3357, 3359, 3361, 3363, 3365, 3367, 3369, |
| | 3371, 3373, 3375, 3377, 3379, 3381, 3383, 3385, 3387, 3389, |
| | 3391, 3393, 3395, 3397, 3399, 3401, 3403, 3405, 3407, 3409, |
| | 3411, 3413, 3415, 3417, 3419, 3421, 3423, 3425, 3427, 3429, |
| | 3431, 3433, 3435, 3437, 3439, 3441, 3443, 3445, 3447, 3449, |
| | 3451, 3453, 3455, 3457, 3459, 3461, 3463, 3465, 3467, 3469, |
| | 3471, 3473, 3475, 3477, 3479, 3481, 3483, 3485, 3487, 3489, |
| | 3491, 3493, 3495, 3497, 3499, 3501, 3503, 3505, 3507, 3509, |
| | 3511, 3513, 3515, 3517, 3519, 3521, 3523, 3525, 3527, 3529, |
| | 3531, 3533, 3535, 3537, 3539, 3541, 3543, 3545, 3547, 3549, |
| | 3551, 3553, 3555, 3557, 3559, 3561, 3563, 3565, 3567, 3569, |
| | 3571, 3573, 3575, 3577, 3579, 3581, 3583, 3585, 3587, 3589, |
| | 3591, 3593, 3595, 3597, 3599, 3601, 3603, 3605, 3607, 3609, |
| | 3611, 3613, 3615, 3617, 3619, 3621, 3623, 3625, 3627, 3629, |
| | 3631, 3633, 3635, 3637, 3639, 3641, 3643, 3645, 3647, 3649, |
| | 3651, 3653, 3655, 3657, 3659, 3661, 3663, 3665, 3667, 3669, |
| | 3671, 3673, 3675, 3677, 3679, 3681, 3683, 3685, 3687, 3689, |
| | 3691, 3693, 3695, 3697, 3699, 3701, 3703, 3705, 3707, 3709, |
| | 3711, 3713, 3715, 3717, 3719, 3721, 3723, 3725, 3727, 3729, |
| | 3731, 3733, 3735, 3737, 3739, 3741, 3743, 3745, 3747, 3749, |
| | 3751, 3753, 3755, 3757, 3759, 3761, 3763, 3765, 3767, 3769, |
| | 3771, 3773, 3775, 3777, 3779, 3781, 3783 |
| 1 | 3885, 3887, 3889, 3891, 3893, 3895, 3897, 3899, 3901, 3903, |
| | 3905, 3907, 3909, 3911, 3913, 3915, 3917, 3919, 3921, 3923, |
| | 3925, 3927, 3929, 3931, 3933, 3935, 3937 |
| 1 | 3951, 3953, 3955, 3957, 3959, 3961, 3963, 3965, 3967, 3969, |
| | 3971, 3973, 3975, 3977, 3979, 3981, 3983 |
| 1 | 3995, 3997, 3999, 4001, 4003, 4005, 4007, 4009, 4011, 4013, |
| | 4015, 4017, 4019, 4021, 4023, 4025, 4027, 4029, 4031, 4033, |
| | 4035, 4037, 4039, 4041, 4043, 4045, 4047, 4049, 4051, 4053, |
| | 4055, 4057, 4059, 4061, 4063, 4065, 4067, 4069, 4071, 4073, |
| | 4075, 4077, 4079, 4081, 4083, 4085, 4087, 4089, 4091, 4093, |
| | 4095, 4097, 4099, 4101, 4103, 4105, 4107, 4109, 4111, 4113, |
| | 4115, 4117, 4119, 4121, 4123, 4125, 4127, 4129, 4131, 4133, |
| | 4135, 4137, 4139, 4141, 4143, 4145, 4147, 4149, 4151, 4153, |
| | 4155, 4157, 4159, 4161, 4163, 4165, 4167, 4169, 4171, 4173, |
| | 4175, 4177, 4179, 4181, 4183, 4185, 4187, 4189, 4191, 4193, |
| | 4195, 4197, 4199, 4201, 4203, 4205, 4207, 4209, 4211, 4213, |
| | 4215, 4217, 4219, 4221, 4223, 4225, 4227, 4229, 4231, 4233, |
| | 4235, 4237, 4239, 4241, 4243, 4245, 4247, 4249, 4251, 4253, |
| | 4255, 4257, 4259, 4261, 4263, 4265, 4267, 4269, 4271, 4273, |
| | 4275, 4277, 4279, 4281, 4283 |
| 1 | 4295, 4297, 4299, 4301, 4303 |
| 1 | 4325, 4327, 4329, 4331, 4333, 4335, 4337, 4339, 4341, 4343, |
| | 4345, 4347, 4349, 4351, 4353, 4355, 4357, 4359, 4361, 4363, |
| | 4365, 4367, 4369, 4371, 4373, 4375, 4377, 4379, 4381, 4383, |
| | 4385, 4387, 4389, 4391, 4393, 4395, 4397, 4399, 4401, 4403, |
| | 4405, 4407, 4409, 4411, 4413, 4415, 4417, 4419, 4421, 4423, |
| | 4425, 4427, 4429, 4431, 4433, 4435, 4437, 4439, 4441, 4443, |
| | 4445, 4447, 4449, 4451, 4453, 4455, 4457, 4459, 4461, 4463, |
| | 4465, 4467, 4469, 4471, 4473, 4475, 4477, 4479, 4481, 4483, |
| | 4485, 4487, 4489, 4491, 4493, 4495, 4497, 4499, 4501, 4503, |
| | 4505, 4507, 4509, 4511, 4513, 4515, 4517, 4519, 4521, 4523, |
| | 4525, 4527, 4529, 4531, 4533, 4535, 4537, 4539, 4541, 4543, |
| | 4545, 4547, 4549, 4551, 4553, 4555, 4557, 4559, 4561, 4563, |
| | 4565, 4567, 4569, 4571, 4573, 4575, 4577, 4579, 4581, 4583, |
| | 4585, 4587, 4589, 4591, 4593, 4595, 4597, 4599, 4601, 4603, |
| | 4605, 4607, 4609, 4611, 4613, 4615, 4617, 4619, 4621, 4623, |
| | 4625, 4627, 4629, 4631, 4633, 4635, 4637, 4639, 4641, 4643, |
| | 4645, 4647, 4649, 4651, 4653, 4655, 4657, 4659, 4661, 4663, |
| | 4665, 4667, 4669, 4671, 4673, 4675, 4677, 4679, 4681, 4683, |
| | 4685, 4687, 4689, 4691, 4693, 4695, 4697, 4699, 4701 |
| 1 | 4781, 4783, 4785, 4787, 4789, 4791 |
| 1 | 4807, 4809, 4811, 4813, 4815, 4817, 4819, 4821, 4823, 4825, |
| | 4827, 4829 |
| 1 | 4845, 4847, 4849, 4851, 4853, 4855, 4857, 4859, 4861, 4863, |
| | 4865, 4867, 4869, 4871, 4873, 4875, 4877, 4879, 4881, 4883, |
| | 4885, 4887, 4889, 4891, 4893, 4895, 4897, 4899, 4901, 4903, |
| | 4905, 4907, 4909, 4911, 4913, 4915, 4917, 4919, 4921, 4923, |
| | 4925, 4927, 4929, 4931, 4933, 4935, 4937, 4939, 4941, 4943, |
| | 4945, 4947, 4949, 4951, 4953, 4955, 4957, 4959, 4961, 4963, |
| | 4965, 4967, 4969, 4971, 4973, 4975, 4977, 4979, 4981, 4983, |
| | 4985, 4987, 4989, 4991, 4993, 4995, 4997, 4999, 5001, 5003, |
| | 5005, 5007, 5009, 5011, 5013, 5015, 5017, 5019, 5021, 5023, |
| | 5025, 5027, 5029, 5031, 5033, 5035, 5037, 5039, 5041, 5043, |
| | 5045, 5047, 5049, 5051, 5053, 5055, 5057, 5059, 5061, 5063, |
| | 5065, 5067, 5069, 5071, 5073, 5075, 5077, 5079, 5081, 5083, |
| | 5085, 5087, 5089, 5091, 5093, 5095, 5097, 5099, 5101, 5103, |
| | 5105, 5107, 5109, 5111, 5113, 5115, 5117, 5119, 5121, 5123, |
| | 5125, 5127, 5129, 5131, 5133, 5135, 5137, 5139, 5141, 5143, |
| | 5145, 5147, 5149, 5151, 5153, 5155, 5157, 5159, 5161, 5163, |
| | 5165, 5167, 5169, 5171, 5173, 5175, 5177, 5179, 5181, 5183, |
| | 5185, 5187, 5189, 5191, 5193, 5195, 5197, 5199, 5201, 5203, |
| | 5205, 5207, 5209, 5211, 5213, 5215, 5217, 5219, 5221, 5223, |
| | 5225, 5227, 5229, 5231, 5233 |
| 1 | 5244, 5246, 5248, 5250, 5252, 5254, 5256, 5258, 5260 |
| 1 | 5277, 5279, 5281, 5283, 5285, 5287, 5289, 5291, 5293, 5295, |
| | 5297, 5299, 5301, 5303, 5305, 5307, 5309, 5311, 5313, 5315, |
| | 5317, 5319, 5321, 5323, 5325, 5327, 5329, 5331, 5333, 5335, |
| | 5337, 5339, 5341, 5343, 5345, 5347, 5349, 5351, 5353, 5355, |
| | 5357, 5359, 5361, 5363, 5365, 5367, 5369, 5371, 5373, 5375, |
| | 5377, 5379, 5381, 5383, 5385, 5387, 5389, 5391, 5393, 5395, |
| | 5397, 5399, 5401, 5403, 5405, 5407, 5409, 5411, 5413, 5415, |
| | 5417, 5419, 5421, 5423, 5425, 5427, 5429, 5431, 5433, 5435, |
| | 5437, 5439, 5441, 5443, 5445, 5447, 5449, 5451, 5453, 5455, |
| | 5457, 5459, 5461, 5463, 5465, 5467, 5469, 5471, 5473, 5475, |
| | 5477, 5479, 5481, 5483, 5485, 5487, 5489, 5491, 5493, 5495, |
| | 5497, 5499, 5501, 5503, 5505, 5507, 5509, 5511, 5513, 5515, |
| | 5517, 5519, 5521, 5523, 5525, 5527, 5529, 5531, 5533, 5535, |
| | 5537, 5539, 5541, 5543, 5545, 5547, 5549, 5551, 5553, 5555, |
| | 5557, 5559, 5561, 5563, 5565, 5567, 5569, 5571, 5573, 5575, |
| | 5577, 5579, 5581, 5583, 5585, 5587, 5589, 5591, 5593, 5595, |
| | 5597, 5599, 5601, 5603, 5605, 5607, 5609, 5611, 5613, 5615, |
| | 5617, 5619, 5621, 5623, 5625, 5627, 5629, 5631, 5633, 5635, |
| | 5637, 5639, 5641, 5643, 5645, 5647, 5649, 5651, 5653, 5655, |
| | 5657, 5659, 5661, 5663, 5665, 5667, 5669, 5671, 5673, 5675, |
| | 5677, 5679, 5681, 5683, 5685, 5687, 5689, 5691, 5693, 5695, |
| | 5697, 5699, 5701, 5703, 5705, 5707, 5709, 5711, 5713, 5715, |
| | 5717, 5719, 5721, 5723, 5725, 5727, 5729, 5731, 5733, 5735, |
| | 5737, 5739, 5741, 5743, 5745, 5747, 5749, 5751, 5753, 5755, |
| | 5757, 5759, 5761, 5763, 5765, 5767, 5769, 5771, 5773, 5775, |
| | 5777, 5779, 5781, 5783, 5785, 5787, 5789, 5791, 5793, 5795, |
| | 5797, 5799, 5801, 5803, 5805, 5807, 5809, 5811, 5813, 5815, |
| | 5817, 5819, 5821, 5823, 5825, 5827, 5829, 5831, 5833, 5835, |
| | 5837, 5839 |
| 1 | 5977, 5979, 5981, 5983, 5985, 5987, 5989, 5991, 5993, 5995, |
| | 5997, 5999, 6001, 6003, 6005, 6007, 6009, 6011, 6013, 6015, |
| | 6017, 6019, 6021, 6023, 6025, 6027, 6029, 6031, 6033, 6035, |
| | 6037, 6039, 6041, 6043, 6045, 6047, 6049, 6051, 6053, 6055, |
| | 6057, 6059, 6061, 6063 |
| 1 | 6082, 6084, 6086, 6088, 6090, 6092, 6094, 6096, 6098, 6100, |
| | 6102, 6104, 6106, 6108, 6110, 6112, 6114, 6116, 6118, 6120, |
| | 6122, 6124, 6126, 6128, 6130, 6132, 6134 |
| 1 | 6148, 6150, 6152, 6154, 6156, 6158, 6160, 6162, 6164, 6166, |
| | 6168, 6170, 6172, 6174, 6176, 6178, 6180 |
| 1 | 5944, 5946, 5948, 5950, 5952, 5954, 5956, 5958, 5960 |

TABLE IIB
Amino acid sequence ID numbers

| | | | | | 5. | | |
|---|---|---|---|---|---|---|---|
| Appli- | 1. | 2. | 3. | 4. | Lead | 6. | 7. |
| cation | Hit | Project | Locus | Organism | SEQ ID | Target | SEQ IDs of Polypeptide Homologs |
| 1 | 1 | SYSBIOL_IY_prio_1 | At5g63680 | A. th. | 23 | plastidic | 943, 945, 947, 949, 951, 953, 955, 957, 959, 961, |
| | | | | | | | 963, 965, 967, 969, 971, 973, 975, 977, 979, 981, |
| | | | | | | | 983, 985, 987, 989, 991, 993, 995, 997, 999, |
| | | | | | | | 1001, 1003, 1005, 1007, 1009, 1011, 1013, 1015, |
| | | | | | | | 1017, 1019, 1021 |
| 1 | 2 | SYSBIOL_IY_prio_1 | AvinDRAFT_2380 | A. vinelandii | 1031 | cytoplasmic | — |
| 1 | 3 | SYSBIOL_IY_prio_1 | B1298 | E. coli. | 1784 | cytoplasmic | — |
| 1 | 4 | SYSBIOL_IY_prio_1 | B1430 | E. coli. | 1959 | cytoplasmic | — |
| 1 | 5 | SYSBIOL_IY_prio_1 | B2696 | E. coli. | 2022 | cytoplasmic | — |
| 1 | 6 | SYSBIOL_IY_prio_1 | B2882 | E. coli. | 2375 | cytoplasmic | — |
| 1 | 7 | SYSBIOL_IY_prio_1 | B3728 | E. coli. | 2676 | cytoplasmic | — |
| 1 | 8 | SYSBIOL_IY_prio_1 | YAR047C | S. cerevisiae | 3154 | plastidic | — |
| 1 | 9 | SYSBIOL_IY_prio_1 | YBL022C | S. cerevisiae | 3158 | cytoplasmic | — |
| 1 | 10 | SYSBIOL_IY_prio_1 | YBR109C | S. cerevisiae | 3269 | cytoplasmic | 3785, 3787, 3789, 3791, 3793, 3795, 3797, 3799, |
| | | | | | | | 3801, 3803, 3805, 3807, 3809, 3811, 3813, 3815, |
| | | | | | | | 3817, 3819, 3821, 3823, 3825, 3827, 3829, 3831, |
| | | | | | | | 3833, 3835, 3837, 3839, 3841, 3843, 3845, 3847, |
| | | | | | | | 3849, 3851, 3853, 3855, 3857, 3859, 3861, 3863, |
| | | | | | | | 3865, 3867, 3869, 3871, 3873, 3875, 3877, 6192, |
| | | | | | | | 6194, 6196, 6198, 6200, 6202, 6204, 6206 |
| 1 | 11 | SYSBIOL_IY_prio_1 | YDR046C | S. cerevisiae | 3883 | cytoplasmic | — |
| 1 | 12 | SYSBIOL_IY_prio_1 | YEL036C | S. cerevisiae | 3949 | cytoplasmic | — |
| 1 | 13 | SYSBIOL_IY_prio_1 | YHR120W | S. | 3993 | cytoplasmic | 4285 |
| | | | | cerevisiae. | | | |
| 1 | 14 | SYSBIOL_IY_prio_1 | YMR212C | S. cerevisiae | 4293 | cytoplasmic | — |
| 1 | 15 | SYSBIOL_IY_prio_1 | YNL135C | S. cerevisiae | 4323 | cytoplasmic | 4703, 4705, 4707, 4709, 4711, 4713, 4715, 4717, |
| | | | | | | | 4719, 4721, 4723, 4725, 4727, 4729, 4731, 4733, |
| | | | | | | | 4735, 4737, 4739, 4741, 4743, 4745, 4747, 4749, |
| | | | | | | | 4751, 4753, 4755, 4757, 4759, 4761, 4763, 4765, |
| | | | | | | | 4767, 4769, 4771, 4773 |
| 1 | 16 | SYSBIOL_IY_prio_1 | YPR185W | S. cerevisiae | 4779 | cytoplasmic | — |
| 1 | 17 | SYSBIOL_IY_prio_1 | At5g54070 | A. th. | 4805, | cytoplasmic | 4831, 4833, 4835, 4837 |
| | | | | | 4837 | | |
| 1 | 18 | SYSBIOL_IY_prio_1 | B0050 | E. coli | 4843 | cytoplasmic | 5235 |
| 1 | 19 | SYSBIOL_IY_prio_1 | GM02LC38418 | G. max | 5242 | cytoplasmic | 5262, 5264, 5266, 5268 |
| 1 | 20 | SYSBIOL_IY_prio_1 | YDL007W | S. cerevisiae | 5275 | cytoplasmic | 5841, 5843, 5845, 5847, 5849, 5851, 5853, 5855, |
| | | | | | | | 5857, 5859, 5861, 5863, 5865, 5867, 5869, 5871, |
| | | | | | | | 5873, 5875, 5877, 5879, 5881, 5883, 5885, 5887, |
| | | | | | | | 5889, 5891, 5893, 5895, 5897, 5899, 5901, 5903, |
| | | | | | | | 5905, 5907, 5909, 5911, 5913, 5915, 5917, 5919, |
| | | | | | | | 5921, 5923, 5925, 5927, 5929, 5931 |
| 1 | 21 | SYSBIOL_IY_prio_1 | YBL022C_2 | S. cerevisiae | 5975 | cytoplasmic | — |
| 1 | 22 | SYSBIOL_IY_prio_1 | YDR046C_2 | S. cerevisiae | 6080 | cytoplasmic | — |
| 1 | 23 | SYSBIOL_IY_prio_1 | YEL036C_2 | S. cerevisiae | 6146 | cytoplasmic | — |
| 1 | 24 | SYSBIOL_IY_prio_1 | GM02LC38418_2 | G. max | 5942 | cytoplasmic | 5962, 5964, 5966, 5968 |

TABLE III
Primer nucleic acid sequence ID numbers

| | 1. | 2. | 3. | 4. | 5. | 6. | 7. |
|---|---|---|---|---|---|---|---|
| Application | Hit | Project | Locus | Organism | Lead SEQ ID | Target | SEQ IDs of Primers |
| 1 | 1 | SYSBIOL_IY_prio_1 | At5g63680 | A. th. | 22 | plastidic | 1022, 1023 |
| 1 | 2 | SYSBIOL_IY_prio_1 | AvinDRAFT_2380 | A. vinelandii | 1030 | cytoplasmic | 1778, 1779 |
| 1 | 3 | SYSBIOL_IY_prio_1 | B1298 | E. coli. | 1783 | cytoplasmic | 1951, 1952 |
| 1 | 4 | SYSBIOL_IY_prio_1 | B1430 | E. coli. | 1958 | cytoplasmic | 2014, 2015 |
| 1 | 5 | SYSBIOL_IY_prio_1 | B2696 | E. coli. | 2021 | cytoplasmic | 2369, 2370 |
| 1 | 6 | SYSBIOL_IY_prio_1 | B2882 | E. coli. | 2374 | cytoplasmic | 2666, 2667 |
| 1 | 7 | SYSBIOL_IY_prio_1 | B3728 | E. coli. | 2675 | cytoplasmic | 3145, 3146 |
| 1 | 8 | SYSBIOL_IY_prio_1 | YAR047C | S. cerevisiae | 3153 | plastidic | 3155, 3156 |
| 1 | 9 | SYSBIOL_IY_prio_1 | YBL022C | S. cerevisiae | 3157 | cytoplasmic | 3253, 3254 |
| 1 | 10 | SYSBIOL_IY_prio_1 | YBR109C | S. cerevisiae | 3268 | cytoplasmic | 3878, 3879 |
| 1 | 11 | SYSBIOL_IY_prio_1 | YDR046C | S. cerevisiae | 3882 | cytoplasmic | 3938, 3939 |
| 1 | 12 | SYSBIOL_IY_prio_1 | YEL036C | S. cerevisiae | 3948 | cytoplasmic | 3984, 3985 |
| 1 | 13 | SYSBIOL_IY_prio_1 | YHR120W | S. cerevisiae. | 3992 | cytoplasmic | 4286, 4287 |
| 1 | 14 | SYSBIOL_IY_prio_1 | YMR212C | S. cerevisiae | 4292 | cytoplasmic | 4304, 4305 |
| 1 | 15 | SYSBIOL_IY_prio_1 | YNL135C | S. cerevisiae | 4322 | cytoplasmic | 4774, 4775 |
| 1 | 16 | SYSBIOL_IY_prio_1 | YPR185W | S. cerevisiae | 4778 | cytoplasmic | 4792, 4793 |
| 1 | 17 | SYSBIOL_IY_prio_1 | At5g54070 | A. th. | 4804 or 4836 | cytoplasmic | 4838, 4839 |
| 1 | 18 | SYSBIOL_IY_prio_1 | B0050 | E. coli | 4842 | cytoplasmic | 5236, 5237 |
| 1 | 19 | SYSBIOL_IY_prio_1 | GM02LC38418 | G. max | 5241 | cytoplasmic | 5269, 5270 |
| 1 | 20 | SYSBIOL_IY_prio_1 | YDL007W | S. cerevisiae | 5274 | cytoplasmic | 5932, 5933 |
| 1 | 21 | SYSBIOL_IY_prio_1 | YBL022C_2 | S. cerevisiae | 5974 | cytoplasmic | 6064, 6065 |
| 1 | 22 | SYSBIOL_IY_prio_1 | YDR046C_2 | S. cerevisiae | 6079 | cytoplasmic | 6135, 6136 |
| 1 | 23 | SYSBIOL_IY_prio_1 | YEL036C_2 | S. cerevisiae | 6145 | cytoplasmic | 6181, 6182 |
| 1 | 24 | SYSBIOL_IY_prio_1 | GM02LC38418_2 | G. max | 5941 | cytoplasmic | 5969, 5970 |

TABLE IV
Consensus amino acid sequence ID numbers

| | | | | | 5. | | |
|---|---|---|---|---|---|---|---|
| Appli- | 1. | 2. | 3. | 4. | Lead | 6. | 7. |
| cation | Hit | Project | Locus | Organism | SEQ ID | Target | SEQ IDs of Consensus/Pattern Sequences |
| 1 | 1 | SYSBIOL_IY_prio_1 | At5g63680 | A. th. | 23 | plastidic | 1024, 1025, 1026, 1027, 1028, 1029 |
| 1 | 2 | SYSBIOL_IY_prio_1 | AvinDRAFT_2380 | A. vinelandii | 1031 | cytoplasmic | 1780, 1781, 1782 |
| 1 | 3 | SYSBIOL_IY_prio_1 | B1298 | E. coli. | 1784 | cytoplasmic | 1953, 1954, 1955, 1956, 1957 |
| 1 | 4 | SYSBIOL_IY_prio_1 | B1430 | E. coli. | 1959 | cytoplasmic | 2016, 2017, 2018, 2019, 2020 |
| 1 | 5 | SYSBIOL_IY_prio_1 | B2696 | E. coli. | 2022 | cytoplasmic | 2371, 2372, 2373 |
| 1 | 6 | SYSBIOL_IY_prio_1 | B2882 | E. coli. | 2375 | cytoplasmic | 2668, 2669, 2670, 2671, 2672, 2673, 2674 |
| 1 | 7 | SYSBIOL_IY_prio_1 | B3728 | E. coli. | 2676 | cytoplasmic | 3147, 3148, 3149, 3150, 3151, 3152 |
| 1 | 8 | SYSBIOL_IY_prio_1 | YAR047C | S. cerevisiae | 3154 | plastidic | — |
| 1 | 9 | SYSBIOL_IY_prio_1 | YBL022C | S. cerevisiae | 3158 | cytoplasmic | 3255, 3256, 3257, 3258, 3259, 3260, 3261, 3262, |
| | | | | | | | 3263, 3264, 3265, 3266, 3267 |
| 1 | 10 | SYSBIOL_IY_prio_1 | YBR109C | S. cerevisiae | 3269 | cytoplasmic | 3880, 3881 |
| 1 | 11 | SYSBIOL_IY_prio_1 | YDR046C | S. cerevisiae | 3883 | cytoplasmic | 3940, 3941, 3942, 3943, 3944, 3945, 3946, 3947 |
| 1 | 12 | SYSBIOL_IY_prio_1 | YEL036C | S. cerevisiae | 3949 | cytoplasmic | 3986, 3987, 3988, 3989, 3990, 3991 |
| 1 | 13 | SYSBIOL_IY_prio_1 | YHR120W | S. | 3993 | cytoplasmic | 4288, 4289, 4290, 4291 |
| | | | | cerevisiae. | | | |
| 1 | 14 | SYSBIOL_IY_prio_1 | YMR212C | S. cerevisiae | 4293 | cytoplasmic | 4306, 4307, 4308, 4309, 4310, 4311, 4312, 4313, |
| | | | | | | | 4314, 4315, 4316, 4317, 4318, 4319, 4320, 4321 |
| 1 | 15 | SYSBIOL_IY_prio_1 | YNL135C | S. cerevisiae | 4323 | cytoplasmic | 4776, 4777 |
| 1 | 16 | SYSBIOL_IY_prio_1 | YPR185W | S. cerevisiae | 4779 | cytoplasmic | 4794, 4795, 4796, 4797, 4798, 4799, 4800, 4801, |
| | | | | | | | 4802, 4803 |
| 1 | 17 | SYSBIOL_IY_prio_1 | At5g54070 | A. th. | 4805, | cytoplasmic | 4840, 4841 |
| | | | | | 4837 | | |
| 1 | 18 | SYSBIOL_IY_prio_1 | B0050 | E. coli | 4843 | cytoplasmic | 5238, 5239, 5240 |
| 1 | 19 | SYSBIOL_IY_prio_1 | GM02LC38418 | G. max | 5242 | cytoplasmic | 5271, 5272, 5273 |
| 1 | 20 | SYSBIOL_IY_prio_1 | YDL007W | S. cerevisiae | 5275 | cytoplasmic | 5934, 5935, 5936, 5937, 5938, 5939, 5940 |
| 1 | 21 | SYSBIOL_IY_prio_1 | YBL022C_2 | S. cerevisiae | 5975 | cytoplasmic | 6066, 6067, 6068, 6069, 6070, 6071, 6072, 6073, |
| | | | | | | | 6074, 6075, 6076, 6077, 6078 |
| 1 | 22 | SYSBIOL_IY_prio_1 | YDR046C_2 | S. cerevisiae | 6080 | cytoplasmic | 6137, 6138, 6139, 6140, 6141, 6142, 6143, 6144 |
| 1 | 23 | SYSBIOL_IY_prio_1 | YEL036C_2 | S. cerevisiae | 6146 | cytoplasmic | 6183, 6184, 6185, 6186, 6187, 6188 |
| 1 | 24 | SYSBIOL_IY_prio_1 | GM02LC38418_2 | G. max | 5942 | cytoplasmic | 5971, 5972, 5973 |

The application's sequence listing, which the Patent Office published only in electronic form, follows.

SEQUENCE LISTING (6208 sequences)

SEQ ID NO: 1 - DNA, 19 bp, Artificial
  adapter sequence added to gene specific primers for cloning purposes
ggaattccagctgaccacc

SEQ ID NO: 2 - DNA, 20 bp, Artificial
  adapter sequence added to gene specific primers for cloning purposes
gatccccgggaattgccatg

SEQ ID NO: 3 - DNA, 10 bp, Artificial
  adapter sequence added to gene specific primers for cloning purposes
ttgctcttcc

SEQ ID NO: 4 - DNA, 10 bp, Artificial
  adapter sequence added to gene specific primers for cloning purposes
ttgctcttcg

SEQ ID NO: 5 - DNA, 34 bp, Artificial
  Amplification of the targeting sequence of the gene FNR from Spinacia oleracea to generate the S.cerevisiae plastidic targeting vector VC-MME354-1
atagaattcgcataaacttatcttcatagttgcc

SEQ ID NO: 6 - DNA, 27 bp, Artificial
  Amplification of the targeting sequence of the gene FNR from Spinacia oleracea to generate the S.cerevisiae plastidic targeting vector VC-MME354-1
atagaattcagaggcgatctgggccct

SEQ ID NO: 7 - DNA, 36 bp, Artificial
  Amplification of the targeting sequence of the gene FNR from Spinacia oleracea to generate the E.coli plastidic targeting vector VC-MME432-1
atagtttaaacgcataaacttatcttcatagttgcc

SEQ ID NO: 8 - DNA, 34 bp, Artificial
  Amplification of the targeting sequence of the gene FNR from Spinacia oleracea to generate the E.coli plastidic targeting vector VC-MME432-1
ataccatggaagagcaagaggcgatctgggccct

SEQ ID NO: 9 - DNA, 9041 bp, Artificial
  pMTX0270p
gctttgggcggatccggacaatcagtaaattgaacggagaatattattcataaaaatacgatagtaacgggtgatatattcattagaatgaaccgaaaccggcggtaaggatctgagctacacatgctcaggttttttacaacgtgcacaacagaattgaaagcaaatatcatgcgatcataggcgtctcgcatatctcattaaagcagggcatgccggtcgagtcaaatctcggtgacgggcaggaccggacggggcggtaccggcaggctgaagtccagctgccagaaacccacgtcatgccagttcccgtgcttgaagccggccgcccgcagcatgccgcggggggcatatccgagcgcctcgtgcatgcgcacgctcgggtcgttgggcagcccgatgacagcgaccacgctcttgaagccctgtgcctccagggacttcagcaggtgggtgtagagcgtggagcccagtcccgtccgctggtggcggggggagacgtacacggtcgactcggccgtccagtcgtaggcgttgcgtgccttccaggggcccgcgtaggcgatgccggcgacctcgccgtccacctcggcgacgagccagggatagcgctcccgcagacggacgaggtcgtccgtccactcctgcggttcctgcggctcggtacggaagttgaccgtgcttgtctcgatgtagtggttgacgatggtgcagaccgccggcatgtccgcctcggtggcacggcggatgtcggccgggcgtcgttctgggctcatggtagactcgacggatccacgtgtggaagatatgaatttttttgagaaactagataagattaatgaatatcggtgttttggttttttcttgtggccgtctttgtttatattgagatttttcaaatcagtgcgcaagacgtgacgtaagtatccgagtcagtttttatttttctactaatttggtcgaatctagattcgacggtatcgataagctcgcggatccctgaaagcgacgttggatgttaacatctacaaattgccttttcttatcgaccatgtacgtaagcgcttacgtttttggtggacccttgaggaaactggtagctgttgtgggcctgtggtctcaagatggatcattaatttccaccttcacctacgatggggggcatcgcaccggtgagtaatattgtacggctaagagcgaatttggcctgtaggatccctgaaagcgacgttggatgttaacatctacaaattgccttttcttatcgaccatgtacgtaagcgcttacgtttttggtggacccttgaggaaactggtagctgttgtgggcctgtggtctcaagatggatcattaatttccaccttcacctacgatggggggcatcgcaccggtgagtaatattgtacggctaagagcgaatttggcctgtaggatccctgaaagcgacgttggatgttaacatctacaaattgccttttcttatcgaccatgtacgtaagcgcttacgtttttggtggacccttgaggaaactggtagctgttgtgggcctgtggtctcaagatggatcattaatttccaccttcacctacgatggggggcatcgcaccggtgagtaatattgtacggctaagagcgaatttggcctgtaggatccgcgagctggtcaatcccattgcttttgaagcagctcaacattgatctctttctcgatcgagggagatttttcaaatcagtgcgcaagacgtgacgtaagtatccgagtcagtttttatttttctactaatttggtcgtttatttcggcgtgtaggacatggcaaccgggcctgaatttcgcgggtattctgtttctattccaactttttcttgatccgcagccattaacgacttttgaatagatacgctgacacgccaagcctcgctagtcaaaagtgtaccaaacaacgctttacagcaagaacggaatgcgcgtgacgctcgcggtgacgccatttcgccttttcagaaatggataaatagccttgcttcctattatatcttcccaaattaccaatacattacactagcatctgaatttcataaccaatctcgatacaccaaatcgaagatctcccgggttgctcttccatggcaatgattaattaacgaagagcaagagctcgaatttccccgatcgttcaaacatttggcaataaagtttcttaagattgaatcctgttgccggtcttgcgatgattatcatataatttctgttgaattacgttaagcatgtaataattaacatgtaatgcatgacgttatttatgagatgggtttttatgattagagtcccgcaattatacatttaatacgcgatagaaaacaaaatatagcgcgcaaactaggataaattatcgcgcgcggtgtcatctatgttactagatcgggaattggcatgcaagcttggcactggccgtcgttttacaacgtcgtgactgggaaaaccctggcgttacccaacttaatcgccttgcagcacatccccctttcgccagctggcgtaatagcgaagaggcccgcaccgatcgcccttcccaacagttgcgcagcctgaatggcgaatgctagagcagcttgagcttggatcagattgtcgtttcccgccttcagtttaaactatcagtgtttgacaggatatattggcgggtaaacctaagagaaaagagcgtttattagaataatcggatatttaaaagggcgtgaaaaggtttatccgttcgtccatttgtatgtgcatgccaaccacagggttcccctcgggatcaaagtactttgatccaacccctccgctgctatagtgcagtcggcttctgacgttcagtgcagccgtcttctgaaaacgacatgtcgcacaagtcctaagttacgcgacaggctgccgccctgcccttttcctggcgttttcttgtcgcgtgttttagtcgcataaagtagaatacttgcgactagaaccggagacattacgccatgaacaagagcgccgccgctggcctgctgggctatgcccgcgtcagcaccgacgaccaggacttgaccaaccaacgggccgaactgcacgcggccggctgcaccaagctgttttccgagaagatcaccggcaccaggcgcgaccgcccggagctggccaggatgcttgaccacctacgccctggcgacgttgtgacagtgaccaggctagaccgcctggcccgcagcacccgcgacctactggacattgccgagcgcatccaggaggccggcgcgggcctgcgtagcctggcagagccgtgggccgacaccaccacgccggccggccgcatggtgttgaccgtgttcgccggcattgccgagttcgagcgttccctaatcatcgaccgcacccggagcgggcgcgaggccgccaaggcccgaggcgtgaagtttggcccccgccctaccctcaccccggcacagatcgcgcacgcccgcgagctgatcgaccaggaaggccgcaccgtgaaagaggcggctgcactgcttggcgtgcatcgctcgaccctgtaccgcgcacttgagcgcagcgaggaagtgacgcccaccgaggccaggcggcgcggtgccttccgtgaggacgcattgaccgaggccgacgccctggcggccgccgagaatgaacgccaagaggaacaagcatgaaaccgcaccaggacggccaggacgaaccgtttttcattaccgaagagatcgaggcggagatgatcgcggccgggtacgtgttcgagccgcccgcgcacgtctcaaccgtgcggctgcatgaaatcctggccggtttgtctgatgccaagctggcggcctggccggccagcttggccgctgaagaaaccgagcgccgccgtctaaaaaggtgatgtgtatttgagtaaaacagcttgcgtcatgcggtcgctgcgtatatgatgcgatgagtaaataaacaaatacgcaaggggaacgcatgaaggttatcgctgtacttaaccagaaaggcgggtcaggcaagacgaccatcgcaacccatctagcccgcgccctgcaactcgccggggccgatgttctgttagtcgattccgatccccagggcagtgcccgcgattgggcggccgtgcgggaagatcaaccgctaaccgttgtcggcatcgaccgcccgacgattgaccgcgacgtgaaggccatcggccggcgcgacttcgtagtgatcgacggagcgccccaggcggcggacttggctgtgtccgcgatcaaggcagccgacttcgtgctgattccggtgcagccaagcccttacgacatatgggccaccgccgacctggtggagctggttaagcagcgcattgaggtcacggatggaaggctacaagcggcctttgtcgtgtcgcgggcgatcaaaggcacgcgcatcggcggtgaggttgccgaggcgctggccgggtacgagctgcccattcttgagtcccgtatcacgcagcgcgtgagctacccaggcactgccgccgccggcacaaccgttcttgaatcagaacccgagggcgacgctgcccgcgaggtccaggcgctggccgctgaaattaaatcaaaactcatttgagttaatgaggtaaagagaaaatgagcaaaagcacaaacacgctaagtgccggccgtccgagcgcacgcagcagcaaggctgcaacgttggccagcctggcagacacgccagccatgaagcgggtcaactttcagttgccggcggaggatcacaccaagctgaagatgtacgcggtacgccaaggcaagaccattaccgagctgctatctgaatacatcgcgcagctaccagagtaaatgagcaaatgaataaatgagtagatgaattttagcggctaaaggaggcggcatggaaaatcaagaacaaccaggcaccgacgccgtggaatgccccatgtgtggaggaacgggcggttggccaggcgtaagcggctgggttgcctgccggccctgcaatggcactggaacccccaagcccgaggaatcggcgtgagcggtcgcaaaccatccggcccggtacaaatcggcgcggcgctgggtgatgacctggtggagaagttgaaggccgcgcaggccgcccagcggcaacgcatcgaggcagaagcacgccccggtgaatcgtggcaagcggccgctgatcgaatccgcaaagaatcccggcaaccgccggcagccggtgcgccgtcgattaggaagccgcccaagggcgacgagcaaccagattttttcgttccgatgctctatgacgtgggcacccgcgatagtcgcagcatcatggacgtggccgttttccgtctgtcgaagcgtgaccgacgagctggcgaggtgatccgctacgagcttccagacgggcacgtagaggtttccgcagggccggccggcatggccagtgtgtgggattacgacctggtactgatggcggtttcccatctaaccgaatccatgaaccgataccgggaagggaagggagacaagcccggccgcgtgttccgtccacacgttgcggacgtactcaagttctgccggcgagccgatggcggaaagcagaaagacgacctggtagaaacctgcattcggttaaacaccacgcacgttgccatgcagcgtacgaagaaggccaagaacggccgcctggtgacggtatccgagggtgaagccttgattagccgctacaagatcgtaaagagcgaaaccgggcggccggagtacatcgagatcgagctagctgattggatgtaccgcgagatcacagaaggcaagaacccggacgtgctgacggttcaccccgattactttttgatcgatcccggcatcggccgttttctctaccgcctggcacgccgcgccgcaggcaaggcagaagccagatggttgttcaagacgatctacgaacgcagtggcagcgccggagagttcaagaagttctgtttcaccgtgcgcaagctgatcgggtcaaatgacctgccggagtacgatttgaaggaggaggcggggcaggctggcccgatcctagtcatgcgctaccgcaacctgatcgagggcgaagcatccgccggttcctaatgtacggagcagatgctagggcaaattgccctagcaggggaaaaaggtcgaaaaggtctctttcctgtggatagcacgtacattgggaacccaaagccgtacattgggaaccggaacccgtacattgggaacccaaagccgtacattgggaaccggtcacacatgtaagtgactgatataaaagagaaaaaaggcgatttttccgcctaaaactctttaaaacttattaaaactcttaaaacccgcctggcctgtgcataactgtctggccagcgcacagccgaagagctgcaaaaagcgcctacccttcggtcgctgcgctccctacgccccgccgcttcgcgtcggcctatcgcggccgctggccgctcaaaaatggctggcctacggccaggcaatctaccagggcgcggacaagccgcgccgtcgccactcgaccgccggcgcccacatcaaggcaccctgcctcgcgcgtttcggtgatgacggtgaaaacctctgacacatgcagctcccggagacggtcacagcttgtctgtaagcggatgccgggagcagacaagcccgtcagggcgcgtcagcgggtgttggcgggtgtcggggcgcagccatgacccagtcacgtagcgatagcggagtgtatactggcttaactatgcggcatcagagcagattgtactgagagtgcaccatatgcggtgtgaaataccgcacagatgcgtaaggagaaaataccgcatcaggcgctcttccgcttcctcgctcactgactcgctgcgctcggtcgttcggctgcggcgagcggtatcagctcactcaaaggcggtaatacggttatccacagaatcaggggataacgcaggaaagaacatgtgagcaaaaggccagcaaaaggccaggaaccgtaaaaaggccgcgttgctggcgtttttccataggctccgcccccctgacgagcatcacaaaaatcgacgctcaagtcagaggtggcgaaacccgacaggactataaagataccaggcgtttccccctggaagctccctcgtgcgctctcctgttccgaccctgccgcttaccggatacctgtccgcctttctcccttcgggaagcgtggcgctttctcatagctcacgctgtaggtatctcagttcggtgtaggtcgttcgctccaagctgggctgtgtgcacgaaccccccgttcagcccgaccgctgcgccttatccggtaactatcgtcttgagtccaacccggtaagacacgacttatcgccactggcagcagccactggtaacaggattagcagagcgaggtatgtaggcggtgctacagagttcttgaagtggtggcctaactacggctacactagaaggacagtatttggtatctgcgctctgctgaagccagttaccttcggaaaaagagttggtagctcttgatccggcaaacaaaccaccgctggtagcggtggtttttttgtttgcaagcagcagattacgcgcagaaaaaaaggatctcaagaagatcctttgatcttttctacggggtctgacgctcagtggaacgaaaactcacgttaagggattttggtcatgcattctaggtactaaaacaattcatccagtaaaatataatattttattttctcccaatcaggcttgatccccagtaagtcaaaaaatagctcgacatactgttcttccccgatatcctccctgatcgaccggacgcagaaggcaatgtcataccacttgtccgccctgccgcttctcccaagatcaataaagccacttactttgccatctttcacaaagatgttgctgtctcccaggtcgccgtgggaaaagacaagttcctcttcgggcttttccgtctttaaaaaatcatacagctcgcgcggatctttaaatggagtgtcttcttcccagttttcgcaatccacatcggccagatcgttattcagtaagtaatccaattcggctaagcggctgtctaagctattcgtatagggacaatccgatatgtcgatggagtgaaagagcctgatgcactccgcatacagctcgataatcttttcagggctttgttcatcttcatactcttccgagcaaaggacgccatcggcctcactcatgagcagattgctccagccatcatgccgttcaaagtgcaggacctttggaacaggcagctttccttccagccatagcatcatgtccttttcccgttccacatcataggtggtccctttataccggctgtccgtcatttttaaatataggttttcattttctcccaccagcttatataccttagcaggagacattccttccgtatcttttacgcagcggtatttttcgatcagttttttcaattccggtgatattctcattttagccatttattatttccttcctcttttctacagtatttaaagataccccaagaagctaattataacaagacgaactccaattcactgttccttgcattctaaaaccttaaataccagaaaacagctttttcaaagttgttttcaaagttggcgtataacatagtatcgacggagccgattttgaaaccgcggtgatcacaggcagcaacgctctgtcatcgttacaatcaacatgctaccctccgcgagatcatccgtgtttcaaacccggcagcttagttgccgttcttccgaatagcatcggtaacatgagcaaagtctgccgccttacaacggctctcccgctgacgccgtcccggactgatgggctgcctgtatcgagtggtgattttgtgccgagctgccggtcggggagctgttggctggctggtggcaggatatattgtggtgtaaacaaattgacgcttagacaacttaataacacattgcggacgtttttaatgtactgaattaacgccgaattaa

SEQ ID NO: 10 - DNA, 419 bp, Spinacia oleracea
  5'UTR (1)..(168)
  CDS (166)..(273)
  CDS (351)..(419)
gcataaacttatcttcatagttgccactccaatttgctccttgaatctcctccacccaatacataatccactcctccatcacccacttcactactaaatcaaacttaactctgtttttctctctcctcctttcatttcttattcttccaatcatcgtactccgccatgaccaccgctgtcaccgccgctgtttctttcccctctaccaaaaccacctctctctccgcccgaagctcctccgtcatttcccctgacaaaatcagctacaaaaaggtgattcccaatttcactgtgttttttattaataatttgttattttgatgatgagatgattaatttgggtgctgcaggttcctttgtactacaggaatgtatctgcaactgggaaaatgggacccatcagggcccagatcgcctct

SEQ ID NO: 11 - protein, 59 aa, Spinacia oleracea
MTTAVTAAVSFPSTKTTSLSARSSSVISPDKISYKKVPLYYRNVSATGKMGPIRAQIAS

SEQ ID NO: 12 - DNA, 8659 bp, Artificial
  plasmid pMTX155
agcttggacaatcagtaaattgaacggagaatattattcataaaaatacgatagtaacgggtgatatattcattagaatgaaccgaaaccggcggtaaggatctgagctacacatgctcaggttttttacaacgtgcacaacagaattgaaagcaaatatcatgcgatcataggcgtctcgcatatctcattaaagcagggcatgccggtcgagtcaaatctcggtgacgggcaggaccggacggggcggtaccggcaggctgaagtccagctgccagaaacccacgtcatgccagttcccgtgcttgaagccggccgcccgcagcatgccgcggggggcatatccgagcgcctcgtgcatgcgcacgctcgggtcgttgggcagcccgatgacagcgaccacgctcttgaagccctgtgcctccagggacttcagcaggtgggtgtagagcgtggagcccagtcccgtccgctggtggcggggggagacgtacacggtcgactcggccgtccagtcgtaggcgttgcgtgccttccaggggcccgcgtaggcgatgccggcgacctcgccgtccacctcggcgacgagccagggatagcgctcccgcagacggacgaggtcgtccgtccactcctgcggttcctgcggctcggtacggaagttgaccgtgcttgtctcgatgtagtggttgacgatggtgcagaccgccggcatgtccgcctcggtggcacggcggatgtcggccgggcgtcgttctgggctcatggtagactcgacggatccacgtgtggaagatatgaatttttttgagaaactagataagattaatgaatatcggtgttttggttttttcttgtggccgtctttgtttatattgagatttttcaaatcagtgcgcaagacgtgacgtaagtatccgagtcagtttttatttttctactaatttggtcgaagctttgggcggatcctctagagcagcttgccaacatggtggagcacgacactctcgtctactccaagaatatcaaagatacagtctcagaagaccaaagggctattgagacttttcaacaaagggtaatatcgggaaacctcctcggattccattgcccagctatctgtcacttcatcaaaaggacagtagaaaaggaaggtggcacctacaaatgccatcattgcgataaaggaaaggctatcgttcaagatgcctctgccgacagtggtcccaaagatggacccccacccacgaggagcatcgtggaaaaagaagacgttccaaccacgtcttcaaagcaagtggattgatgtgaacatggtggagcacgacactctcgtctactccaagaatatcaaagatacagtctcagaagaccaaagggctattgagacttttcaacaaagggtaatatcgggaaacctcctcggattccattgcccagctatctgtcacttcatcaaaaggacagtagaaaaggaaggtggcacctacaaatgccatcattgcgataaaggaaaggctatcgttcaagatgcctctgccgacagtggtcccaaagatggacccccacccacgaggagcatcgtggaaaaagaagacgttccaaccacgtcttcaaagcaagtggattgatgtgatatctccactgacgtaagggatgacgcacaatcccactatccttcgcaagacccttcctctatataaggaagttcatttcatttggagaggacagggtaccctggaattccagctgaccaccatggcaattcccggggatcagctcgaatttccccgatcgttcaaacatttggcaataaagtttcttaagattgaatcctgttgccggtcttgcgatgattatcatataatttctgttgaattacgttaagcatgtaataattaacatgtaatgcatgacgttatttatgagatgggtttttatgattagagtcccgcaattatacatttaatacgcgatagaaaacaaaatatagcgcgcaaactaggataaattatcgcgcgcggtgtcatctatgttactagatcgggaattggcatgcaagcttggcactggccgtcgttttacaacgtcgtgactgggaaaaccctggcgttacccaacttaatcgccttgcagcacatccccctttcgccagctggcgtaatagcgaagaggcccgcaccgatcgcccttcccaacagttgcgcagcctgaatggcgaatgctagagcagcttgagcttggatcagattgtcgtttcccgccttcagtttaaactatcagtgtttgacaggatatattggcgggtaaacctaagagaaaagagcgtttattagaataacggatatttaaaagggcgtgaaaaggtttatccgttcgtccatttgtatgtgcatgccaaccacagggttcccctcgggatcaaagtactttgatccaacccctccgctgctatagtgcagtcggcttctgacgttcagtgcagccgtcttctgaaaacgacatgtcgcacaagtcctaagttacgcgacaggctgccgccctgcccttttcctggcgttttcttgtcgcgtgttttagtcgcataaagtagaatacttgcgactagaaccggagacattacgccatgaacaagagcgccgccgctggcctgctgggctatgcccgcgtcagcaccgacgaccaggacttgaccaaccaacgggccgaactgcacgcggccggctgcaccaagctgttttccgagaagatcaccggcaccaggcgcgaccgcccggagctggccaggatgcttgaccacctacgccctggcgacgttgtgacagtgaccaggctagaccgcctggcccgcagcacccgcgacctactggacattgccgagcgcatccaggaggccggcgcgggcctgcgtagcctggcagagccgtgggccgacaccaccacgccggccggccgcatggtgttgaccgtgttcgccggcattgccgagttcgagcgttccctaatcatcgaccgcacccggagcgggcgcgaggccgccaaggcccgaggcgtgaagtttggcccccgccctaccctcaccccggcacagatcgcgcacgcccgcgagctgatcgaccaggaaggccgcaccgtgaaagaggcggctgcactgcttggcgtgcatcgctcgaccctgtaccgcgcacttgagcgcagcgaggaagtgacgcccaccgaggccaggcggcgcggtgccttccgtgaggacgcattgaccgaggccgacgccctggcggccgccgagaatgaacgccaagaggaacaagcatgaaaccgcaccaggacggccaggacgaaccgtttttcattaccgaagagatcgaggcggagatgatcgcggccgggtacgtgttcgagccgcccgcgcacgtctcaaccgtgcggctgcatgaaatcctggccggtttgtctgatgccaagctggcggcctggccggccagcttggccgctgaagaaaccgagcgccgccgtctaaaaaggtgatgtgtatttgagtaaaacagcttgcgtcatgcggtcgctgcgtatatgatgcgatgagtaaataaacaaatacgcaaggggaacgcatgaaggttatcgctgtacttaaccagaaaggcgggtcaggcaagacgaccatcgcaacccatctagcccgcgccctgcaactcgccggggccgatgttctgttagtcgattccgatccccagggcagtgcccgcgattgggcggccgtgcgggaagatcaaccgctaaccgttgtcggcatcgaccgcccgacgattgaccgcgacgtgaaggccatcggccggcgcgacttcgtagtgatcgacggagcgccccaggcggcggacttggctgtgtccgcgatcaaggcagccgacttcgtgctgattccggtgcagccaagcccttacgacatatgggccaccgccgacctggtggagctggttaagcagcgcattgaggtcacggatggaaggctacaagcggcctttgtcgtgtcgcgggcgatcaaaggcacgcgcatcggcggtgaggttgccgaggcgctggccgggtacgagctgcccattcttgagtcccgtatcacgcagcgcgtgagctacccaggcactgccgccgccggcacaaccgttcttgaatcagaacccgagggcgacgctgcccgcgaggtccaggcgctggccgctgaaattaaatcaaaactcatttgagttaatgaggtaaagagaaaatgagcaaaagcacaaacacgctaagtgccggccgtccgagcgcacgcagcagcaaggctgcaacgttggccagcctggcagacacgccagccatgaagcgggtcaactttcagttgccggcggaggatcacaccaagctgaagatgtacgcggtacgccaaggcaagaccattaccgagctgctatctgaatacatcgcgcagctaccagagtaaatgagcaaatgaataaatgagtagatgaattttagcggctaaaggaggcggcatggaaaatcaagaacaaccaggcaccgacgccgtggaatgccccatgtgtggaggaacgggcggttggccaggcgtaagcggctgggttgtctgccggccctgcaatggcactggaacccccaagcccgaggaatcggcgtgacggtcgcaaaccatccggcccggtacaaatcggcgcggcgctgggtgatgacctggtggagaagttgaaggccgcgcaggccgcccagcggcaacgcatcgaggcagaagcacgccccggtgaatcgtggcaagcggccgctgatcgaatccgcaaagaatcccggcaaccgccggcagccggtgcgccgtcgattaggaagccgcccaagggcgacgagcaaccagattttttcgttccgatgctctatgacgtgggcacccgcgatagtcgcagcatcatggacgtggccgttttccgtctgtcgaagcgtgaccgacgagctggcgaggtgatccgctacgagcttccagacgggcacgtagaggtttccgcagggccggccggcatggccagtgtgtgggattacgacctggtactgatggcggtttcccatctaaccgaatccatgaaccgataccgggaagggaagggagacaagcccggccgcgtgttccgtccacacgttgcggacgtactcaagttctgccggcgagccgatggcggaaagcagaaagacgacctggtagaaacctgcattcggttaaacaccacgcacgttgccatgcagcgtacgaagaaggccaagaacggccgcctggtgacggtatccgagggtgaagccttgattagccgctacaagatcgtaaagagcgaaaccgggcggccggagtacatcgagatcgagctagctgattggatgtaccgcgagatcacagaaggcaagaacccggacgtgctgacggttcaccccgattactttttgatcgatcccggcatcggccgttttctctaccgcctggcacgccgcgccgcaggcaaggcagaagccagatggttgttcaagacgatctacgaacgcagtggcagcgccggagagttcaagaagttctgtttcaccgtgcgcaagctgatcgggtcaaatgacctgccggagtacgatttgaaggaggaggcggggcaggctggcccgatcctagtcatgcgctaccgcaacctgatcgagggcgaagcatccgccggttcctaatgtacggagcagatgctagggcaaattgccctagcaggggaaaaaggtcgaaaaggtctctttcctgtggatagcacgtacattgggaacccaaagccgtacattgggaaccggaacccgtacattgggaacccaaagccgtacattgggaaccggtcacacatgtaagtgactgatataaaagagaaaaaaggcgatttttccgcctaaaactctttaaaacttattaaaactcttaaaacccgcctggcctgtgcataactgtctggccagcgcacagccgaagagctgcaaaaagcgcctacccttcggtcgctgcgctccctacgccccgccgcttcgcgtcggcctatcgcggccgctggccgctcaaaaatggctggcctacggccaggcaatctaccagggcgcggacaagccgcgccgtcgccactcgaccgccggcgcccacatcaaggcaccctgcctcgcgcgtttcggtgatgacggtgaaaacctctgacacatgcagctcccggagacggtcacagcttgtctgtaagcggatgccgggagcagacaagcccgtcagggcgcgtcagcgggtgttggcgggtgtcggggcgcagccatgacccagtcacgtagcgatagcggagtgtatactggcttaactatgcggcatcagagcagattgtactgagagtgcaccatatgcggtgtgaaataccgcacagatgcgtaaggagaaaataccgcatcaggcgctcttccgcttcctcgctcactgactcgctgcgctcggtcgttcggctgcggcgagcggtatcagctcactcaaaggcggtaatacggttatccacagaatcaggggataacgcaggaaagaacatgtgagcaaaaggccagcaaaaggccaggaaccgtaaaaaggccgcgttgctggcgtttttccataggctccgcccccctgacgagcatcacaaaaatcgacgctcaagtcagaggtggcgaaacccgacaggactataaagataccaggcgtttccccctggaagctccctcgtgcgctctcctgttccgaccctgccgcttaccggatacctgtccgcctttctcccttcgggaagcgtggcgctttctcatagctcacgctgtaggtatctcagttcggtgtaggtcgttcgctccaagctgggctgtgtgcacgaaccccccgttcagcccgaccgctgcgccttatccggtaactatcgtcttgagtccaacccggtaagacacgacttatcgccactggcagcagccactggtaacaggattagcagagcgaggtatgtaggcggtgctacagagttcttgaagtggtggcctaactacggctacactagaaggacagtatttggtatctgcgctctgctgaagccagttaccttcggaaaaagagttggtagctcttgatccggcaaacaaaccaccgctggtagcggtggtttttttgtttgcaagcagcagattacgcgcagaaaaaaaggatctcaagaagatcctttgatcttttctacggggtctgacgctcagtggaacgaaaactcacgttaagggattttggtcatgcattctaggtactaaaacaattcatccagtaaaatataatattttattttctcccaatcaggcttgatccccagtaagtcaaaaaatagctcgacatactgttcttccccgatatcctccctgatcgaccggacgcagaaggcaatgtcataccacttgtccgccctgccgcttctcccaagatcaataaagccacttactttgccatctttcacaaagatgttgctgtctcccaggtcgccgtgggaaaagacaagttcctcttcgggcttttccgtctttaaaaaatcatacagctcgcgcggatctttaaatggagtgtcttcttcccagttttcgcaatccacatcggccagatcgttattcagtaagtaatccaattcggctaagcggctgtctaagctattcgtatagggacaatccgatatgtcgatggagtgaaagagcctgatgcactccgcatacagctcgataatcttttcagggctttgttcatcttcatactcttccgagcaaaggacgccatcggcctcactcatgagcagattgctccagccatcatgccgttcaaagtgcaggacctttggaacaggcagctttccttccagccatagcatcatgtccttttcccgttccacatcataggtggtccctttataccggctgtccgtcatttttaaatataggttttcattttctcccaccagcttatataccttagcaggagacattccttccgtatcttttacgcagcggtatttttcgatcagttttttcaattccggtgatattctcattttagccatttattatttccttcctcttttctacagtatttaaagataccccaagaagctaattataacaagacgaactccaattcactgttccttgcattctaaaaccttaaataccagaaaacagctttttcaaagttgttttcaaagttggcgtataacatagtatcgacggagccgattttgaaaccgcggtgatcacaggcagcaacgctctgtcatcgttacaatcaacatgctaccctccgcgagatcatccgtgtttcaaacccggcagcttagttgccgttcttccgaatagcatcggtaacatgagcaaagtctgccgccttacaacggctctcccgctgacgccgtcccggactgatgggctgcctgtatcgagtggtgattttgtgccgagctgccggtcggggagctgttggctggctggtggcaggatatattgtggtgtaaacaaattgacgcttagacaacttaataacacattgcggacgtttttaatgtactgaattaacgccgaatta

SEQ ID NO: 13 - DNA, 9469 bp, Artificial
  plasmid VC-MME354-1QCZ
  5'UTR (2130)..(2294)
  transit_peptide (2295)..(2402)
  CDS (2295)..(2402)
  transit_peptide (2480)..(2548)
  CDS (2480)..(2548)
  CDS (2549)..(2566): adapter
agctttgggcggatcctctagaggacaatcagtaaattgaacggagaatattattcataaaaatacgatagtaacgggtgatatattcattagaatgaaccgaaaccggcggtaaggatctgagctacacatgctcaggttttttacaacgtgcacaacagaattgaaagcaaatatcatgcgatcataggcgtctcgcatatctcattaaagcagggcatgccggtcgagtcaaatctcggtgacgggcaggaccggacggggcggtaccggcaggctgaagtccagctgccagaaacccacgtcatgccagttcccgtgcttgaagccggccgcccgcagcatgccgcggggggcatatccgagcgcctcgtgcatgcgcacgctcgggtcgttgggcagcccgatgacagcgaccacgctcttgaagccctgtgcctccagggacttcagcaggtgggtgtagagcgtggagcccagtcccgtccgctggtggcggggggagacgtacacggtcgactcggccgtccagtcgtaggcgttgcgtgccttccaggggcccgcgtaggcgatgccggcgacctcgccgtccacctcggcgacgagccagggatagcgctcccgcagacggacgaggtcgtccgtccactcctgcggttcctgcggctcggtacggaagttgaccgtgcttgtctcgatgtagtggttgacgatggtgcagaccgccggcatgtccgcctcggtggcacggcggatgtcggccgggcgtcgttctgggctcatggtagactcgacggatccacgtgtggaagatatgaatttttttgagaaactagataagattaatgaatatcggtgttttggttttttcttgtggccgtctttgtttatattgagatttttcaaatcagtgcgcaagacgtgacgtaagtatccgagtcagtttttatttttctactaatttggtcgaatctagattcgacggtatcgataagctcgcggatccctgaaagcgacgttggatgttaacatctacaaattgccttttcttatcgaccatgtacgtaagcgcttacgtttttggtggacccttgaggaaactggtagctgttgtgggcctgtggtctcaagatggatcattaatttccaccttcacctacgatggggggcatcgcaccggtgagtaatattgtacggctaagagcgaatttggcctgtaggatccctgaaagcgacgttggatgttaacatctacaaattgccttttcttatcgaccatgtacgtaagcgcttacgtttttggtggacccttgaggaaactggtagctgttgtgggcctgtggtctcaagatggatcattaatttccaccttcacctacgatggggggcatcgcaccggtgagtaatattgtacggctaagagcgaatttggcctgtaggatccctgaaagcgacgttggatgttaacatctacaaattgccttttcttatcgaccatgtacgtaagcgcttacgtttttggtggacccttgaggaaactggtagctgttgtgggcctgtggtctcaagatggatcattaatttccaccttcacctacgatggggggcatcgcaccggtgagtaatattgtacggctaagagcgaatttggcctgtaggatccgcgagctggtcaatcccattgcttttgaagcagctcaacattgatctctttctcgatcgagggagatttttcaaatcagtgcgcaagacgtgacgtaagtatccgagtcagtttttatttttctactaatttggtcgtttatttcggcgtgtaggacatggcaaccgggcctgaatttcgcgggtattctgtttctattccaactttttcttgatccgcagccattaacgacttttgaatagatacgctgacacgccaagcctcgctagtcaaaagtgtaccaaacaacgctttacagcaagaacggaatgcgcgtgacgctcgcggtgacgccatttcgccttttcagaaatggataaatagccttgcttcctattatatcttcccaaattaccaatacattacactagcatctgaatttcataaccaatctcgatacaccaaatcgaagatctccctggaattcgcataaacttatcttcatagttgccactccaatttgctccttgaatctcctccacccaatacataatccactcctccatcacccacttcactactaaatcaaacttaactctgtttttctctctcctcctttcatttcttattcttccaatcatcgtactccgccatgaccaccgctgtcaccgccgctgtttctttcccctctaccaaaaccacctctctctccgcccgaagctcctccgtcatttcccctgacaaaatcagctacaaaaaggtgattcccaatttcactgtgttttttattaataatttgttattttgatgatgagatgattaatttgggtgctgcaggttcctttgtactacaggaatgtatctgcaactgggaaaatgggacccatcagggcccagatcgcctctgaattccagctgaccaccatggcaattcccggggatcagctcgaatttccccgatcgttcaaacatttggcaataaagtttcttaagattgaatcctgttgccggtcttgcgatgattatcatataatttctgttgaattacgttaagcatgtaataattaacatgtaatgcatgacgttatttatgagatgggtttttatgattagagtcccgcaattatacatttaatacgcgatagaaaacaaaatatagcgcgcaaactaggataaattatcgcgcgcggtgtcatctatgttactagatcgggaattggcatgcaagcttggcactggccgtcgttttacaacgtcgtgactgggaaaaccctggcgttacccaacttaatcgccttgcagcacatccccctttcgccagctggcgtaatagcgaagaggcccgcaccgatcgcccttcccaacagttgcgcagcctgaatggcgaatgctagagcagcttgagcttggatcagattgtcgtttcccgccttcagtttaaactatcagtgtttgacaggatatattggcgggtaaacctaagagaaaagagcgtttattagaataatcggatatttaaaagggcgtgaaaaggtttatccgttcgtccatttgtatgtgcatgccaaccacagggttcccctcgggatcaaagtactttgatccaacccctccgctgctatagtgcagtcggcttctgacgttcagtgcagccgtcttctgaaaacgacatgtcgcacaagtcctaagttacgcgacaggctgccgccctgcccttttcctggcgttttcttgtcgcgtgttttagtcgcataaagtagaatacttgcgactagaaccggagacattacgccatgaacaagagcgccgccgctggcctgctgggctatgcccgcgtcagcaccgacgaccaggacttgaccaaccaacgggccgaactgcacgcggccggctgcaccaagctgttttccgagaagatcaccggcaccaggcgcgaccgcccggagctggccaggatgcttgaccacctacgccctggcgacgttgtgacagtgaccaggctagaccgcctggcccgcagcacccgcgacctactggacattgccgagcgcatccaggaggccggcgcgggcctgcgtagcctggcagagccgtgggccgacaccaccacgccggccggccgcatggtgttgaccgtgttcgccggcattgccgagttcgagcgttccctaatcatcgaccgcacccggagcgggcgcgaggccgccaaggcccgaggcgtgaagtttggcccccgccctaccctcaccccggcacagatcgcgcacgcccgcgagctgatcgaccaggaaggccgcaccgtgaaagaggcggctgcactgcttggcgtgcatcgctcgaccctgtaccgcgcacttgagcgcagcgaggaagtgacgcccaccgaggccaggcggcgcggtgccttccgtgaggacgcattgaccgaggccgacgccctggcggccgccgagaatgaacgccaagaggaacaagcatgaaaccgcaccaggacggccaggacgaaccgtttttcattaccgaagagatcgaggcggagatgatcgcggccgggtacgtgttcgagccgcccgcgcacgtctcaaccgtgcggctgcatgaaatcctggccggtttgtctgatgccaagctggcggcctggccggccagcttggccgctgaagaaaccgagcgccgccgtctaaaaaggtgatgtgtatttgagtaaaacagcttgcgtcatgcggtcgctgcgtatatgatgcgatgagtaaataaacaaatacgcaaggggaacgcatgaaggttatcgctgtacttaaccagaaaggcgggtcaggcaagacgaccatcgcaacccatctagcccgcgccctgcaactcgccggggccgatgttctgttagtcgattccgatccccagggcagtgcccgcgattgggcggccgtgcgggaagatcaaccgctaaccgttgtcggcatcgaccgcccgacgattgaccgcgacgtgaaggccatcggccggcgcgacttcgtagtgatcgacggagcgccccaggcggcggacttggctgtgtccgcgatcaaggcagccgacttcgtgctgattccggtgcagccaagcccttacgacatatgggccaccgccgacctggtggagctggttaagcagcgcattgaggtcacggatggaaggctacaagcggcctttgtcgtgtcgcgggcgatcaaaggcacgcgcatcggcggtgaggttgccgaggcgctggccgggtacgagctgcccattcttgagtcccgtatcacgcagcgcgtgagctacccaggcactgccgccgccggcacaaccgttcttgaatcagaacccgagggcgacgctgcccgcgaggtccaggcgctggccgctgaaattaaatcaaaactcatttgagttaatgaggtaaagagaaaatgagcaaaagcacaaacacgctaagtgccggccgtccgagcgcacgcagcagcaaggctgcaacgttggccagcctggcagacacgccagccatgaagcgggtcaactttcagttgccggcggaggatcacaccaagctgaagatgtacgcggtacgccaaggcaagaccattaccgagctgctatctgaatacatcgcgcagctaccagagtaaatgagcaaatgaataaatgagtagatgaattttagcggctaaaggaggcggcatggaaaatcaagaacaaccaggcaccgacgccgtggaatgccccatgtgtggaggaacgggcggttggccaggcgtaagcggctgggttgcctgccggccctgcaatggcactggaacccccaagcccgaggaatcggcgtgagcggtcgcaaaccatccggcccggtacaaatcggcgcggcgctgggtgatgacctggtggagaagttgaaggccgcgcaggccgcccagcggcaacgcatcgaggcagaagcacgccccggtgaatcgtggcaagcggccgctgatcgaatccgcaaagaatcccggcaaccgccggcagccggtgcgccgtcgattaggaagccgcccaagggcgacgagcaaccagattttttcgttccgatgctctatgacgtgggcacccgcgatagtcgcagcatcatggacgtggccgttttccgtctgtcgaagcgtgaccgacgagctggcgaggtgatccgctacgagcttccagacgggcacgtagaggtttccgcagggccggccggcatggccagtgtgtgggattacgacctggtactgatggcggtttcccatctaaccgaatccatgaaccgataccgggaagggaagggagacaagcccggccgcgtgttccgtccacacgttgcggacgtactcaagttctgccggcgagccgatggcggaaagcagaaagacgacctggtagaaacctgcattcggttaaacaccacgcacgttgccatgcagcgtacgaagaaggccaagaacggccgcctggtgacggtatccgagggtgaagccttgattagccgctacaagatcgtaaagagcgaaaccgggcggccggagtacatcgagatcgagctagctgattggatgtaccgcgagatcacagaaggcaagaacccggacgtgctgacggttcaccccgattactttttgatcgatcccggcatcggccgttttctctaccgcctggcacgccgcgccgcaggcaaggcagaagccagatggttgttcaagacgatctacgaacgcagtggcagcgccggagagttcaagaagttctgtttcaccgtgcgcaagctgatcgggtcaaatgacctgccggagtacgatttgaaggaggaggcggggcaggctggcccgatcctagtcatgcgctaccgcaacctgatcgagggcgaagcatccgccggttcctaatgtacggagcagatgctagggcaaattgccctagcaggggaaaaaggtcgaaaaggtctctttcctgtggatagcacgtacattgggaacccaaagccgtacattgggaaccggaacccgtacattgggaacccaaagccgtacattgggaaccggtcacacatgtaagtgactgatataaaagagaaaaaaggcgatttttccgcctaaaactctttaaaacttattaaaactcttaaaacccgcctggcctgtgcataactgtctggccagcgcacagccgaagagctgcaaaaagcgcctacccttcggtcgctgcgctccctacgccccgccgcttcgcgtcggcctatcgcggccgctggccgctcaaaaatggctggcctacggccaggcaatctaccagggcgcggacaagccgcgccgtcgccactcgaccgccggcgcccacatcaaggcaccctgcctcgcgcgtttcggtgatgacggtgaaaacctctgacacatgcagctcccggagacggtcacagcttgtctgtaagcggatgccgggagcagacaagcccgtcagggcgcgtcagcgggtgttggcgggtgtcggggcgcagccatgacccagtcacgtagcgatagcggagtgtatactggcttaactatgcggcatcagagcagattgtactgagagtgcaccatatgcggtgtgaaataccgcacagatgcgtaaggagaaaataccgcatcaggcgctcttccgcttcctcgctcactgactcgctgcgctcggtcgttcggctgcggcgagcggtatcagctcactcaaaggcggtaatacggttatccacagaatcaggggataacgcaggaaagaacatgtgagcaaaaggccagcaaaaggccaggaaccgtaaaaaggccgcgttgctggcgtttttccataggctccgcccccctgacgagcatcacaaaaatcgacgctcaagtcagaggtggcgaaacccgacaggactataaagataccaggcgtttccccctggaagctccctcgtgcgctctcctgttccgaccctgccgcttaccggatacctgtccgcctttctcccttcgggaagcgtggcgctttctcatagctcacgctgtaggtatctcagttcggtgtaggtcgttcgctccaagctgggctgtgtgcacgaaccccccgttcagcccgaccgctgcgccttatccggtaactatcgtcttgagtccaacccggtaagacacgacttatcgccactggcagcagccactggtaacaggattagcagagcgaggtatgtaggcggtgctacagagttcttgaagtggtggcctaactacggctacactagaaggacagtatttggtatctgcgctctgctgaagccagttaccttcggaaaaagagttggtagctcttgatccggcaaacaaaccaccgctggtagcggtggtttttttgtttgcaagcagcagattacgcgcagaaaaaaaggatctcaagaagatcctttgatcttttctacggggtctgacgctcagtggaacgaaaactcacgttaagggattttggtcatgcattctaggtactaaaacaattcatccagtaaaatataatattttattttctcccaatcaggcttgatccccagtaagtcaaaaaatagctcgacatactgttcttccccgatatcctccctgatcgaccggacgcagaaggcaatgtcataccacttgtccgccctgccgcttctcccaagatcaataaagccacttactttgccatctttcacaaagatgttgctgtctcccaggtcgccgtgggaaaagacaagttcctcttcgggcttttccgtctttaaaaaatcatacagctcgcgcggatctttaaatggagtgtcttcttcccagttttcgcaatccacatcggccagatcgttattcagtaagtaatccaattcggctaagcggctgtctaagctattcgtatagggacaatccgatatgtcgatggagtgaaagagcctgatgcactccgcatacagctcgataatcttttcagggctttgttcatcttcatactcttccgagcaaaggacgccatcggcctcactcatgagcagattgctccagccatcatgccgttcaaagtgcaggacctttggaacaggcagctttccttccagccatagcatcatgtccttttcccgttccacatcataggtggtccctttataccggctgtccgtcatttttaaatataggttttcattttctcccaccagcttatataccttagcaggagacattccttccgtatcttttacgcagcggtatttttcgatcagttttttcaattccggtgatattctcattttagccatttattatttccttcctcttttctacagtatttaaagataccccaagaagctaattataacaagacgaactccaattcactgttccttgcattctaaaaccttaaataccagaaaacagctttttcaaagttgttttcaaagttggcgtataacatagtatcgacggagccgattttgaaaccgcggtgatcacaggcagcaacgctctgtcatcgttacaatcaacatgctaccctccgcgagatcatccgtgtttcaaacccggcagcttagttgccgttcttccgaatagcatcggtaacatgagcaaagtctgccgccttacaacggctctcccgctgacgccgtcccggactgatgggctgcctgtatcgagtggtgattttgtgccgagctgccggtcggggagctgttggctggctggtggcaggatatattgtggtgtaaacaaattgacgcttagacaacttaataacacattgcggacgtttttaatgtactgaattaacgccgaatta

SEQ ID NO: 14 - protein, 65 aa, Artificial
  Synthetic Construct
MTTAVTAAVSFPSTKTTSLSARSSSVISPDKISYKKVPLYYRNVSATGKMGPIRAQIASEFQLTT

SEQ ID NO: 15 - DNA, 9045 bp, Artificial
  plasmid VC-MME220-1qcz
agcttggacaatcagtaaattgaacggagaatattattcataaaaatacgatagtaacgggtgatatattcattagaatgaaccgaaaccggcggtaaggatctgagctacacatgctcaggttttttacaacgtgcacaacagaattgaaagcaaatatcatgcgatcataggcgtctcgcatatctcattaaagcagggcatgccggtcgagtcaaatctcggtgacgggcaggaccggacggggcggtaccggcaggctgaagtccagctgccagaaacccacgtcatgccagttcccgtgcttgaagccggccgcccgcagcatgccgcggggggcatatccgagcgcctcgtgcatgcgcacgctcgggtcgttgggcagcccgatgacagcgaccacgctcttgaagccctgtgcctccagggacttcagcaggtgggtgtagagcgtggagcccagtcccgtccgctggtggcggggggagacgtacacggtcgactcggccgtccagtcgtaggcgttgcgtgccttccaggggcccgcgtaggcgatgccggcgacctcgccgtccacctcggcgacgagccagggatagcgctcccgcagacggacgaggtcgtccgtccactcctgcggttcctgcggctcggtacggaagttgaccgtgcttgtctcgatgtagtggttgacgatggtgcagaccgccggcatgtccgcctcggtggcacggcggatgtcggccgggcgtcgttctgggctcatggtagactcgacggatccacgtgtggaagatatgaatttttttgagaaactagataagattaatgaatatcggtgttttggttttttcttgtggccgtctttgtttatattgagatttttcaaatcagtgcgcaagacgtgacgtaagtatccgagtcagtttttatttttctactaatttggtcgaagctttgggcggatcctctagattcgacggtatcgataagctcgcggatccctgaaagcgacgttggatgttaacatctacaaattgccttttcttatcgaccatgtacgtaagcgcttacgtttttggtggacccttgaggaaactggtagctgttgtgggcctgtggtctcaagatggatcattaatttccaccttcacctacgatggggggcatcgcaccggtgagtaatattgtacggctaagagcgaatttggcctgtaggatccctgaaagcgacgttggatgttaacatctacaaattgccttttcttatcgaccatgtacgtaagcgcttacgtttttggtggacccttgaggaaactggtagctgttgtgggcctgtggtctcaagatggatcattaatttccaccttcacctacgatggggggcatcgcaccggtgagtaatattgtacggctaagagcgaatttggcctgtaggatccctgaaagcgacgttggatgttaacatctacaaattgccttttcttatcgaccatgtacgtaagcgcttacgtttttggtggacccttgaggaaactggtagctgttgtgggcctgtggtctcaagatggatcattaatttccaccttcacctacgatggggggcatcgcaccggtgagtaatattgtacggctaagagcgaatttggcctgtaggatccgcgagctggtcaatcccattgcttttgaagcagctcaacattgatctctttctcgatcgagggagatttttcaaatcagtgcgcaagacgtgacgtaagtatccgagtcagtttttatttttctactaatttggtcgtttatttcggcgtgtaggacatggcaaccgggcctgaatttcgcgggtattctgtttctattccaactttttcttgatccgcagccattaacgacttttgaatagatacgctgacacgccaagcctcgctagtcaaaagtgtaccaaacaacgctttacagcaagaacggaatgcgcgtgacgctcgcggtgacgccatttcgccttttcagaaatggataaatagccttgcttcctattatatcttcccaaattaccaatacattacactagcatctgaatttcataaccaatctcgatacaccaaatcgaagatctcccgggttgctcttccatggcaatgattaattaacgaagagcaagagctcgaatttccccgatcgttcaaacatttggcaataaagtttcttaagattgaatcctgttgccggtcttgcgatgattatcatataatttctgttgaattacgttaagcatgtaataattaacatgtaatgcatgacgttatttatgagatgggtttttatgattagagtcccgcaattatacatttaatacgcgatagaaaacaaaatatagcgcgcaaactaggataaattatcgcgcgcggtgtcatctatgttactagatcgggaattggcatgcaagcttggcactggccgtcgttttacaacgtcgtgactgggaaaaccctggcgttacccaacttaatcgccttgcagcacatccccctttcgccagctggcgtaatagcgaagaggcccgcaccgatcgcccttcccaacagttgcgcagcctgaatggcgaatgctagagcagcttgagcttggatcagattgtcgtttcccgccttcagtttaaactatcagtgtttgacaggatatattggcgggtaaacctaagagaaaagagcgtttattagaataatcggatatttaaaagggcgtgaaaaggtttatccgttcgtccatttgtatgtgcatgccaaccacagggttcccctcgggatcaaagtactttgatccaacccctccgctgctatagtgcagtcggcttctgacgttcagtgcagccgtcttctgaaaacgacatgtcgcacaagtcctaagttacgcgacaggctgccgccctgcccttttcctggcgttttcttgtcgcgtgttttagtcgcataaagtagaatacttgcgactagaaccggagacattacgccatgaacaagagcgccgccgctggcctgctgggctatgcccgcgtcagcaccgacgaccaggacttgaccaaccaacgggccgaactgcacgcggccggctgcaccaagctgttttccgagaagatcaccggcaccaggcgcgaccgcccggagctggccaggatgcttgaccacctacgccctggcgacgttgtgacagtgaccaggctagaccgcctggcccgcagcacccgcgacctactggacattgccgagcgcatccaggaggccggcgcgggcctgcgtagcctggcagagccgtgggccgacaccaccacgccggccggccgcatggtgttgaccgtgttcgccggcattgccgagttcgagcgttccctaatcatcgaccgcacccggagcgggcgcgaggccgccaaggcccgaggcgtgaagtttggcccccgccctaccctcaccccggcacagatcgcgcacgcccgcgagctgatcgaccaggaaggccgcaccgtgaaagaggcggctgcactgcttggcgtgcatcgctcgaccctgtaccgcgcacttgagcgcagcgaggaagtgacgcccaccgaggccaggcggcgcggtgccttccgtgaggacgcattgaccgaggccgacgccctggcggccgccgagaatgaacgccaagaggaacaagcatgaaaccgcaccaggacggccaggacgaaccgtttttcattaccgaagagatcgaggcggagatgatcgcggccgggtacgtgttcgagccgcccgcgcacgtctcaaccgtgcggctgcatgaaatcctggccggtttgtctgatgccaagctggcggcctggccggccagcttggccgctgaagaaaccgagcgccgccgtctaaaaaggtgatgtgtatttgagtaaaacagcttgcgtcatgcggtcgctgcgtatatgatgcgatgagtaaataaacaaatacgcaaggggaacgcatgaaggttatcgctgtacttaaccagaaaggcgggtcaggcaagacgaccatcgcaacccatctagcccgcgccctgcaactcgccggggccgatgttctgttagtcgattccgatccccagggcagtgcccgcgattgggcggccgtgcgggaagatcaaccgctaaccgttgtcggcatcgaccgcccgacgattgaccgcgacgtgaaggccatcggccggcgcgacttcgtagtgatcgacggagcgccccaggcggcggacttggctgtgtccgcgatcaaggcagccgacttcgtgctgattccggtgcagccaagcccttacgacatatgggccaccgccgacctggtggagctggttaagcagcgcattgaggtcacggatggaaggctacaagcggcctttgtcgtgtcgcgggcgatcaaaggcacgcgcatcggcggtgaggttgccgaggcgctggccgggtacgagctgcccattcttgagtcccgtatcacgcagcgcgtgagctacccaggcactgccgccgccggcacaaccgttcttgaatcagaacccgagggcgacgctgcccgcgaggtccaggcgctggccgctgaaattaaatcaaaactcatttgagttaatgaggtaaagagaaaatgagcaaaagcacaaacacgctaagtgccggccgtccgagcgcacgcagcagcaaggctgcaacgttggccagcctggcagacacgccagccatgaagcgggtcaactttcagttgccggcggaggatcacaccaagctgaagatgtacgcggtacgccaaggcaagaccattaccgagctgctatctgaatacatcgcgcagctaccagagtaaatgagcaaatgaataaatgagtagatgaattttagcggctaaaggaggcggcatggaaaatcaagaacaaccaggcaccgacgccgtggaatgccccatgtgtggaggaacgggcggttggccaggcgtaagcggctgggttgcctgccggccctgcaatggcactggaacccccaagcccgaggaatcggcgtgagcggtcgcaaaccatccggcccggtacaaatcggcgcggcgctgggtgatgacctggtggagaagttgaaggccgcgcaggccgcccagcggcaacgcatcgaggcagaagcacgccccggtgaatcgtggcaagcggccgctgatcgaatccgcaaagaatcccggcaaccgccggcagccggtgcgccgtcgattaggaagccgcccaagggcgacgagcaaccagattttttcgttccgatgctctatgacgtgggcacccgcgatagtcgcagcatcatggacgtggccgttttccgtctgtcgaagcgtgaccgacgagctggcgaggtgatccgctacgagcttccagacgggcacgtagaggtttccgcagggccggccggcatggccagtgtgtgggattacgacctggtactgatggcggtttcccatctaaccgaatccatgaaccgataccgggaagggaagggagacaagcccggccgcgtgttccgtccacacgttgcggacgtactcaagttctgccggcgagccgatggcggaaagcagaaagacgacctggtagaaacctgcattcggttaaacaccacgcacgttgccatgcagcgtacgaagaaggccaagaacggccgcctggtgacggtatccgagggtgaagccttgattagccgctacaagatcgtaaagagcgaaaccgggcggccggagtacatcgagatcgagctagctgattggatgtaccgcgagatcacagaaggcaagaacccggacgtgctgacggttcaccccgattactttttgatcgatcccggcatcggccgttttctctaccgcctggcacgccgcgccgcaggcaaggcagaagccagatggttgttcaagacgatctacgaacgcagtggcagcgccggagagttcaagaagttctgtttcaccgtgcgcaagctgatcgggtcaaatgacctgccggagtacgatttgaaggaggaggcggggcaggctggcccgatcctagtcatgcgctaccgcaacctgatcgagggcgaagcatccgccggttcctaatgtacggagcagatgctagggcaaattgccctagcaggggaaaaaggtcgaaaaggtctctttcctgtggatagcacgtacattgggaacccaaagccgtacattgggaaccggaacccgtacattgggaacccaaagccgtacattgggaaccggtcacacatgtaagtgactgatataaaagagaaaaaaggcgatttttccgcctaaaactctttaaaacttattaaaactcttaaaacccgcctggcctgtgcataactgtctggccagcgcacagccgaagagctgcaaaaagcgcctacccttcggtcgctgcgctccctacgccccgccgcttcgcgtcggcctatcgcggccgctggccgctcaaaaatggctggcctacggccaggcaatctaccagggcgcggacaagccgcgccgtcgccactcgaccgccggcgcccacatcaaggcaccctgcctcgcgcgtttcggtgatgacggtgaaaacctctgacacatgcagctcccggagacggtcacagcttgtctgtaagcggatgccgggagcagacaagcccgtcagggcgcgtcagcgggtgttggcgggtgtcggggcgcagccatgacccagtcacgtagcgatagcggagtgtatactggcttaactatgcggcatcagagcagattgtactgagagtgcaccatatgcggtgtgaaataccgcacagatgcgtaaggagaaaataccgcatcaggcgctcttccgcttcctcgctcactgactcgctgcgctcggtcgttcggctgcggcgagcggtatcagctcactcaaaggcggtaatacggttatccacagaatcaggggataacgcaggaaagaacatgtgagcaaaaggccagcaaaaggccaggaaccgtaaaaaggccgcgttgctggcgtttttccataggctccgcccccctgacgagcatcacaaaaatcgacgctcaagtcagaggtggcgaaacccgacaggactataaagataccaggcgtttccccctggaagctccctcgtgcgctctcctgttccgaccctgccgcttaccggatacctgtccgcctttctcccttcgggaagcgtggcgctttctcatagctcacgctgtaggtatctcagttcggtgtaggtcgttcgctccaagctgggctgtgtgcacgaaccccccgttcagcccgaccgctgcgccttatccggtaactatcgtcttgagtccaacccggtaagacacgacttatcgccactggcagcagccactggtaacaggattagcagagcgaggtatgtaggcggtgctacagagttcttgaagtggtggcctaactacggctacactagaaggacagtatttggtatctgcgctctgctgaagccagttaccttcggaaaaagagttggtagctcttgatccggcaaacaaaccaccgctggtagcggtggtttttttgtttgcaagcagcagattacgcgcagaaaaaaaggatctcaagaagatcctttgatcttttctacggggtctgacgctcagtggaacgaaaactcacgttaagggattttggtcatgcattctaggtactaaaacaattcatccagtaaaatataatattttattttctcccaatcaggcttgatccccagtaagtcaaaaaatagctcgacatactgttcttccccgatatcctccctgatcgaccggacgcagaaggcaatgtcataccacttgtccgccctgccgcttctcccaagatcaataaagccacttactttgccatctttcacaaagatgttgctgtctcccaggtcgccgtgggaaaagacaagttcctcttcgggcttttccgtctttaaaaaatcatacagctcgcgcggatctttaaatggagtgtcttcttcccagttttcgcaatccacatcggccagatcgttattcagtaagtaatccaattcggctaagcggctgtctaagctattcgtatagggacaatccgatatgtcgatggagtgaaagagcctgatgcactccgcatacagctcgataatcttttcagggctttgttcatcttcatactcttccgagcaaaggacgccatcggcctcactcatgagcagattgctccagccatcatgccgttcaaagtgcaggacctttggaacaggcagctttccttccagccatagcatcatgtccttttcccgttccacatcataggtggtccctttataccggctgtccgtcatttttaaatataggttttcattttctcccaccagcttatataccttagcaggagacattccttccgtatcttttacgcagcggtatttttcgatcagttttttcaattccggtgatattctcattttagccatttattatttccttcctcttttctacagtatttaaagataccccaagaagctaattataacaagacgaactccaattcactgttccttgcattctaaaaccttaaataccagaaaacagctttttcaaagttgttttcaaagttggcgtataacatagtatcgacggagccgattttgaaaccgcggtgatcacaggcagcaacgctctgtcatcgttacaatcaacatgctaccctccgcgagatcatccgtgtttcaaacccggcagcttagttgccgttcttccgaatagcatcggtaacatgagcaaagtctgccgccttacaacggctctcccgctgacgccgtcccggactgatgggctgcctgtatcgagtggtgattttgtgccgagctgccggtcggggagctgttggctggctggtggcaggatatattgtggtgtaaacaaattgacgcttagacaacttaataacacattgcggacgtttttaatgtactgaattaacgccgaatta

SEQ ID NO: 16 - DNA, 9466 bp, Artificial
  plasmid VC-MME432-1qcz
  5'UTR (2125)..(2289)
  transit_peptide (2290)..(2397)
  CDS (2290)..(2397)
  transit_peptide (2475)..(2543)
  CDS (2475)..(2543)
  CDS (2544)..(2552): adapter
gctttgggcggatcctctagaggacaatcagtaaattgaacggagaatattattcataaaaatacgatagtaacgggtgatatattcattagaatgaaccgaaaccggcggtaaggatctgagctacacatgctcaggttttttacaacgtgcacaacagaattgaaagcaaatatcatgcgatcataggcgtctcgcatatctcattaaagcagggcatgccggtcgagtcaaatctcggtgacgggcaggaccggacggggcggtaccggcaggctgaagtccagctgccagaaacccacgtcatgccagttcccgtgcttgaagccggccgcccgcagcatgccgcggggggcatatccgagcgcctcgtgcatgcgcacgctcgggtcgttgggcagcccgatgacagcgaccacgctcttgaagccctgtgcctccagggacttcagcaggtgggtgtagagcgtggagcccagtcccgtccgctggtggcggggggagacgtacacggtcgactcggccgtccagtcgtaggcgttgcgtgccttccaggggcccgcgtaggcgatgccggcgacctcgccgtccacctcggcgacgagccagggatagcgctcccgcagacggacgaggtcgtccgtccactcctgcggttcctgcggctcggtacggaagttgaccgtgcttgtctcgatgtagtggttgacgatggtgcagaccgccggcatgtccgcctcggtggcacggcggatgtcggccgggcgtcgttctgggctcatggtagactcgacggatccacgtgtggaagatatgaatttttttgagaaactagataagattaatgaatatcggtgttttggttttttcttgtggccgtctttgtttatattgagatttttcaaatcagtgcgcaagacgtgacgtaagtatccgagtcagtttttatttttctactaatttggtcgaatctagattcgacggtatcgataagctcgcggatccctgaaagcgacgttggatgttaacatctacaaattgccttttcttatcgaccatgtacgtaagcgcttacgtttttggtggacccttgaggaaactggtagctgttgtgggcctgtggtctcaagatggatcattaatttccaccttcacctacgatggggggcatcgcaccggtgagtaatattgtacggctaagagcgaatttggcctgtaggatccctgaaagcgacgttggatgttaacatctacaaattgccttttcttatcgaccatgtacgtaagcgcttacgtttttggtggacccttgaggaaactggtagctgttgtgggcctgtggtctcaagatggatcattaatttccaccttcacctacgatggggggcatcgcaccggtgagtaatattgtacggctaagagcgaatttggcctgtaggatccctgaaagcgacgttggatgttaacatctacaaattgccttttcttatcgaccatgtacgtaagcgcttacgtttttggtggacccttgaggaaactggtagctgttgtgggcctgtggtctcaagatggatcattaatttccaccttcacctacgatggggggcatcgcaccggtgagtaatattgtacggctaagagcgaatttggcctgtaggatccgcgagctggtcaatcccattgcttttgaagcagctcaacattgatctctttctcgatcgagggagatttttcaaatcagtgcgcaagacgtgacgtaagtatccgagtcagtttttatttttctactaatttggtcgtttatttcggcgtgtaggacatggcaaccgggcctgaatttcgcgggtattctgtttctattccaactttttcttgatccgcagccattaacgacttttgaatagatacgctgacacgccaagcctcgctagtcaaaagtgtaccaaacaacgctttacagcaagaacggaatgcgcgtgacgctcgcggtgacgccatttcgccttttcagaaatggataaatagccttgcttcctattatatcttcccaaattaccaatacattacactagcatctgaatttcataaccaatctcgatacaccaaatcgaagatctcccaaacgcataaacttatcttcatagttgccactccaatttgctccttgaatctcctccacccaatacataatccactcctccatcacccacttcactactaaatcaaacttaactctgtttttctctctcctcctttcatttcttattcttccaatcatcgtactccgccatgaccaccgctgtcaccgccgctgtttctttcccctctaccaaaaccacctctctctccgcccgaagctcctccgtcatttcccctgacaaaatcagctacaaaaaggtgattcccaatttcactgtgttttttattaataatttgttattttgatgatgagatgattaatttgggtgctgcaggttcctttgtactacaggaatgtatctgcaactgggaaaatgggacccatcagggcccagatcgcctcttgctcttccatggcaatgattaattaacgaagagcaagagctcgaatttccccgatcgttcaaacatttggcaataaagtttcttaagattgaatcctgttgccggtcttgcgatgattatcatataatttctgttgaattacgttaagcatgtaataattaacatgtaatgcatgacgttatttatgagatgggtttttatgattagagtcccgcaattatacatttaatacgcgatagaaaacaaaatatagcgcgcaaactaggataaattatcgcgcgcggtgtcatctatgttactagatcgggaattggcatgcaagcttggcactggccgtcgttttacaacgtcgtgactgggaaaaccctggcgttacccaacttaatcgccttgcagcacatccccctttcgccagctggcgtaatagcgaagaggcccgcaccgatcgcccttcccaacagttgcgcagcctgaatggcgaatgctagagcagcttgagcttggatcagattgtcgtttcccgccttcagtttaaactatcagtgtttgacaggatatattggcgggtaaacctaagagaaaagagcgtttattagaataatcggatatttaaaagggcgtgaaaaggtttatccgttcgtccatttgtatgtgcatgccaaccacagggttcccctcgggatcaaagtactttgatccaacccctccgctgctatagtgcagtcggcttctgacgttcagtgcagccgtcttctgaaaacgacatgtcgcacaagtcctaagttacgcgacaggctgccgccctgcccttttcctggcgttttcttgtcgcgtgttttagtcgcataaagtagaatacttgcgactagaaccggagacattacgccatgaacaagagcgccgccgctggcctgctgggctatgcccgcgtcagcaccgacgaccaggacttgaccaaccaacgggccgaactgcacgcggccggctgcaccaagctgttttccgagaagatcaccggcaccaggcgcgaccgcccggagctggccaggatgcttgaccacctacgccctggcgacgttgtgacagtgaccaggctagaccgcctggcccgcagcacccgcgacctactggacattgccgagcgcatccaggaggccggcgcgggcctgcgtagcctggcagagccgtgggccgacaccaccacgccggccggccgcatggtgttgaccgtgttcgccggcattgccgagttcgagcgttccctaatcatcgaccgcacccggagcgggcgcgaggccgccaaggcccgaggcgtgaagtttggcccccgccctaccctcaccccggcacagatcgcgcacgcccgcgagctgatcgaccaggaaggccgcaccgtgaaagaggcggctgcactgcttggcgtgcatcgctcgaccctgtaccgcgcacttgagcgcagcgaggaagtgacgcccaccgaggccaggcggcgcggtgccttccgtgaggacgcattgaccgaggccgacgccctggcggccgccgagaatgaacgccaagaggaacaagcatgaaaccgcaccaggacggccaggacgaaccgtttttcattaccgaagagatcgaggcggagatgatcgcggccgggtacgtgttcgagccgcccgcgcacgtctcaaccgtgcggctgcatgaaatcctggccggtttgtctgatgccaagctggcggcctggccggccagcttggccgctgaagaaaccgagcgccgccgtctaaaaaggtgatgtgtatttgagtaaaacagcttgcgtcatgcggtcgctgcgtatatgatgcgatgagtaaataaacaaatacgcaaggggaacgcatgaaggttatcgctgtacttaaccagaaaggcgggtcaggcaagacgaccatcgcaacccatctagcccgcgccctgcaactcgccggggccgatgttctgttagtcgattccgatccccagggcagtgcccgcgattgggcggccgtgcgggaagatcaaccgctaaccgttgtcggcatcgaccgcccgacgattgaccgcgacgtgaaggccatcggccggcgcgacttcgtagtgatcgacggagcgccccaggcggcggacttggctgtgtccgcgatcaaggcagccgacttcgtgctgattccggtgcagccaagcccttacgacatatgggccaccgccgacctggtggagctggttaagcagcgcattgaggtcacggatggaaggctacaagcggcctttgtcgtgtcgcgggcgatcaaaggcacgcgcatcggcggtgaggttgccgaggcgctggccgggtacgagctgcccattcttgagtcccgtatcacgcagcgcgtgagctacccaggcactgccgccgccggcacaaccgttcttgaatcagaacccgagggcgacgctgcccgcgaggtccaggcgctggccgctgaaattaaatcaaaactcatttgagttaatgaggtaaagagaaaatgagcaaaagcacaaacacgctaagtgccggccgtccgagcgcacgcagcagcaaggctgcaacgttggccagcctggcagacacgccagccatgaagcgggtcaactttcagttgccggcggaggatcacaccaagctgaagatgtacgcggtacgccaaggcaagaccattaccgagctgctatctgaatacatcgcgcagctaccagagtaaatgagcaaatgaataaatgagtagatgaattttagcggctaaaggaggcggcatggaaaatcaagaacaaccaggcaccgacgccgtggaatgccccatgtgtggaggaacgggcggttggccaggcgtaagcggctgggttgcctgccggccctgcaatggcactggaacccccaagcccgaggaatcggcgtgagcggtcgcaaaccatccggcccggtacaaatcggcgcggcgctgggtgatgacctggtggagaagttgaaggccgcgcaggccgcccagcggcaacgcatcgaggcagaagcacgccccggtgaatcgtggcaagcggccgctgatcgaatccgcaaagaatcccggcaaccgccggcagccggtgcgccgtcgattaggaagccgcccaagggcgacgagcaaccagattttttcgttccgatgctctatgacgtgggcacccgcgatagtcgcagcatcatggacgtggccgttttccgtctgtcgaagcgtgaccgacgagctggcgaggtgatccgctacgagcttccagacgggcacgtagaggtttccgcagggccggccggcatggccagtgtgtgggattacgacctggtactgatggcggtttcccatctaaccgaatccatgaaccgataccgggaagggaagggagacaagcccggccgcgtgttccgtccacacgttgcggacgtactcaagttctgccggcgagccgatggcggaaagcagaaagacgacctggtagaaacctgcattcggttaaacaccacgcacgttgccatgcagcgtacgaagaaggccaagaacggccgcctggtgacggtatccgagggtgaagccttgattagccgctacaagatcgtaaagagcgaaaccgggcggccggagtacatcgagatcgagctagctgattggatgtaccgcgagatcacagaaggcaagaacccggacgtgctgacggttcaccccgattactttttgatcgatcccggcatcggccgttttctctaccgcctggcacgccgcgccgcaggcaaggcagaagccagatggttgttcaagacgatctacgaacgcagtggcagcgccggagagttcaagaagttctgtttcaccgtgcgcaagctgatcgggtcaaatgacctgccggagtacgatttgaaggaggaggcggggcaggctggcccgatcctagtcatgcgctaccgcaacctgatcgagggcgaagcatccgccggttcctaatgtacggagcagatgctagggcaaattgccctagcaggggaaaaaggtcgaaaaggtctctttcctgtggatagcacgtacattgggaacccaaagccgtacattgggaaccggaacccgtacattgggaacccaaagccgtacattgggaaccggtcacacatgtaagtgactgatataaaagagaaaaaaggcgatttttccgcctaaaactctttaaaacttattaaaactcttaaaacccgcctggcctgtgcataactgtctggccagcgcacagccgaagagctgcaaaaagcgcctacccttcggtcgctgcgctccctacgccccgccgcttcgcgtcggcctatcgcggccgctggccgctcaaaaatggctggcctacggccaggcaatctaccagggcgcggacaagccgcgccgtcgccactcgaccgccggcgcccacatcaaggcaccctgcctcgcgcgtttcggtgatgacggtgaaaacctctgacacatgcagctcccggagacggtcacagcttgtctgtaagcggatgccgggagcagacaagcccgtcagggcgcgtcagcgggtgttggcgggtgtcggggcgcagccatgacccagtcacgtagcgatagcggagtgtatactggcttaactatgcggcatcagagcagattgtactgagagtgcaccatatgcggtgtgaaataccgcacagatgcgtaaggagaaaataccgcatcaggcgctcttccgcttcctcgctcactgactcgctgcgctcggtcgttcggctgcggcgagcggtatcagctcactcaaaggcggtaatacggttatccacagaatcaggggataacgcaggaaagaacatgtgagcaaaaggccagcaaaaggccaggaaccgtaaaaaggccgcgttgctggcgtttttccataggctccgcccccctgacgagcatcacaaaaatcgacgctcaagtcagaggtggcgaaacccgacaggactataaagataccaggcgtttccccctggaagctccctcgtgcgctctcctgttccgaccctgccgcttaccggatacctgtccgcctttctcccttcgggaagcgtggcgctttctcatagctcacgctgtaggtatctcagttcggtgtaggtcgttcgctccaagctgggctgtgtgcacgaaccccccgttcagcccgaccgctgcgccttatccggtaactatcgtcttgagtccaacccggtaagacacgacttatcgccactggcagcagccactggtaacaggattagcagagcgaggtatgtaggcggtgctacagagttcttgaagtggtggcctaactacggctacactagaaggacagtatttggtatctgcgctctgctgaagccagttaccttcggaaaaagagttggtagctcttgatccggcaaacaaaccaccgctggtagcggtggtttttttgtttgcaagcagcagattacgcgcagaaaaaaaggatctcaagaagatcctttgatcttttctacggggtctgacgctcagtggaacgaaaactcacgttaagggattttggtcatgcattctaggtactaaaacaattcatccagtaaaatataatattttattttctcccaatcaggcttgatccccagtaagtcaaaaaatagctcgacatactgttcttccccgatatcctccctgatcgaccggacgcagaaggcaatgtcataccacttgtccgccctgccgcttctcccaagatcaataaagccacttactttgccatctttcacaaagatgttgctgtctcccaggtcgccgtgggaaaagacaagttcctcttcgggcttttccgtctttaaaaaatcatacagctcgcgcggatctttaaatggagtgtcttcttcccagttttcgcaatccacatcggccagatcgttattcagtaagtaatccaattcggctaagcggctgtctaagctattcgtatagggacaatccgatatgtcgatggagtgaaagagcctgatgcactccgcatacagctcgataatcttttcagggctttgttcatcttcatactcttccgagcaaaggacgccatcggcctcactcatgagcagattgctccagccatcatgccgttcaaagtgcaggacctttggaacaggcagctttccttccagccatagcatcatgtccttttcccgttccacatcataggtggtccctttataccggctgtccgtcatttttaaatataggttttcattttctcccaccagcttatataccttagcaggagacattccttccgtatcttttacgcagcggtatttttcgatcagttttttcaattccggtgatattctcattttagccatttattatttccttcctcttttctacagtatttaaagataccccaagaagctaattataacaagacgaactccaattcactgttccttgcattctaaaaccttaaataccagaaaacagctttttcaaagttgttttcaaagttggcgtataacatagtatcgacggagccgattttgaaaccgcggtgatcacaggcagcaacgctctgtcatcgttacaatcaacatgctaccctccgcgagatcatccgtgtttcaaacccggcagcttagttgccgttcttccgaatagcatcggtaacatgagcaaagtctgccgccttacaacggctctcccgctgacgccgtcccggactgatgggctgcctgtatcgagtggtgattttgtgccgagctgccggtcggggagctgttggctggctggtggcaggatatattgtggtgtaaacaaattgacgcttagacaacttaataacacattgcggacgtttttaatgtactgaattaacgccgaattaa

SEQ ID NO: 17 - protein, 62 aa, Artificial
  Synthetic Construct
MTTAVTAAVSFPSTKTTSLSARSSSVISPDKISYKKVPLYYRNVSATGKMGPIRAQIASCSS

SEQ ID NO: 18 - DNA, 8885 bp, Artificial
  plasmid VC-MME221-1qcz
agcttggacaatcagtaaattgaacggagaatattattcataaaaatacgatagtaacgggtgatatattcattagaatgaaccgaaaccggcggtaaggatctgagctacacatgctcaggttttttacaacgtgcacaacagaattgaaagcaaatatcatgcgatcataggcgtctcgcatatctcattaaagcagggcatgccggtcgagtcaaatctcggtgacgggcaggaccggacggggcggtaccggcaggctgaagtccagctgccagaaacccacgtcatgccagttcccgtgcttgaagccggccgcccgcagcatgccgcggggggcatatccgagcgcctcgtgcatgcgcacgctcgggtcgttgggcagcccgatgacagcgaccacgctcttgaagccctgtgcctccagggacttcagcaggtgggtgtagagcgtggagcccagtcccgtccgctggtggcggggggagacgtacacggtcgactcggccgtccagtcgtaggcgttgcgtgccttccaggggcccgcgtaggcgatgccggcgacctcgccgtccacctcggcgacgagccagggatagcgctcccgcagacggacgaggtcgtccgtccactcctgcggttcctgcggctcggtacggaagttgaccgtgcttgtctcgatgtagtggttgacgatggtgcagaccgccggcatgtccgcctcggtggcacggcggatgtcggccgggcgtcgttctgggctcatggtagactcgacggatccacgtgtggaagatatgaatttttttgagaaactagataagattaatgaatatcggtgttttggttttttcttgtggccgtctttgtttatattgagatttttcaaatcagtgcgcaagacgtgacgtaagtatccgagtcagtttttatttttctactaatttggtcgaagctttgggcggatcctctagaattcgaatccaaaaattacggatatgaatataggcatatccgtatccgaattatccgtttgacagctagcaacgattgtacaattgcttctttaaaaaaggaagaaagaaagaaagaaaagaatcaacatcagcgttaacaaacggccccgttacggcccaaacggtcatatagagtaacggcgttaagcgttgaaagactcctatcgaaatacgtaaccgcaaacgtgtcatagtcagatcccctcttccttcaccgcctcaaacacaaaaataatcttctacagcctatatatacaacccccccttctatctctcctttctcacaattcatcatctttctttctctacccccaattttaagaaatcctctcttctcctcttcattttcaaggtaaatctctctctctctctctctctctgttattccttgttttaattaggtatgtattattgctagtttgttaatctgcttatcttatgtatgccttatgtgaatatctttatcttgttcatctcatccgtttagaagctataaatttgttgatttgactgtgtatctacacgtggttatgtttatatctaatcagatatgaatttcttcatattgttgcgtttgtgtgtaccaatccgaaatcgttgatttttttcatttaatcgtgtagctaattgtacgtatacatatggatctacgtatcaattgttcatctgtttgtgtttgtatgtatacagatctgaaaacatcacttctctcatctgattgtgttgttacatacatagatatagatctgttatatcattttttttattaattgtgtatatatatatgtgcatagatctggattacatgattgtgattatttacatgattttgttatttacgtatgtatatatgtagatctggactttttggagttgttgacttgattgtatttgtgtgtgtatatgtgtgttctgatcttgatatgttatgtatgtgcagcccgggttgctcttccatggcaatgattaattaacgaagagcaagagctcgaatttccccgatcgttcaaacatttggcaataaagtttcttaagattgaatcctgttgccggtcttgcgatgattatcatataatttctgttgaattacgttaagcatgtaataattaacatgtaatgcatgacgttatttatgagatgggtttttatgattagagtcccgcaattatacatttaatacgcgatagaaaacaaaatatagcgcgcaaactaggataaattatcgcgcgcggtgtcatctatgttactagatcgggaattggcatgcaagcttggcactggccgtcgttttacaacgtcgtgactgggaaaaccctggcgttacccaacttaatcgccttgcagcacatccccctttcgccagctggcgtaatagcgaagaggcccgcaccgatcgcccttcccaacagttgcgcagcctgaatggcgaatgctagagcagcttgagcttggatcagattgtcgtttcccgccttcagtttaaactatcagtgtttgacaggatatattggcgggtaaacctaagagaaaagagcgtttattagaataatcggatatttaaaagggcgtgaaaaggtttatccgttcgtccatttgtatgtgcatgccaaccacagggttcccctcgggatcaaagtactttgatccaacccctccgctgctatagtgcagtcggcttctgacgttcagtgcagccgtcttctgaaaacgacatgtcgcacaagtcctaagttacgcgacaggctgccgccctgcccttttcctggcgttttcttgtcgcgtgttttagtcgcataaagtagaatacttgcgactagaaccggagacattacgccatgaacaagagcgccgccgctggcctgctgggctatgcccgcgtcagcaccgacgaccaggacttgaccaaccaacgggccgaactgcacgcggccggctgcaccaagctgttttccgagaagatcaccggcaccaggcgcgaccgcccggagctggccaggatgcttgaccacctacgccctggcgacgttgtgacagtgaccaggctagaccgcctggcccgcagcacccgcgacctactggacattgccgagcgcatccaggaggccggcgcgggcctgcgtagcctggcagagccgtgggccgacaccaccacgccggccggccgcatggtgttgaccgtgttcgccggcattgccgagttcgagcgttccctaatcatcgaccgcacccggagcgggcgcgaggccgccaaggcccgaggcgtgaagtttggcccccgccctaccctcaccccggcacagatcgcgcacgcccgcgagctgatcgaccaggaaggccgcaccgtgaaagaggcggctgcactgcttggcgtgcatcgctcgaccctgtaccgcgcacttgagcgcagcgaggaagtgacgcccaccgaggccaggcggcgcggtgccttccgtgaggacgcattgaccgaggccgacgccctggcggccgccgagaatgaacgccaagaggaacaagcatgaaaccgcaccaggacggccaggacgaaccgtttttcattaccgaagagatcgaggcggagatgatcgcggccgggtacgtgttcgagccgcccgcgcacgtctcaaccgtgcggctgcatgaaatcctggccggtttgtctgatgccaagctggcggcctggccggccagcttggccgctgaagaaaccgagcgccgccgtctaaaaaggtgatgtgtatttgagtaaaacagcttgcgtcatgcggtcgctgcgtatatgatgcgatgagtaaataaacaaatacgcaaggggaacgcatgaaggttatcgctgtacttaaccagaaaggcgggtcaggcaagacgaccatcgcaacccatctagcccgcgccctgcaactcgccggggccgatgttctgttagtcgattccgatccccagggcagtgcccgcgattgggcggccgtgcgggaagatcaaccgctaaccgttgtcggcatcgaccgcccgacgattgaccgcgacgtgaaggccatcggccggcgcgacttcgtagtgatcgacggagcgccccaggcggcggacttggctgtgtccgcgatcaaggcagccgacttcgtgctgattccggtgcagccaagcccttacgacatatgggccaccgccgacctggtggagctggttaagcagcgcattgaggtcacggatggaaggctacaagcggcctttgtcgtgtcgcgggcgatcaaaggcacgcgcatcggcggtgaggttgccgaggcgctggccgggtacgagctgcccattcttgagtcccgtatcacgcagcgcgtgagctacccaggcactgccgccgccggcacaaccgttcttgaatcagaacccgagggcgacgctgcccgcgaggtccaggcgctggccgctgaaattaaatcaaaactcatttgagttaatgaggtaaagagaaaatgagcaaaagcacaaacacgctaagtgccggccgtccgagcgcacgcagcagcaaggctgcaacgttggccagcctggcagacacgccagccatgaagcgggtcaactttcagttgccggcggaggatcacaccaagctgaagatgtacgcggtacgccaaggcaagaccattaccgagctgctatctgaatacatcgcgcagctaccagagtaaatgagcaaatgaataaatgagtagatgaattttagcggctaaaggaggcggcatggaaaatcaagaacaaccaggcaccgacgccgtggaatgccccatgtgtggaggaacgggcggttggccaggcgtaagcggctgggttgcctgccggccctgcaatggcactggaacccccaagcccgaggaatcggcgtgagcggtcgcaaaccatccggcccggtacaaatcggcgcggcgctgggtgatgacctggtggagaagttgaaggccgcgcaggccgcccagcggcaacgcatcgaggcagaagcacgccccggtgaatcgtggcaagcggccgctgatcgaatccgcaaagaatcccggcaaccgccggcagccggtgcgccgtcgattaggaagccgcccaagggcgacgagcaaccagattttttcgttccgatgctctatgacgtgggcacccgcgatagtcgcagcatcatggacgtggccgttttccgtctgtcgaagcgtgaccgacgagctggcgaggtgatccgctacgagcttccagacgggcacgtagaggtttccgcagggccggccggcatggccagtgtgtgggattacgacctggtactgatggcggtttcccatctaaccgaatccatgaaccgataccgggaagggaagggagacaagcccggccgcgtgttccgtccacacgttgcggacgtactcaagttctgccggcgagccgatggcggaaagcagaaagacgacctggtagaaacctgcattcggttaaacaccacgcacgttgccatgcagcgtacgaagaaggccaagaacggccgcctggtgacggtatccgagggtgaagccttgattagccgctacaagatcgtaaagagcgaaaccgggcggccggagtacatcgagatcgagctagctgattggatgtaccgcgagatcacagaaggcaagaacccggacgtgctgacggttcaccccgattactttttgatcgatcccggcatcggccgttttctctaccgcctggcacgccgcgccgcaggcaaggcagaagccagatggttgttcaagacgatctacgaacgcagtggcagcgccggagagttcaagaagttctgtttcaccgtgcgcaagctgatcgggtcaaatgacctgccggagtacgatttgaaggaggaggcggggcaggctggcccgatcctagtcatgcgctaccgcaacctgatcgagggcgaagcatccgccggttcctaatgtacggagcagatgctagggcaaattgccctagcaggggaaaaaggtcgaaaaggtctctttcctgtggatagcacgtacattgggaacccaaagccgtacattgggaaccggaacccgtacattgggaacccaaagccgtacattgggaaccggtcacacatgtaagtgactgatataaaagagaaaaaaggcgatttttccgcctaaaactctttaaaacttattaaaactcttaaaacccgcctggcctgtgcataactgtctggccagcgcacagccgaagagctgcaaaaagcgcctacccttcggtcgctgcgctccctacgccccgccgcttcgcgtcggcctatcgcggccgctggccgctcaaaaatggctggcctacggccaggcaatctaccagggcgcggacaagccgcgccgtcgccactcgaccgccggcgcccacatcaaggcaccctgcctcgcgcgtttcggtgatgacggtgaaaacctctgacacatgcagctcccggagacggtcacagcttgtctgtaagcggatgccgggagcagacaagcccgtcagggcgcgtcagcgggtgttggcgggtgtcggggcgcagccatgacccagtcacgtagcgatagcggagtgtatactggcttaactatgcggcatcagagcagattgtactgagagtgcaccatatgcggtgtgaaataccgcacagatgcgtaaggagaaaataccgcatcaggcgctcttccgcttcctcgctcactgactcgctgcgctcggtcgttcggctgcggcgagcggtatcagctcactcaaaggcggtaatacggttatccacagaatcaggggataacgcaggaaagaacatgtgagcaaaaggccagcaaaaggccaggaaccgtaaaaaggccgcgttgctggcgtttttccataggctccgcccccctgacgagcatcacaaaaatcgacgctcaagtcagaggtggcgaaacccgacaggactataaagataccaggcgtttccccctggaagctccctcgtgcgctctcctgttccgaccctgccgcttaccggatacctgtccgcctttctcccttcgggaagcgtggcgctttctcatagctcacgctgtaggtatctcagttcggtgtaggtcgttcgctccaagctgggctgtgtgcacgaaccccccgttcagcccgaccgctgcgccttatccggtaactatcgtcttgagtccaacccggtaagacacgacttatcgccactggcagcagccactggtaacaggattagcagagcgaggtatgtaggcggtgctacagagttcttgaagtggtggcctaactacggctacactagaaggacagtatttggtatctgcgctctgctgaagccagttaccttcggaaaaagagttggtagctcttgatccggcaaacaaaccaccgctggtagcggtggtttttttgtttgcaagcagcagattacgcgcagaaaaaaaggatctcaagaagatcctttgatcttttctacggggtctgacgctcagtggaacgaaaactcacgttaagggattttggtcatgcattctaggtactaaaacaattcatccagtaaaatataatattttattttctcccaatcaggcttgatccccagtaagtcaaaaaatagctcgacatactgttcttccccgatatcctccctgatcgaccggacgcagaaggcaatgtcataccacttgtccgccctgccgcttctcccaagatcaataaagccacttactttgccatctttcacaaagatgttgctgtctcccaggtcgccgtgggaaaagacaagttcctcttcgggcttttccgtctttaaaaaatcatacagctcgcgcggatctttaaatggagtgtcttcttcccagttttcgcaatccacatcggccagatcgttattcagtaagtaatccaattcggctaagcggctgtctaagctattcgtatagggacaatccgatatgtcgatggagtgaaagagcctgatgcactccgcatacagctcgataatcttttcagggctttgttcatcttcatactcttccgagcaaaggacgccatcggcctcactcatgagcagattgctccagccatcatgccgttcaaagtgcaggacctttggaacaggcagctttccttccagccatagcatcatgtccttttcccgttccacatcataggtggtccctttataccggctgtccgtcatttttaaatataggttttcattttctcccaccagcttatataccttagcaggagacattccttccgtatcttttacgcagcggtatttttcgatcagttttttcaattccggtgatattctcattttagccatttattatttccttcctcttttctacagtatttaaagataccccaagaagctaattataacaagacgaactccaattcactgttccttgcattctaaaaccttaaataccagaaaacagctttttcaaagttgttttcaaagttggcgtataacatagtatcgacggagccgattttgaaaccgcggtgatcacaggcagcaacgctctgtcatcgttacaatcaacatgctaccctccgcgagatcatccgtgtttcaaacccggcagcttagttgccgttcttccgaatagcatcggtaacatgagcaaagtctgccgccttacaacggctctcccgctgacgccgtcccggactgatgggctgcctgtatcgagtggtgattttgtgccgagctgccggtcggggagctgttggctggctggtggcaggatatattgtggtgtaaacaaattgacgcttagacaacttaataacacattgcggacgtttttaatgtactgaattaacgccgaatta

SEQ ID NO: 19 - DNA, 9303 bp, Artificial
  plasmid pMTX447korr
  5'UTR (1964)..(2128)
  transit_peptide (2129)..(2236)
  CDS (2129)..(2236)
  transit_peptide (2314)..(2382)
  CDS (2314)..(2382)
  CDS (2383)..(2391): adapter
agcttggacaatcagtaaattgaacggagaatattattcataaaaatacgatagtaacgggtgatatattcattagaatgaaccgaaaccggcggtaaggatctgagctacacatgctcaggttttttacaacgtgcacaacagaattgaaagcaaatatcatgcgatcataggcgtctcgcatatctcattaaagcagggcatgccggtcgagtcaaatctcggtgacgggcaggaccggacggggcggtaccggcaggctgaagtccagctgccagaaacccacgtcatgccagttcccgtgcttgaagccggccgcccgcagcatgccgcggggggcatatccgagcgcctcgtgcatgcgcacgctcgggtcgttgggcagcccgatgacagcgaccacgctcttgaagccctgtgcctccagggacttcagcaggtgggtgtagagcgtggagcccagtcccgtccgctggtggcggggggagacgtacacggtcgactcggccgtccagtcgtaggcgttgcgtgccttccaggggcccgcgtaggcgatgccggcgacctcgccgtccacctcggcgacgagccagggatagcgctcccgcagacggacgaggtcgtccgtccactcctgcggttcctgcggctcggtacggaagttgaccgtgcttgtctcgatgtagtggttgacgatggtgcagaccgccggcatgtccgcctcggtggcacggcggatgtcggccgggcgtcgttctgggctcatggtagactcgacggatccacgtgtggaagatatgaatttttttgagaaactagataagattaatgaatatcggtgttttggttttttcttgtggccgtctttgtttatattgagatttttcaaatcagtgcgcaagacgtgacgtaagtatccgagtcagtttttatttttctactaatttggtcgaagctttgggcggatcctctagaattcgaatccaaaaattacggatatgaatataggcatatccgtatccgaattatccgtttgacagctagcaacgattgtacaattgcttctttaaaaaaggaagaaagaaagaaagaaaagaatcaacatcagcgttaacaaacggccccgttacggcccaaacggtcatatagagtaacggcgttaagcgttgaaagactcctatcgaaatacgtaaccgcaaacgtgtcatagtcagatcccctcttccttcaccgcctcaaacacaaaaataatcttctacagcctatatatacaacccccccttctatctctcctttctcacaattcatcatctttctttctctacccccaattttaagaaatcctctcttctcctcttcattttcaaggtaaatctctctctctctctctctctctgttattccttgttttaattaggtatgtattattgctagtttgttaatctgcttatcttatgtatgccttatgtgaatatctttatcttgttcatctcatccgtttagaagctataaatttgttgatttgactgtgtatctacacgtggttatgtttatatctaatcagatatgaatttcttcatattgttgcgtttgtgtgtaccaatccgaaatcgttgatttttttcatttaatcgtgtagctaattgtacgtatacatatggatctacgtatcaattgttcatctgtttgtgtttgtatgtatacagatctgaaaacatcacttctctcatctgattgtgttgttacatacatagatatagatctgttatatcattttttttattaattgtgtatatatatatgtgcatagatctggattacatgattgtgattatttacatgattttgttatttacgtatgtatatatgtagatctggactttttggagttgttgacttgattgtatttgtgtgtgtatatgtgtgttctgatcttgatatgttatgtatgtgcagcccaaacgcataaacttatcttcatagttgccactccaatttgctccttgaatctcctccacccaatacataatccactcctccatcacccacttcactactaaatcaaacttaactctgtttttctctctcctcctttcatttcttattcttccaatcatcgtactccgccatgaccaccgctgtcaccgccgctgtttctttcccctctaccaaaaccacctctctctccgcccgaagctcctccgtcatttcccctgacaaaatcagctacaaaaaggtgattcccaatttcactgtgttttttattaataatttgttattttgatgatgagatgattaatttgggtgctgcaggttcctttgtactacaggaatgtatctgcaactgggaaaatgggacccatcagggcccagatcgcctcttgctcttccatggcaatgattaattaacgaagagcaagagctcgaatttccccgatcgttcaaacatttggcaataaagtttcttaagattgaatcctgttgccggtcttgcgatgattatcatataatttctgttgaattacgttaagcatgtaataattaacatgtaatgcatgacgttatttatgagatgggtttttatgattagagtcccgcaattatacatttaatacgcgatagaaaacaaaatatagcgcgcaaactaggataaattatcgcgcgcggtgtcatctatgttactagatcgggaattggcatgcaagcttggcactggccgtcgttttacaacgtcgtgactgggaaaaccctggcgttacccaacttaatcgccttgcagcacatccccctttcgccagctggcgtaatagcgaagaggcccgcaccgatcgcccttcccaacagttgcgcagcctgaatggcgaatgctagagcagcttgagcttggatcagattgtcgtttcccgccttcagtttaaactatcagtgtttgacaggatatattggcgggtaaacctaagagaaaagagcgtttattagaataatcggatatttaaaagggcgtgaaaaggtttatccgttcgtccatttgtatgtgcatgccaaccacagggttcccctcgggatcaaagtactttgatccaacccctccgctgctatagtgcagtcggcttctgacgttcagtgcagccgtcttctgaaaacgacatgtcgcacaagtcctaagttacgcgacaggctgccgccctgcccttttcctggcgttttcttgtcgcgtgttttagtcgcataaagtagaatacttgcgactagaaccggagacattacgccatgaacaagagcgccgccgctggcctgctgggctatgcccgcgtcagcaccgacgaccaggacttgaccaaccaacgggccgaactgcacgcggccggctgcaccaagctgttttccgagaagatcaccggcaccaggcgcgaccgcccggagctggccaggatgcttgaccacctacgccctggcgacgttgtgacagtgaccaggctagaccgcctggcccgcagcacccgcgacctactggacattgccgagcgcatccaggaggccggcgcgggcctgcgtagcctggcagagccgtgggccgacaccaccacgccggccggccgcatggtgttgaccgtgttcgccggcattgccgagttcgagcgttccctaatcatcgaccgcacccggagcgggcgcgaggccgccaaggcccgaggcgtgaagtttggcccccgccctaccctcaccccggcacagatcgcgcacgcccgcgagctgatcgaccaggaaggccgcaccgtgaaagaggcggctgcactgcttggcgtgcatcgctcgaccctgtaccgcgcacttgagcgcagcgaggaagtgacgcccaccgaggccaggcggcgcggtgccttccgtgaggacgcattgaccgaggccgacgccctggcggccgccgagaatgaacgccaagaggaacaagcatgaaaccgcaccaggacggccaggacgaaccgtttttcattaccgaagagatcgaggcggagatgatcgcggccgggtacgtgttcgagccgcccgcgcacgtctcaaccgtgcggctgcatgaaatcctggccggtttgtctgatgccaagctggcggcctggccggccagcttggccgctgaagaaaccgagcgccgccgtctaaaaaggtgatgtgtatttgagtaaaacagcttgcgtcatgcggtcgctgcgtatatgatgcgatgagtaaataaacaaatacgcaaggggaacgcatgaaggttatcgctgtacttaaccagaaaggcgggtcaggcaagacgaccatcgcaacccatctagcccgcgccctgcaactcgccggggccgatgttctgttagtcgattccgatccccagggcagtgcccgcgattgggcggccgtgcgggaagatcaaccgctaaccgttgtcggcatcgaccgcccgacgattgaccgcgacgtgaaggccatcggccggcgcgacttcgtagtgatcgacggagcgccccaggcggcggacttggctgtgtccgcgatcaaggcagccgacttcgtgctgattccggtgcagccaagcccttacgacatatgggccaccgccgacctggtggagctggttaagcagcgcattgaggtcacggatggaaggctacaagcggcctttgtcgtgtcgcgggcgatcaaaggcacgcgcatcggcggtgaggttgccgaggcgctggccgggtacgagctgcccattcttgagtcccgtatcacgcagcgcgtgagctacccaggcactgccgccgccggcacaaccgttcttgaatcagaacccgagggcgacgctgcccgcgaggtccaggcgctggccgctgaaattaaatcaaaactcatttgagttaatgaggtaaagagaaaatgagcaaaagcacaaacacgctaagtgccggccgtccgagcgcacgcagcagcaaggctgcaacgttggccagcctggcagacacgccagccatgaagcgggtcaactttcagttgccggcggaggatcacaccaagctgaagatgtacgcggtacgccaaggcaagaccattaccgagctgctatctgaatacatcgcgcagctaccagagtaaatgagcaaatgaataaatgagtagatgaattttagcggctaaaggaggcggcatggaaaatcaagaacaaccaggcaccgacgccgtggaatgccccatgtgtggaggaacgggcggttggccaggcgtaagcggctgggttgtctgccggccctgcaatggcactggaacccccaagcccgaggaatcggcgtgacggtcgcaaaccatccggcccggtacaaatcggcgcggcgctgggtgatgacctggtggagaagttgaaggccgcgcaggccgcccagcggcaacgcatcgaggcagaagcacgccccggtgaatcgtggcaagcggccgctgatcgaatccgcaaagaatcccggcaaccgccggcagccggtgcgccgtcgattaggaagccgcccaagggcgacgagcaaccagattttttcgttccgatgctctatgacgtgggcacccgcgatagtcgcagcatcatggacgtggccgttttccgtctgtcgaagcgtgaccgacgagctggcgaggtgatccgctacgagcttccagacgggcacgtagaggtttccgcagggccggccggcatggccagtgtgtgggattacgacctggtactgatggcggtttcccatctaaccgaatccatgaaccgataccgggaagggaagggagacaagcccggccgcgtgttccgtccacacgttgcggacgtactcaagttctgccggcgagccgatggcggaaagcagaaagacgacctggtagaaacctgcattcggttaaacaccacgcacgttgccatgcagcgtacgaagaaggccaagaacggccgcctggtgacggtatccgagggtgaagccttgattagccgctacaagatcgtaaagagcgaaaccgggcggccggagtacatcgagatcgagctagctgattggatgtaccgcgagatcacagaaggcaagaacccggacgtgctgacggttcaccccgattactttttgatcgatcccggcatcggccgttttctctaccgcctggcacgccgcgccgcaggcaaggcagaagccagatggttgttcaagacgatctacgaacgcagtggcagcgccggagagttcaagaagttctgtttcaccgtgcgcaagctgatcgggtcaaatgacctgccggagtacgatttgaaggaggaggcggggcaggctggcccgatcctagtcatgcgctaccgcaacctgatcgagggcgaagcatccgccggttcctaatgtacggagcagatgctagggcaaattgccctagcaggggaaaaaggtcgaaaaggtctctttcctgtggatagcacgtacattgggaacccaaagccgtacattgggaaccggaacccgtacattgggaacccaaagccgtacattgggaaccggtcacacatgtaagtgactgatataaaagagaaaaaaggcgatttttccgcctaaaactctttaaaacttattaaaactcttaaaacccgcctggcctgtgcataactgtctggccagcgcacagccgaagagctgcaaaaagcgcctacccttcggtcgctgcgctccctacgccccgccgcttcgcgtcggcctatcgcggccgctggccgctcaaaaatggctggcctacggccaggcaatctaccagggcgcggacaagccgcgccgtcgccactcgaccgccggcgcccacatcaaggcaccctgcctcgcgcgtttcggtgatgacggtgaaaacctctgacacatgcagctcccggagacggtcacagcttgtctgtaagcggatgccgggagcagacaagcccgtcagggcgcgtcagcgggtgttggcgggtgtcggggcgcagccatgacccagtcacgtagcgatagcggagtgtatactggcttaactatgcggcatcagagcagattgtactgagagtgcaccatatgcggtgtgaaataccgcacagatgcgtaaggagaaaataccgcatcaggcgctcttccgcttcctcgctcactgactcgctgcgctcggtcgttcggctgcggcgagcggtatcagctcactcaaaggcggtaatacggttatccacagaatcaggggataacgcaggaaagaacatgtgagcaaaaggccagcaaaaggccaggaaccgtaaaaaggccgcgttgctggcgtttttccataggctccgcccccctgacgagcatcacaaaaatcgacgctcaagtcagaggtggcgaaacccgacaggactataaagataccaggcgtttccccctggaagctccctcgtgcgctctcctgttccgaccctgccgcttaccggatacctgtccgcctttctcccttcgggaagcgtggcgctttctcatagctcacgctgtaggtatctcagttcggtgtaggtcgttcgctccaagctgggctgtgtgcacgaaccccccgttcagcccgaccgctgcgccttatccggtaactatcgtcttgagtccaacccggtaagacacgacttatcgccactggcagcagccactggtaacaggattagcagagcgaggtatgtaggcggtgctacagagttcttgaagtggtggcctaactacggctacactagaaggacagtatttggtatctgcgctctgctgaagccagttaccttcggaaaaagagttggtagctcttgatccggcaaacaaaccaccgctggtagcggtggtttttttgtttgcaagcagcagattacgcgcagaaaaaaaggatctcaagaagatcctttgatcttttctacggggtctgacgctcagtggaacgaaaactcacgttaagggattttggtcatgcattctaggtactaaaacaattcatccagtaaaatataatattttattttctcccaatcaggcttgatccccagtaagtcaaaaaatagctcgacatactgttcttccccgatatcctccctgatcgaccggacgcagaaggcaatgtcataccacttgtccgccctgccgcttctcccaagatcaataaagccacttactttgccatctttcacaaagatgttgctgtctcccaggtcgccgtgggaaaagacaagttcctcttcgggcttttccgtctttaaaaaatcatacagctcgcgcggatctttaaatggagtgtcttcttcccagttttcgcaatccacatcggccagatcgttattcagtaagtaatccaattcggctaagcggctgtctaagctattcgtatagggacaatccgatatgtcgatggagtgaaagagcctgatgcactccgcatacagctcgataatcttttcagggctttgttcatcttcatactcttccgagcaaaggacgccatcggcctcactcatgagcagattgctccagccatcatgccgttcaaagtgcaggacctttggaacaggcagctttccttccagccatagcatcatgtccttttcccgttccacatcataggtggtccctttataccggctgtccgtcatttttaaatataggttttcattttctcccaccagcttatataccttagcaggagacattccttccgtatcttttacgcagcggtatttttcgatcagttttttcaattccggtgatattctcattttagccatttattatttccttcctcttttctacagtatttaaagataccccaagaagctaattataacaagacgaactccaattcactgttccttgcattctaaaaccttaaataccagaaaacagctttttcaaagttgttttcaaagttggcgtataacatagtatcgacggagccgattttgaaaccgcggtgatcacaggcagcaacgctctgtcatcgttacaatcaacatgctaccctccgcgagatcatccgtgtttcaaacccggcagcttagttgccgttcttccgaatagcatcggtaacatgagcaaagtctgccgccttacaacggctctcccgctgacgccgtcccggactgatgggctgcctgtatcgagtggtgattttgtgccgagctgccggtcggggagctgttggctggctggtggcaggatatattgtggtgtaaacaaattgacgcttagacaacttaataacacattgcggacgtttttaatgtactgaattaacgccgaatta

SEQ ID NO: 20 - protein, 62 aa, Artificial; identical to SEQ ID NO: 17
  Synthetic Construct

SEQ ID NO: 21 - DNA, 9043 bp, Artificial
  plasmid VC-MME489-1QCZ
agctttgggcggatcctctagaggacaatcagtaaattgaacggagaatattattcataaaaatacgatagtaacgggtgatatattcattagaatgaaccgaaaccggcggtaaggatctgagctacacatgctcaggttttttacaacgtgcacaacagaattgaaagcaaatatcatgcgatcataggcgtctcgcatatctcattaaagcagggcatgccggtcgagtcaaatctcggtgacgggcaggaccggacggggcggtaccggcaggctgaagtccagctgccagaaacccacgtcatgccagttcccgtgcttgaagccggccgcccgcagcatgccgcggggggcatatccgagcgcctcgtgcatgcgcacgctcgggtcgttgggcagcccgatgacagcgaccacgctcttgaagccctgtgcctccagggacttcagcaggtgggtgtagagcgtggagcccagtcccgtccgctggtggcggggggagacgtacacggtcgactcggccgtccagtcgtaggcgttgcgtgccttccaggggcccgcgtaggcgatgccggcgacctcgccgtccacctcggcgacgagccagggatagcgctcccgcagacggacgaggtcgtccgtccactcctgcggttcctgcggctcggtacggaagttgaccgtgcttgtctcgatgtagtggttgacgatggtgcagaccgccggcatgtccgcctcggtggcacggcggatgtcggccgggcgtcgttctgggctcatggtagactcgacggatccacgtgtggaagatatgaatttttttgagaaactagataagattaatgaatatcggtgttttggttttttcttgtggccgtctttgtttatattgagatttttcaaatcagtgcgcaagacgtgacgtaagtatccgagtcagtttttatttttctactaatttggtcgaatctagattcgacggtatcgataagctcgcggatccctgaaagcgacgttggatgttaacatctacaaattgccttttcttatcgaccatgtacgtaagcgcttacgtttttggtggacccttgaggaaactggtagctgttgtgggcctgtggtctcaagatggatcattaatttccaccttcacctacgatggggggcatcgcaccggtgagtaatattgtacggctaagagcgaatttggcctgtaggatccctgaaagcgacgttggatgttaacatctacaaattgccttttcttatcgaccatgtacgtaagcgcttacgtttttggtggacccttgaggaaactggtagctgttgtgggcctgtggtctcaagatggatcattaatttccaccttcacctacgatggggggcatcgcaccggtgagtaatattgtacggctaagagcgaatttggcctgtaggatccctgaaagcgacgttggatgttaacatctacaaattgccttttcttatcgaccatgtacgtaagcgcttacgtttttggtggacccttgaggaaactggtagctgttgtgggcctgtggtctcaagatggatcattaatttccaccttcacctacgatggggggcatcgcaccggtgagtaatattgtacggctaagagcgaatttggcctgtaggatccgcgagctggtcaatcccattgcttttgaagcagctcaacattgatctctttctcgatcgagggagatttttcaaatcagtgcgcaagacgtgacgtaagtatccgagtcagtttttatttttctactaatttggtcgtttatttcggcgtgtaggacatggcaaccgggcctgaatttcgcgggtattctgtttctattccaactttttcttgatccgcagccattaacgacttttgaatagatacgctgacacgccaagcctcgctagtcaaaagtgtaccaaacaacgctttacagcaagaacggaatgcgcgtgacgctcgcggtgacgccatttcgccttttcagaaatggataaatagccttgcttcctattatatcttcccaaattaccaatacattacactagcatctgaatttcataaccaatctcgatacaccaaatcgaagatctccctggaattccagctgaccaccatggcaattcccggggatcagctcgaatttccccgatcgttcaaacatttggcaataaagtttcttaagattgaatcctgttgccggtcttgcgatgattatcatataatttctgttgaattacgttaagcatgtaataattaacatgtaatgcatgacgttatttatgagatgggtttttatgattagagtcccgcaattatacatttaatacgcgatagaaaacaaaatatagcgcgcaaactaggataaattatcgcgcgcggtgtcatctatgttactagatcgggaattggcatgcaagcttggcactggccgtcgttttacaacgtcgtgactgggaaaaccctggcgttacccaacttaatcgccttgcagcacatccccctttcgccagctggcgtaatagcgaagaggcccgcaccgatcgcccttcccaacagttgcgcagcctgaatggcgaatgctagagcagcttgagcttggatcagattgtcgtttcccgccttcagtttaaactatcagtgtttgacaggatatattggcgggtaaacctaagagaaaagagcgtttattagaataatcggatatttaaaagggcgtgaaaaggtttatccgttcgtccatttgtatgtgcatgccaaccacagggttcccctcgggatcaaagtactttgatccaacccctccgctgctatagtgcagtcggcttctgacgttcagtgcagccgtcttctgaaaacgacatgtcgcacaagtcctaagttacgcgacaggctgccgccctgcccttttcctggcgttttcttgtcgcgtgttttagtcgcataaagtagaatacttgcgactagaaccggagacattacgccatgaacaagagcgccgccgctggcctgctgggctatgcccgcgtcagcaccgacgaccaggacttgaccaaccaacgggccgaactgcacgcggccggctgcaccaagctgttttccgagaagatcaccggcaccaggcgcgaccgcccggagctggccaggatgcttgaccacctacgccctggcgacgttgtgacagtgaccaggctagaccgcctggcccgcagcacccgcgacctactggacattgccgagcgcatccaggaggccggcgcgggcctgcgtagcctggcagagccgtgggccgacaccaccacgccggccggccgcatggtgttgaccgtgttcgccggcattgccgagttcgagcgttccctaatcatcgaccgcacccggagcgggcgcgaggccgccaaggcccgaggcgtgaagtttggcccccgccctaccctcaccccggcacagatcgcgcacgcccgcgagctgatcgaccaggaaggccgcaccgtgaaagaggcggctgcactgcttggcgtgcatcgctcgaccctgtaccgcgcacttgagcgcagcgaggaagtgacgcccaccgaggccaggcggcgcggtgccttccgtgaggacgcattgaccgaggccgacgccctggcggccgccgagaatgaacgccaagaggaacaagcatgaaaccgcaccaggacggccaggacgaaccgtttttcattaccgaagagatcgaggcggagatgatcgcggccgggtacgtgttcgagccgcccgcgcacgtctcaaccgtgcggctgcatgaaatcctggccggtttgtctgatgccaagctggcggcctggccggccagcttggccgctgaagaaaccgagcgccgccgtctaaaaaggtgatgtgtatttgagtaaaacagcttgcgtcatgcggtcgctgcgtatatgatgcgatgagtaaataaacaaatacgcaaggggaacgcatgaaggttatcgctgtacttaaccagaaaggcgggtcaggcaagacgaccatcgcaacccatctagcccgcgccctgcaactcgccggggccgatgttctgttagtcgattccgatccccagggcagtgcccgcgattgggcggccgtgcgggaagatcaaccgctaaccgttgtcggcatcgaccgcccgacgattgaccgcgacgtgaaggccatcggccggcgcgacttcgtagtgatcgacggagcgccccaggcggcggacttggctgtgtccgcgatcaaggcagccgacttcgtgctgattccggtgcagccaagcccttacgacatatgggccaccgccgacctggtggagctggttaagcagcgcattgaggtcacggatggaaggctacaagcggcctttgtcgtgtcgcgggcgatcaaaggcacgcgcatcggcggtgaggttgccgaggcgctggccgggtacgagctgcccattcttgagtcccgtatcacgcagcgcgtgagctacccaggcactgccgccgccggcacaaccgttcttgaatcagaacccgagggcgacgctgcccgcgaggtccaggcgctggccgctgaaattaaatcaaaactcatttgagttaatgaggtaaagagaaaatgagcaaaagcacaaacacgctaagtgccggccgtccgagcgcacgcagcagcaaggctgcaacgttggccagcctggcagacacgccagccatgaagcgggtcaactttcagttgccggcggaggatcacaccaagctgaagatgtacgcggtacgccaaggcaagaccattaccgagctgctatctgaatacatcgcgcagctaccagagtaaatgagcaaatgaataaatgagtagatgaattttagcggctaaaggaggcggcatggaaaatcaagaacaaccaggcaccgacgccgtggaatgccccatgtgtggaggaacgggcggttggccaggcgtaagcggctgggttgtctgccggccctgcaatggcactggaacccccaagcccgaggaatcggcgtgacggtcgcaaaccatccggcccggtacaaatcggcgcggcgctgggtgatgacctggtggagaagttgaaggccgcgcaggccgcccagcggcaacgcatcgaggcagaagcacgccccggtgaatcgtggcaagcggccgctgatcgaatccgcaaagaatcccggcaaccgccggcagccggtgcgccgtcgattaggaagccgcccaagggcgacgagcaaccagattttttcgttccgatgctctatgacgtgggcacccgcgatagtcgcagcatcatggacgtggccgttttccgtctgtcgaagcgtgaccgacgagctggcgaggtgatccgctacgagcttccagacgggcacgtagaggtttccgcagggccggccggcatggccagtgtgtgggattacgacctggtactgatggcggtttcccatctaaccgaatccatgaaccgataccgggaagggaagggagacaagcccggccgcgtgttccgtccacacgttgcggacgtactcaagttctgccggcgagccgatggcggaaagcagaaagacgacctggtagaaacctgcattcggttaaacaccacgcacgttgccatgcagcgtacgaagaaggccaagaacggccgcctggtgacggtatccgagggtgaagccttgattagccgctacaagatcgtaaagagcgaaaccgggcggccggagtacatcgagatcgagctagctgattggatgtaccgcgagatcacagaaggcaagaacccggacgtgctgacggttcaccccgattactttttgatcgatcccggcatcggccgttttctctaccgcctggcacgccgcgccgcaggcaaggcagaagccagatggttgttcaagacgatctacgaacgcagtggcagcgccggagagttcaagaagttctgtttcaccgtgcgcaagctgatcgggtcaaatgacctgccggagtacgatttgaaggaggaggcggggcaggctggcccgatcctagtcatgcgctaccgcaacctgatcgagggcgaagcatccgccggttcctaatgtacggagcagatgctagggcaaattgccctagcaggggaaaaaggtcgaaaaggtctctttcctgtggatagcacgtacattgggaacccaaagccgtacattgggaaccggaacccgtacattgggaacccaaagccgtacattgggaaccggtcacacatgtaagtgactgatataaaagagaaaaaaggcgatttttccgcctaaaactctttaaaacttattaaaactcttaaaacccgcctggcctgtgcataactgtctggccagcgcacagccgaagagctgcaaaaagcgcctacccttcggtcgctgcgctccctacgccccgccgcttcgcgtcggcctatcgcggccgctggccgctcaaaaatggctggcctacggccaggcaatctaccagggcgcggacaagccgcgccgtcgccactcgaccgccggcgcccacatcaaggcaccctgcctcgcgcgtttcggtgatgacggtgaaaacctctgacacatgcagctcccggagacggtcacagcttgtctgtaagcggatgccgggagcagacaagcccgtcagggcgcgtcagcgggtgttggcgggtgtcggggcgcagccatgacccagtcacgtagcgatagcggagtgtatactggcttaactatgcggcatcagagcagattgtactgagagtgcaccatatgcggtgtgaaataccgcacagatgcgtaaggagaaaataccgcatcaggcgctcttccgcttcctcgctcactgactcgctgcgctcggtcgttcggctgcggcgagcggtatcagctcactcaaaggcggtaatacggttatccacagaatcaggggataacgcaggaaagaacatgtgagcaaaaggccagcaaaaggccaggaaccgtaaaaaggccgcgttgctggcgtttttccataggctccgcccccctgacgagcatcacaaaaatcgacgctcaagtcagaggtggcgaaacccgacaggactataaagataccaggcgtttccccctggaagctccctcgtgcgctctcctgttccgaccctgccgcttaccggatacctgtccgcctttctcccttcgggaagcgtggcgctttctcatagctcacgctgtaggtatctcagttcggtgtaggtcgttcgctccaagctgggctgtgtgcacgaaccccccgttcagcccgaccgctgcgccttatccggtaactatcgtcttgagtccaacccggtaagacacgacttatcgccactggcagcagccactggtaacaggattagcagagcgaggtatgtaggcggtgctacagagttcttgaagtggtggcctaactacggctacactagaaggacagtatttggtatctgcgctctgctgaagccagttaccttcggaaaaagagttggtagctcttgatccggcaaacaaaccaccgctggtagcggtggtttttttgtttgcaagcagcagattacgcgcagaaaaaaaggatctcaagaagatcctttgatcttttctacggggtctgacgctcagtggaacgaaaactcacgttaagggattttggtcatgcattctaggtactaaaacaattcatccagtaaaatataatattttattttctcccaatcaggcttgatccccagtaagtcaaaaaatagctcgacatactgttcttccccgatatcctccctgatcgaccggacgcagaaggcaatgtcataccacttgtccgccctgccgcttctcccaagatcaataaagccacttactttgccatctttcacaaagatgttgctgtctcccaggtcgccgtgggaaaagacaagttcctcttcgggcttttccgtctttaaaaaatcatacagctcgcgcggatctttaaatggagtgtcttcttcccagttttcgcaatccacatcggccagatcgttattcagtaagtaatccaattcggctaagcggctgtctaagctattcgtatagggacaatccgatatgtcgatggagtgaaagagcctgatgcactccgcatacagctcgataatcttttcagggctttgttcatcttcatactcttccgagcaaaggacgccatcggcctcactcatgagcagattgctccagccatcatgccgttcaaagtgcaggacctttggaacaggcagctttccttccagccatagcatcatgtccttttcccgttccacatcataggtggtccctttataccggctgtccgtcatttttaaatataggttttcattttctcccaccagcttatataccttagcaggagacattccttccgtatcttttacgcagcggtatttttcgatcagttttttcaattccggtgatattctcattttagccatttattatttccttcctcttttctacagtatttaaagataccccaagaagctaattataacaagacgaactccaattcactgttccttgcattctaaaaccttaaataccagaaaacagctttttcaaagttgttttcaaagttggcgtataacatagtatcgacggagccgattttgaaaccgcggtgatcacaggcagcaacgctctgtcatcgttacaatcaacatgctaccctccgcgagatcatccgtgtttcaaacccggcagcttagttgccgttcttccgaatagcatcggtaacatgagcaaagtctgccgccttacaacggctctcccgctgacgccgtcccggactgatgggctgcctgtatcgagtggtgattttgtgccgagctgccggtcggggagctgttggctggctggtggcaggatatattgtggtgtaaacaaattgacgcttagacaacttaataacacattgcggacgtttttaatgtactgaattaacgccgaatta

SEQ ID NO: 22 - DNA, 1533 bp, Arabidopsis thaliana
  CDS (1)..(1533)
atgtcgaacatagacatagaaggaatattgaaggagctacctaatgatgggaggactcctaagactaagatcgtttgtacattaggtcctgcgtctaggtctgtgacaatgattgagaagcttcttaaagcaggcatgaatgtagctcgattcaatttctctcacggaagccatgagtaccatcaggagactcttgacaatctccgcaccgctatgcagaataccggcattctcgctgctgttatgcttgatacaaaggggcctgagattcgtaccggtttcttgaaagatgggaaccctatacaactaaaggaaggccaagagatcacaattaccactgattatgacatcaagggcgatgagaaaacgatttccatgagctacaaaaagctcccagtggatgtgaagcccggaaataccatactatgtgcagatggaagcataagtcttgctgtcgtgtcatgtgatccaaacgctgggactgttatatgtcgatgtgaaaatacagccatgctaggtgaaagaaaaaatgtgaatctcccaggtgttgttgttgatctccccacattgactgacaaggatgtagaagatattcttaaatggggtgttccaaacaacatcgatatgattgctctttcatttgttcgcaaaggttcagatcttgttaatgtccggaaagtccttggatcacattccaagagtataatgttgatgtcgaaggttgagaaccaagaaggagtcctgaatttcgatgagattttgcgtgaaactgatgcattcatggttgctcgtggtgatcttgggatggagattccgatagagaagatcttcttggctcagaagatgatgatctacaagtgtaaccttgcaggtaaaccggtggtcacagccactcaaatgctcgagtcgatgatcaaatcaccacggccaacacgagcagaagccacagatgtagcaaacgcagttctcgatggcactgactgtgtgatgcttagcggagaaagtgctgcaggagcttaccctgaaatagcagtgaaaacaatggctaaaatctgcatcgaggcggaatcatcgcttgactacaacacaatcttcaaggagatgattagagcaactccacttccaatgagcactcttgagagtcttgcatcatcagctgtacgaacggcaaacaaagccaaagccaaactcatcatcgtgttgaccagaggaggtacaacagctaaactggtggccaagtatagaccggctgttccaattctatcggtggttgttccggtcttcaccagcgatacgtttaactggagttgcagcgatgagtcaccggcgaggcatagtttgatatatagaggtctgataccggttttgggtgaaggatctgcaaaagcaactgatagtgaatccacagaggagattattgaatctgctttgaagtcagcgacagagaaaggactgtgtaaccatggtgatgctgtggtggctctgcaccgtattggagctgcttcggttatcaagatctgtgtggtgaagtga

SEQ ID NO: 23 - protein, 510 aa, Arabidopsis thaliana
MSNIDIEGILKELPNDGRTPKTKIVCTLGPASRSVTMIEKLLKAGMNVARFNFSHGSHEYHQETLDNLRTAMQNTGILAAVMLDTKGPEIRTGFLKDGNPIQLKEGQEITITTDYDIKGDEKTISMSYKKLPVDVKPGNTILCADGSISLAVVSCDPNAGTVICRCENTAMLGERKNVNLPGVVVDLPTLTDKDVEDILKWGVPNNIDMIALSFVRKGSDLVNVRKVLGSHSKSIMLMSKVENQEGVLNFDEILRETDAFMVARGDLGMEIPIEKIFLAQKMMIYKCNLAGKPVVTATQMLESMIKSPRPTRAEATDVANAVLDGTDCVMLSGESAAGAYPEIAVKTMAKICIEAESSLDYNTIFKEMIRATPLPMSTLESLASSAVRTANKAKAKLIIVLTRGGTTAKLVAKYRPAVPILSVVVPVFTSDTFNWSCSDESPARHSLIYRGLIPVLGEGSAKATDSESTEEIIESALKSATEKGLCNHGDAVVALHRIGAASVIKICVVK

SEQ ID NO: 24 - DNA, 1875 bp, Triticum aestivum
  CDS (86)..(1630)
aaaatccaaatctcatcgtcatccccccgcacccccaacccaacccctcccaccccacctccggcgaccggatcggcagggcgcgatggcgaacatcgacatggcggcggtgctggcggacatggaccgggacgcggcggcggacgcgcggacgccgcggaccaagctcgtgtgcacgctcggcccggcctcccgctccgtgcccatgctcgagaagctgctccgcgccgggatgaacgtcgcgcgcttcaacttctcccacggcacccacgagtaccacaaggagaccctcgacgccctccgccaggccatgcacaacaccggcatcctctgcgccgtcatgctcgacaccaagggacctgagattcgtactggatttttgaaggatggtaaaccaatcaaactgacaaagggtcaagaaatcactgtttccactgactacgatatcaagggcgacacgaacaccatctccatgagctacaagaaacttcctcaggatgtgaagcctgggcatgtcatactatgtgctgatggtaccatctccttgtctgttctgtcttgcgacccagcagctggaactgtcagatgtaggtgtgagaacactgcaatgcttggagagaggaagaattgtaatctgccaggaattgtcgtggaccttcctacgctgacggagaaggataaggaggacattttgggatggggtgtgcctaatgacattgacatgattgctttgtcatttgtccgcaaaggatcagatttggtgaccgtcaggcagcttcttggacagcatgcaaagcgcatcaagttaatgtcaaaggttgaaaaccaagagggcattgtaaactttgatgacattctgagggaaaccgatgcctttatggttgccagaggtgatcttggaatggagattccagttgagaagatattccttgcacagaaaatgatgatctacaagtgcaaccttgctggcaagcctgtggtcacagcgacccagatgcttgagtcaatgatcaagtccccgaggccaacccgtgccgaggctactgacgtcgcaaatgcggtgcttgatggaactgactgtgtcatgctcagtggtgaaagcgctgccggagcataccctgaggtggctgtgaagatcatggcgcgcatctgcgtggaggcggagtcttccctggacaacgacgccgtcttcaaggagatgatcaaggccgcgcccctcccgatgagcccgctggagtccctcgcgtcctcggccgtgcgaaccgccaacaaggccagggccactctgatcgtcgtcctgacccgtggcggcaccacggcgaagctggtggccaagtaccggcccagggtgccgatcctgtcggtggtcgtcccggtgctgacgaccgactcgttcgactggaccgtcagctccgagggccccgccaggcacagcctgatctacaggggcctgatcccgctcctcgccgagggctccgccaaggccaccgactcggagtcgacggaggagatcctccaggcggcgctcaagtcggccgtgaagaagcagctctgcaaggctggtgacgccgtcgtcgtcctgcaccgcatcggcgtcgcctccgtcatcaagatctgcaccgtcaagtgagcgccatcgccgggcgctcggcggcccttgctgccgtggcgaactctctgttcttgtggagacgaattgataatcgccgtaccgtccgttgcagtttgttgcatagatccgatccgagctggtaaattaggagggagaggactccgttaatatagagctcttttattattattaccgttggttgatatgatatgccccctgtagtatggtgtttggcaggtgtcatgcctgcacaaatttttctc

SEQ ID NO: 25 - protein, 514 aa, Triticum aestivum
MANIDMAAVLADMDRDAAADARTPRTKLVCTLGPASRSVPMLEKLLRAGMNVARFNFSHGTHEYHKETLDALRQAMHNTGILCAVMLDTKGPEIRTGFLKDGKPIKLTKGQEITVSTDYDIKGDTNTISMSYKKLPQDVKPGHVILCADGTISLSVLSCDPAAGTVRCRCENTAMLGERKNCNLPGIVVDLPTLTEKDKEDILGWGVPNDIDMIALSFVRKGSDLVTVRQLLGQHAKRIKLMSKVENQEGIVNFDDILRETDAFMVARGDLGMEIPVEKIFLAQKMMIYKCNLAGKPVVTATQMLESMIKSPRPTRAEATDVANAVLDGTDCVMLSGESAAGAYPEVAVKIMARICVEAESSLDNDAVFKEMIKAAPLPMSPLESLASSAVRTANKARATLIVVLTRGGTTAKLVAKYRPRVPILSVVVPVLTTDSFDWTVSSEGPARHSLIYRGLIPLLAEGSAKATDSESTEEILQAALKSAVKKQLCKAGDAVVVLHRIGVASVIKICTVK

SEQ ID NO: 26 - DNA, 1953 bp, Triticum aestivum
  CDS (152)..(1693)
aatccgccgactgctccgtttatttaaccgagccgtcccattcttggagagcaagaagcacgccaccacctcgcgtccccaaagaatccccatcccttcccctcccctcccctccccggccgcacacagatccggcgaccgacaacaagccatggtgtccaacggggagctgtcgcagccgcaggcgggggagtacggcctcgccgtcatgcgccgccggcccaagaccaagatcgtctgcacgctcggcccggcctcccgctccgtcgacatgatcgagaagctgctgcgcgccggcatgtgcgtcgcccgcttcaacttctcccacggctcccacgactaccaccaggagacgctcgacaacctgcacgccgccatggaccgcaccgggatcctctgcgccgtcatgctcgacaccaagggtccagagatccgtactggatttttgaaagatgggaagcctatccagttgaggaagggccaagaaattgtgatctccacagattatagcataaagggggacgacaagatgatatcgatgagctataagaagctagcagttgatctgaagccaggcagtgtcatattatgcgctgatggtaccatcactcttacagtgcttcattgtgacaaagagcaaggtctcgttcgctgctgttgtgagaacactgctatgcttggtgagaggaagaatgtcaatcttccaggggtcgttgttgatctgccaacactcactgaaaaggacagggaggatatccttcaatggggcgtcccgaacaagattgacatgattgctttgtcgtttgtccgcaaaggttcagatcttgtggaggtcaggaaggtacttggggagcatgccaagtcaataatgctgatgtcaaaggttgagaaccaggaaggagtagctaactttgacgatatcctggcacagtctgatgcttttatggtggcaagaggtgatttggggatggaaattcctgtagagaagatcttttatgcacagaaggtgatgattttcaagtgcaacattcagggcaagccagttgtgactgcaacccagatgttggagtctatgatcaagtctcctcggcctactcgagcggaagcaactgatgtggccaacgcagttcttgatggcactgactgtgtgatgctcagtggtgagacagcggctggggcttatccagaactggcagtgcaaactatggccaagatctgcttgcaggccgagtcatgcgtggactattctgctgtttttaaatcaatcatgtcatcagccccgattcccatgagcccattggagagccttgcctcatcagctgtccgcacagccaactcagccaaggcgacgcttatcttggtactgaccaggggaggaacaactgcaaggcttgtagccaagtacaggccatccatgccgatactgtctgtggtggttcctgagctcaagacggtcgagtttgactggatctgcagcgacgaggggcctgccaggcaaagcctcatcgtgaggggcgtgatccctatgctcagtgctggcactgccaaggcgtttgacagcgaagccacggaagaggcactgaggtttgccatgaagaacgccaaggagatgggcctttgcaacgctggtgactccattgtggcccttcaccgcatcgggaatgcatctgtcatcaagctcttgaccgtgtaagctagtggcagcgaagcgacaatgcaacaccattttgcccggggattttcccttctttctttttgcgaggctacgcatacccacagttttttgctgccaagattgcggcagtgcaacctggttaaaactttgtgttatcaagttgtggctgtttactctttatgagagggtttagccaccaaaactattatcgcagcagcttgttttgctactactactataacttatatgcaacgattgaactacctgatagttgctcc

SEQ ID NO: 27 - protein, 513 aa, Triticum aestivum
MVSNGELSQPQAGEYGLAVMRRRPKTKIVCTLGPASRSVDMIEKLLRAGMCVARFNFSHGSHDYHQETLDNLHAAMDRTGILCAVMLDTKGPEIRTGFLKDGKPIQLRKGQEIVISTDYSIKGDDKMISMSYKKLAVDLKPGSVILCADGTITLTVLHCDKEQGLVRCCCENTAMLGERKNVNLPGVVVDLPTLTEKDREDILQWGVPNKIDMIALSFVRKGSDLVEVRKVLGEHAKSIMLMSKVENQEGVANFDDILAQSDAFMVARGDLGMEIPVEKIFYAQKVMIFKCNIQGKPVVTATQMLESMIKSPRPTRAEATDVANAVLDGTDCVMLSGETAAGAYPELAVQTMAKICLQAESCVDYSAVFKSIMSSAPIPMSPLESLASSAVRTANSAKATLILVLTRGGTTARLVAKYRPSMPILSVVVPELKTVEFDWICSDEGPARQSLIVRGVIPMLSAGTAKAFDSEATEEALRFAMKNAKEMGLCNAGDSIVALHRIGNASVIKLLTV

SEQ ID NO: 28 - DNA, 2151 bp, Zea mays
  CDS (255)..(1802)
gccatccagtcctggagcctgcgcggctgcgccttgcatcgcatctccgtcgtcgtcctcgcccacggaatccgtccaattccccacgccgcccgtcgtccttttctataaaattcactccgccaccaaatctcgaatccccatcgcgctgcttttccaccgaccccgacgccgacgccgacgccaccgccgctccctccccagtccccactccccttcccgggccgcggagcagagatccggggcgccgcgcgatggcgaacatcgacatggcgaagatcctggcggacctggaccgcggcgccagcggcggcgacgcgcgggtgcccaagaccaagctcgtatgcacgctcggcccggcctcccgcaccgtgcccatgctcgagaagctgctccgcgccggcatgaacgtcgcgcgcttcaacttctcccacggcacccacgagtaccaccaggagacgctcgacaacctccgccaggccatgcacaacaccggcatcctctgcgccgtcatgctcgacaccaagggtcctgagatccgtacagggtttttgaaggatggtaaaccgattaagctaaccaagggtcaagaaatcactgtcaccactgattatgatatcaagggtgacgaaaatacgattgctatgagttacaagaaactgcctgttgacgtgaagcctggaaatgtcatactctgcgcagatggtactatctctctggccgttctatcttgtgatcctgatgctggaactgtgaggtgtagatgcgagaacactgcaatgcttggtgagagaaagaactgcaatctgccaggaattgttgtggatcttcctacattgactgagaaagataaagaagacattttgggctggggtgttccaaatgatattgacatgattgctctatcctttgtccgtaaaggatcagatttggtgactgtgagacaggttcttgggcagcatgccaagcgcattaagttgatgtcaaaggttgaaaaccaagagggtgttgtaaactttgatgagatcttgagggagactgatgcttttatggttgctagaggtgatcttggaatggagattcctgttgagaagattttccttgcgcagaagatgatgatctacaagtgcaacattgctggcaaacctgttgttaccgctacccagatgctcgagtcgatgatcaaatcccctaggcccacccgcgcagaggccactgacgttgcaaatgctgttcttgatggaactgactgtgtcatgctcagtggtgagagtgctgctggagcctaccccgaggtggctgtgaagatcatggctcgtatctgcatcgaggcagagtcttccctggaccacgaggcagttttcaaggccatgatcaggtccgcgcctcttccaatgagccctctggagtctcttgcgtcatctgctgtgcgaactgccaacaaggccaaggccgcactgatcgtcgtcttgactcgcggtggcaccacggccaaactggtcgccaagtaccgccccagggttcccatcctctctgttgtggtacccgtgctaacgacggattctttcgactggaccatcagctccgagggcccagctaggcacagcctgatctatagaggcctcattcccctcctcgctgagggctccgcgaaggctacggattcagagtcaaccgaggtgatcctggaggctgcgctcaagtcggccgtgcagaagcaactttgcaagcctggtgatgccattgtggctctccatcgtatcggcgtcgcctccgtcatcaagatctgcatcgtgaagtgatcaccgtgacttgactcctaagtcccaggggggtggttctcaccgctgggacctatgaaacaacttttctgcctcctttttaactgcatttttcggagacagataattactgtatgttgtaagcccgcttctgttgtttgcagctgcaagatgtctttttttttgtttacatagtttttgagctggtaaatgaggagggagaggactccattgatgttagtggtaataagatttgtatctacggagttcagttaaaaggcttttctacatgaaaaaaaaaaaaaaaactgtaaaaaggttcatgcccttgtttagtgtaaagatcatgtagatagatgccgggtttttt

SEQ ID NO: 29 - protein, 515 aa, Zea mays
MANIDMAKILADLDRGASGGDARVPKTKLVCTLGPASRTVPMLEKLLRAGMNVARFNFSHGTHEYHQETLDNLRQAMHNTGILCAVMLDTKGPEIRTGFLKDGKPIKLTKGQEITVTTDYDIKGDENTIAMSYKKLPVDVKPGNVILCADGTISLAVLSCDPDAGTVRCRCENTAMLGERKNCNLPGIVVDLPTLTEKDKEDILGWGVPNDIDMIALSFVRKGSDLVTVRQVLGQHAKRIKLMSKVENQEGVVNFDEILRETDAFMVARGDLGMEIPVEKIFLAQKMMIYKCNIAGKPVVTATQMLESMIKSPRPTRAEATDVANAVLDGTDCVMLSGESAAGAYPEVAVKIMARICIEAESSLDHEAVFKAMIRSAPLPMSPLESLASSAVRTANKAKAALIVVLTRGGTTAKLVAKYRPRVPILSVVVPVLTTDSFDWTISSEGPARHSLIYRGLIPLLAEGSAKATDSESTEVILEAALKSAVQKQLCKPGDAIVALHRIGVASVIKICIVK

SEQ ID NO: 30 - DNA, 1533 bp, Oryza sativa
  CDS (1)..(1533)
atggcggtgatggaggagcagcaggagggagccgcgggggtgatgcggcggaggcccaagacgaagatcgtgtgcacgctggggccggcgtcgaggtcggtggagatgatcgggcggctgctccgcgccgggatgtgcgtcgcgcgcttcaacttctcccacggatcccacgagtaccaccaggagacgctcgacaacctccgcgccgccatggagagcaccggcatcctctgcgccgtcatgctcgacaccaaggggccagagatccgaactggatttctgaaagatggaaaacccgtacagttgaagaagggtcaagaaatcacagtttcaactgattatagcataaagggtgatgacaacatgatatcaatgagctacaagaagctagcggtggatctgaagccaggcagtgtaatattatgtgctgatggcaccatcactcttactgtccttcactgtgataaagagcaaggcttggttcgctgccgttgtgagaacactgctatgcttggtgagaggaagaatgttaaccttccaggagttattgttgatctcccgacacttactgagaaggacaaggaggatattcttaaatggggtgtcccaaacaagattgacatgattgctctgtcttttgttcgtaaaggctcagaccttgtagaggtcaggaaggtgcttgggaagcatgcaaagtcaataatgctgatgtcaaaggttgagaatcaagagggagtggctaactttgatgatatcctggcacaatctgatgcttttatggttgcaaggggtgatttgggaatggaaattccgatagagaagatcttttatgcacagaaggtgatgattttcaagtgcaatattcagggcaagccagttgtgactgcaacccagatgttggaatctatgatcaagtctccccgccctactagagcagaagcgactgatgttgccaatgcagttcttgatggcactgactgtgtcatgctcagtggtgagacagctgctggggcttacccggaactggctgtacggaccatggccaagatctgcctgcaagcggagtcatgcgtcgaccatgccgctgttttcaagtccattaccgcatcagctccaattcccatgagcccattggagagccttgcatcatcagctgtgcgtacagcgaactctgccaaggcggcgctcatcttggtcctgactaggggaggaacaactgctaggctggtggccaagtacaggccatccatgccgattctgtccgtcgtggttcctgagctgaaacagaccgactccttcgactggacctgcagcgacgaagctcctgcgcggcacagcctcatcgtcaggggagtgatcccgatgctgagtgcagccactgccaaggccttcgacaacgaagccactgaagaagctctcgggttcgccatcagcaacgccaaggcgatggggctctgcaactccggtgagtccgtcgtcgccctccaccggatcggaactgcatctgtcatcaagctcctgacagcgaactag

SEQ ID NO: 31 - protein, 510 aa, Oryza sativa
MAVMEEQQEGAAGVMRRRPKTKIVCTLGPASRSVEMIGRLLRAGMCVARFNFSHGSHEYHQETLDNLRAAMESTGILCAVMLDTKGPEIRTGFLKDGKPVQLKKGQEITVSTDYSIKGDDNMISMSYKKLAVDLKPGSVILCADGTITLTVLHCDKEQGLVRCRCENTAMLGERKNVNLPGVIVDLPTLTEKDKEDILKWGVPNKIDMIALSFVRKGSDLVEVRKVLGKHAKSIMLMSKVENQEGVANFDDILAQSDAFMVARGDLGMEIPIEKIFYAQKVMIFKCNIQGKPVVTATQMLESMIKSPRPTRAEATDVANAVLDGTDCVMLSGETAAGAYPELAVRTMAKICLQAESCVDHAAVFKSITASAPIPMSPLESLASSAVRTANSAKAALILVLTRGGTTARLVAKYRPSMPILSVVVPELKQTDSFDWTCSDEAPARHSLIVRGVIPMLSAATAKAFDNEATEEALGFAISNAKAMGLCNSGESVVALHRIGTASVIKLLTAN

SEQ ID NO: 32 - DNA, 1752 bp, Oryza sativa
  CDS (1)..(1752)
atggcgcaggtggtggctgcggcagggacggcggcggcggtggcggcggtggggaggccgctgggtggcggcggatctggggccgacgcgctccgcccggcggcgaggctgtcgttcgcgccgcgctggtgcggtgggagcgcgggggcagcaagggcgcgccgcgagtccgccgtcacgtccgtgattagccgcgccccgcgtctcgacgccgaggtgctgccggtgtcggccgacgacgacgcggacgtgaaggaagaagaaaacttccagcatctcaaggccattcagcaacttgcaacatcagccaatggtgtgtggtctaaaccaaatgtgagacgcaagacaaagatcgtgtgcaccattggtccttcaactaacacaaaggagatgatatggaaacttgctgaggctggcatgaatgtggctcggcttaatatgtcacatggagaccatgcatcacaccagaaagttattgacttagtaaaggaatataatgctcaaacaaaggataacgtgattgctattatgcttgacacgaagggaccagaagttaggagtggagatttgcctcaaccaataatgttggaaactggccaggagttcactttcacaattaagagaggagttgggactgagacatgtgttagcgttaactatgatgactttgttaatgatgtagaagtgggtgacatgctcctcgtagatggtggaatgatgtcgttgttggtcaagtccaaaactgaagattcggtaaaatgtgaagttattgatggaggtgaactgaaatccaggcgtcacctgaatgttcgtggaaagagcgcaaccttgccatcaataactgacaaggattgggatgatattaagtttggtgtggagaatcaagttgactactatgccgtttcttttgtcaaagatgctcaagttgtgcatgaattgaaggattatctcagaagctccaatgccgatatacatgtaattgtaaagattgaaagtgcagattccattccaaacctacactcaatcatcacagcatcggatggggctatggttgccagaggtgacttgggagctgaactccctattgaggaggtaccgctgctgcaggaagaaattattagaatgtgcaggagcatgggaaaagctgttattgttgccactaatatgctagaaagtatgattgttcatccaactccaacccgagcagaagtttcagacattgctatagctgttcgagaaggttctgatggcattatgctttctggggaaactgcacacggaaagtttcctttgaaagctgttaaggtcatgcatactgttgccctgagaactgaagccactatgtctggtggggaaacaccggctaaccttggtcaggtgttcaagaatcacatgagtgaaatgtttgcataccattcaacaatgatgtccaacactcttggaacatcaattgtggttttcaccaggacaggatttatggctatcctacttagtcattaccgcccttctggcaccatttttgcctttacggaccaggagagagttagacaacgattggctttgtaccaaggtgtatgtccagtccagatggaattttctgatgatgctgagaagacatttggtgacgctttgtcatacttgctgaaacatggtatggtgaaggaaggcgaggaggttgcacttgttcaaagtggcaggcaacctatctggcggtcgcagtccacccataatattcaggtcaggaaggtttga

SEQ ID NO: 33 - protein, 583 aa, Oryza sativa
MAQVVAAAGTAAAVAAVGRPLGGGGSGADALRPAARLSFAPRWCGGSAGAARARRESAVTSVISRAPRLDAEVLPVSADDDADVKEEENFQHLKAIQQLATSANGVWSKPNVRRKTKIVCTIGPSTNTKEMIWKLAEAGMNVARLNMSHGDHASHQKVIDLVKEYNAQTKDNVIAIMLDTKGPEVRSGDLPQPIMLETGQEFTFTIKRGVGTETCVSVNYDDFVNDVEVGDMLLVDGGMMSLLVKSKTEDSVKCEVIDGGELKSRRHLNVRGKSATLPSITDKDWDDIKFGVENQVDYYAVSFVKDAQVVHELKDYLRSSNADIHVIVKIESADSIPNLHSIITASDGAMVARGDLGAELPIEEVPLLQEEIIRMCRSMGKAVIVATNMLESMIVHPTPTRAEVSDIAIAVREGSDGIMLSGETAHGKFPLKAVKVMHTVALRTEATMSGGETPANLGQVFKNHMSEMFAYHSTMMSNTLGTSIVVFTRTGFMAILLSHYRPSGTIFAFTDQERVRQRLALYQGVCPVQMEFSDDAEKTFGDALSYLLKHGMVKEGEEVALVQSGRQPIWRSQSTHNIQVRKV

SEQ ID NO: 34 - DNA, 1536 bp, Oryza sativa
  CDS (1)..(1536)
atggcgaacatcgacatggggaagatcctggcggggctggagaacgacgacgcgcgggtgcccaagaccaagctggtctgcacgctcggcccggcctcccgctccgtccccatgctcgagaagctgctccgcgccgggatgaacgtcgcgcgcttcaacttctcccacggcacccacgagtaccaccaggagaccctcgacaacctccgccaggccatgcacaacaccggcgtcctctgcgccgtcatgctcgataccaagggtcctgagattcgtactggatttttgaaggatggcaagccaatcaagctaacaaagggtcaagaactcactgttaccaccgattatgagatcaagggtgatgagaacatgattaccatgagttacaagaaactgccagttgatgtgaagcctggaaatgtcattctctgcgccgatggtacaatctctttgactgttttgtcctgtgatccaaaggctggaactgtgaggtgtaggtgtgagaacacagcaatgcttggcgagagaaagaattgcaatctgccaggaattgttgtggaccttcctacactgactgagaaggataaagaagacattttgggatggggtgtgccaaatgacatagacatgattgctctgtcgtttgtccgtaaaggatcagatttggttaccgtcagacaacttcttggacagcatgcaaagcgcatcaagctgatgtcaaaggttgaaaaccaagagggtgttgtaaacttcgatgagatcttgagggaaacggatgcatttatggttgctagaggtgatcttggaatggagattccagttgagaagatattccttgcacagaagatgatgatttacaagtgcaaccttgctggaaagcctgttgtgactgctactcagatgcttgagtcgatgatcaaatcaccacgtccaactcgtgctgaggcaactgacgttgcaaatgcagttcttgatggaactgactgcgtcatgcttagtggagagagtgctgctggagcataccctgaagtagctgtgaagatcatggcacgtatatgtgttgaggcagagtcttcccttgacaacgaagctgtcttcaaggagatgatcaggtctgcgccccttccgatgagcccattggagtctctcgcatcctctgctgtacgcacagccaacaaggccaaggcagccctgattgttgtcttgactcgtggtggtaccacggcaaagctggttgccaagtatcgtcccagggttccaatcctctctgtggttgtccccgtgttgacaaccgattcattcgactggacaatcagctcggagggcccagcaaggcacagcctaatctacagaggtcttgttcctctcctggctgagggttctgccaaagccaccgattcggagtcgacagaggtcatccttgatgctgctctcaagtcagctgtacagaagcagttgtgcaagcctggtgatgctgttgttgctctgcaccgtattggcgtcgcatccgtgatcaagatctgcatcgtgaagtaa

SEQ ID NO: 35 - protein, 511 aa, Oryza sativa
MANIDMGKILAGLENDDARVPKTKLVCTLGPASRSVPMLEKLLRAGMNVARFNFSHGTHEYHQETLDNLRQAMHNTGVLCAVMLDTKGPEIRTGFLKDGKPIKLTKGQELTVTTDYEIKGDENMITMSYKKLPVDVKPGNVILCADGTISLTVLSCDPKAGTVRCRCENTAMLGERKNCNLPGIVVDLPTLTEKDKEDILGWGVPNDIDMIALSFVRKGSDLVTVRQLLGQHAKRIKLMSKVENQEGVVNFDEILRETDAFMVARGDLGMEIPVEKIFLAQKMMIYKCNLAGKPVVTATQMLESMIKSPRPTRAEATDVANAVLDGTDCVMLSGESAAGAYPEVAVKIMARICVEAESSLDNEAVFKEMIRSAPLPMSPLESLASSAVRTANKAKAALIVVLTRGGTTAKLVAKYRPRVPILSVVVPVLTTDSFDWTISSEGPARHSLIYRGLVPLLAEGSAKATDSESTEVILDAALKSAVQKQLCKPGDAVVALHRIGVASVIKICIVK

SEQ ID NO: 36 - DNA, 1713 bp, Oryza sativa
  CDS (1)..(1713)
atggcggcggcggcggctgagatcgtggggtccgcggcggcgcgcatggcggcgccggcagtgaggccggctccgcccgcggcggcggcggcggcggcgcccccgcagccgaggagggccgtggcggcgcgctccctcaggacctccacctccgacagggtggcggcggatctcgcgctcgggagcaacggctccctctccgctcagaacattgctgagaataccgctgacgctacttcgcaagtggtctctgcgaattcccgtaggaagacaaagattgtttgcaccataggcccctcaaccaacacacgcgagatgatatggaaacttgctgagactggaatgaacgtcgcacgcatgaatatgtcccatggtgaccaccagtcgcaccagaaggtgattgatttggtgaaggagtacaatgcgaagaatactgatggcaatgtcattgctattatgctggataccaagggtccagaagtgagaagtggggatgttccagaaccaatcatgctcgaggaaggtcaagagttcaattttactattaaaagaggggtgagcaccaaagacaccgtcagtgtgaattacgatgacttcataaacgatgttgaagttggggacatactgttggtggatggaggaatgatgtcactcgctgtcaagtctaaaacagctgatacggttaagtgtgaagtagttgatggtggggaactgaaatcaaggcgccacctaaatgtccgtggaaagagtgcgactttgccatctattacagagaaagattgggaggacataaagtttggtgttgaaaatggtgttgatttctatgccgtttcctttgtgaaggatgcaaaagttattcatgaactgaaggactaccttaaaagtgctaatgcagatatacatgtcattccaaagattgaaagtgcagattcaataccaaacctccagtccattattgctgcttcagatggggcgatggtggcaagaggggatcttggtgctgaacttccaattgaggaagttcctttgctgcaggaggagattgtcagaacatgccgaagcatgcagaaaccagttattgttgccacgaatatgttagagagcatgatagaccatcccactccaacaagagcagaagtttctgatatagcaattgcagttcgtgaaggttctgatgccatcatgctgtctggtgaaactgcccatggaaagttcccactgaaggcagtcaaggtgatgcacacagtggcacagagaacagaatccagcctgtataacccaactacatctcctagtcttgttgcacatcctcaggctctgctcaacgaggaattttcgcaaagccaactaagcaaaatgtttggatctcatgctacaatgatggcgaacaccctttgcaccccaattattgtgtttacacgaaccggctccatggcagtccttctcagccactaccggccctcgtctacaatttttgcatttacaaatgaggaacgagtgaagcaacgtctggcactctaccagggtgtggttcccatttacatgaagttttctgatgatgcagaggaaactttctctagagcaattagtagcttgctgaacgcccaattcgtgaaagaaggggactacgtgacccttgttcagagtggagtgaagtcgatctggagagaggagtctactcaccacattcaagtgaggaaagtccagggctaa

SEQ ID NO: 37 - protein, 570 aa, Oryza sativa
MAAAAAEIVGSAAARMAAPAVRPAPPAAAAAAAPPQPRRAVAARSLRTSTSDRVAADLALGSNGSLSAQNIAENTADATSQVVSANSRRKTKIVCTIGPSTNTREMIWKLAETGMNVARMNMSHGDHQSHQKVIDLVKEYNAKNTDGNVIAIMLDTKGPEVRSGDVPEPIMLEEGQEFNFTIKRGVSTKDTVSVNYDDFINDVEVGDILLVDGGMMSLAVKSKTADTVKCEVVDGGELKSRRHLNVRGKSATLPSITEKDWEDIKFGVENGVDFYAVSFVKDAKVIHELKDYLKSANADIHVIPKIESADSIPNLQSIIAASDGAMVARGDLGAELPIEEVPLLQEEIVRTCRSMQKPVIVATNMLESMIDHPTPTRAEVSDIAIAVREGSDAIMLSGETAHGKFPLKAVKVMHTVAQRTESSLYNPTTSPSLVAHPQALLNEEFSQSQLSKMFGSHATMMANTLCTPIIVFTRTGSMAVLLSHYRPSSTIFAFTNEERVKQRLALYQGVVPIYMKFSDDAEETFSRAISSLLNAQFVKEGDYVTLVQSGVKSIWREESTHHIQVRKVQG

SEQ ID NO: 38 - DNA, 1584 bp, Oryza sativa
  CDS (1)..(1584)
atgcagggcgccaacatgctcctggacgagcccgtccgcctcacctccgtcctcacccccgtcaagcccaaagtattcccatcactcaccaagattgttgggacccttgggcccaactcacactccgtcgaggttattcaagaatgcctcactgctgggatggcagtcgcacggtttgatttctcatggatggatgcttcatatcatcaggagacccttaacaatctgaggaaagctgcacaaaatgtcaataagctgtgccctgtaatgctggatacactgggtccagaaattcaggttcacaattcaactggtggaccaattgagttgaaagctggaaatcatgtcaccataacaccagatctttctaaagctccctcttctgaaatcttgccaattaagtttggtggtcttgcaaaagctgtcaagaagggtgatactctttttattggtcaatatctcttcacaggaagtgaaacaacatcttcgtggcttgaggttgtggaaacttctggagaaaatgttgaatgtcttgtgaccaatacagctacacttgcaggccccatgttcactttgcatgtttcaaaagcccatgtcagtttaccaactttgagtgattatgataaagaggtcatttcaacttggggattacataacagtgttgatattatatcactttcccatacccgctctgccgaggatgtcagggagcttagatcttttcttcaatctcatggccttcaggacacacagatatatgccaaggttgaaaatactgagggtttggatcattttgatgaaattctccaagaagctgatggcgtcattatttcacggggagacctgggaattgaccttccaccagaagatgtgttcatatcccaaaaaacagctattaagaaatgcaatcttgctggcaaacctgtgatcatcactagagttgtggacagcatgattgacaatctacgcccaacacgtgcagaggccactgatgttgcaaatgctgtcctagatggaacggatggcattttgcttggtgcggagactcatcgaggcccttatccagttgatgcagtgagtactgttgggagaatatgtgcagaagctgagtctgtgtataaccagttggttcacttcaagaaattagtgaagcatgtaggtgatccaatgccccatgaagaatctgtggcatcttcagcggttcgcactgcaatgaaggtaaaagctgctgcaatcgttgtgttcactttctcaggaagagctgccaggttagttgccaagtacaagccaccaatgccagtgttggccgttgtcttcccacgtgagggctctgatccaacaaagtggcgttcttacggcacaactcaggcaaggcaatgttttgctgcaagaggtgtctaccctttgatggcgagtactgaggaggctgaaactggtgggctcaccagggaagagtacgggataaaacttgcacagaactatggtcgctcggttggtatgctaaagccctatgacaggttgatcattttccagaagatcggcgattcatctgttgtcaagatcatcgagtgtgacagttcgtaa

SEQ ID NO: 39 - protein, 527 aa, Oryza sativa
MQGANMLLDEPVRLTSVLTPVKPKVFPSLTKIVGTLGPNSHSVEVIQECLTAGMAVARFDFSWMDASYHQETLNNLRKAAQNVNKLCPVMLDTLGPEIQVHNSTGGPIELKAGNHVTITPDLSKAPSSEILPIKFGGLAKAVKKGDTLFIGQYLFTGSETTSSWLEVVETSGENVECLVTNTATLAGPMFTLHVSKAHVSLPTLSDYDKEVISTWGLHNSVDIISLSHTRSAEDVRELRSFLQSHGLQDTQIYAKVENTEGLDHFDEILQEADGVIISRGDLGIDLPPEDVFISQKTAIKKCNLAGKPVIITRVVDSMIDNLRPTRAEATDVANAVLDGTDGILLGAETHRGPYPVDAVSTVGRICAEAESVYNQLVHFKKLVKHVGDPMPHEESVASSAVRTAMKVKAAAIVVFTFSGRAARLVAKYKPPMPVLAVVFPREGSDPTKWRSYGTTQARQCFAARGVYPLMASTEEAETGGLTREEYGIKLAQNYGRSVGMLKPYDRLIIFQKIGDSSVVKIIECDSS

SEQ ID NO: 40 - DNA, 1734 bp, Glycine max
  CDS (1)..(1734)
atggctcaggtagctgcctcacgatccattcaaagcacccctttgtgccccacttctggatctgcacgtgacagagcccaaaacctgttaaagcctccatcttttgcttccaaggtgtttccttttgtagggaacaacaacaaacgctccaaactcagcctcagaggccttcagatcagtgcaaggaaatcagccccttctgaagtcatccccgtgtcacccgaagatgatccaaagattgaggagcatttgcaacatttacgtggggtgcagccatttggtgagaactctgttggtatgtggtctaagcccacgtttaggcgcaaaacgaagatagtgtgtactattggaccttctaccaatacgagggaaatgatttggaagctggctgaggctggcatgaatgttgctcggttgaatatgtctcatggagaccatgcttctcatcagaaagttattgacttggttaaggaatataatgcttctcatggagacaatgtgattgcaatcatgcttgacacaaagggtcctgaagttaggagtggggatttgccacaaccaattacattaatgcctggtcaggaattcacttttactattcagagaggtgttggaactgctgattgtgttagtgtgaactacgatgattttgtcaatgatgtggaagtgggggacatgcttcttgtcgatggtggtatgatgtcaatggttgttaagtctaagacaaaggattctgtgaaatgtgaagttgttgatggaggagagctcaagtcaaggcgacatttgaacgttagaggaaaaagtgcaactctgccttcaatcactgagaaggattgggatgatatcaagtttggagtggataacaaagttgacttttatgctgtttcctttgttaaggatgctgaagttgttcatgagctgaagaattatttgaagagctgtggtgctgatatacatgtcatcgtaaaaatcgaaagtgcagactctataccaaatttgcattcaattatcactgcgtctgatggggctatggttgccagaggagatcttggcgctgagctccctattgaagaggttccacttttgcaggaagagataatcaatttgtgtcgtagcatgggaaaggctgttattgtggcaacaaatatgctagaaagcatgattgttcacccaactccaaccagagcagaggtatcggatatagcaattgctgttcgagaaggttctgatggaataatgttgtctggagaaacagctcatggaaagttcccactaaaagctgtgaaagtaatgcacacagtagcattacggactgaagctactataccaggtggtcaaatgccacctaatattggtccagtgttgaagaaccacatgagtgagatgtttgcataccatgcaaccatgatgtctaacactcttggaacctcaactgttgtcttcactagaacgggtttcatggctgtccttctgagccattatcgtccttcgggcaccatatttgcttttacagatgagaagagggtacaacagaggctggctttgtatcaaggagtctgtccaatatacatggaattctgtgacgattctgaggcaactttcagaagagccttgaatttgctgcagaagcaaggaatggtgaaggaaggagaagaagtagcacttgtacaaagtggtaggcaacccatatggaggttccaatccacgcacaatatccaggttaggaaagtgtaa

SEQ ID NO: 41 - protein, 577 aa, Glycine max
MAQVAASRSIQSTPLCPTSGSARDRAQNLLKPPSFASKVFPFVGNNNKRSKLSLRGLQISARKSAPSEVIPVSPEDDPKIEEHLQHLRGVQPFGENSVGMWSKPTFRRKTKIVCTIGPSTNTREMIWKLAEAGMNVARLNMSHGDHASHQKVIDLVKEYNASHGDNVIAIMLDTKGPEVRSGDLPQPITLMPGQEFTFTIQRGVGTADCVSVNYDDFVNDVEVGDMLLVDGGMMSMVVKSKTKDSVKCEVVDGGELKSRRHLNVRGKSATLPSITEKDWDDIKFGVDNKVDFYAVSFVKDAEVVHELKNYLKSCGADIHVIVKIESADSIPNLHSIITASDGAMVARGDLGAELPIEEVPLLQEEIINLCRSMGKAVIVATNMLESMIVHPTPTRAEVSDIAIAVREGSDGIMLSGETAHGKFPLKAVKVMHTVALRTEATIPGGQMPPNIGPVLKNHMSEMFAYHATMMSNTLGTSTVVFTRTGFMAVLLSHYRPSGTIFAFTDEKRVQQRLALYQGVCPIYMEFCDDSEATFRRALNLLQKQGMVKEGEEVALVQSGRQPIWRFQSTHNIQVRKV

SEQ ID NO: 42 - DNA, 1536 bp, Glycine max
  CDS (1)..(1536)
atggcgaacatagacatcgaagggatcttgaagcagcagcagccttatgatgggcgcgttccgaagacgaagatagtgtgtactttgggccctgcttctcgatccgtagaaatgaccgagaagcttctgagggcagggatgaacgttgctcgtttcaatttctctcatggcacccacgactatcaccaggaaaccctcaacaatctcaagactgccatgcacaacactggcatactctgtgccgtcatgcttgacactaagggacctgagattcggactggttttctgaaagatggaaaacctattcaacttaaagaagggcaagaagtcaccataactactgattatgacattaagggggatccggagatgatatccatgagttacaagaagctgcctgtccacttgaagcctggaaataccatactgtgctctgacgggacgattactctcactgtcttgtcttgtgaccctgatgctggtactgttagatgtcgttgtgaaaacactgcaacgttgggtgagagaaaaaatgttaaccttcctggtgttgtggtggatctacccacacttactgagaaggataaggaagacattcttggatggggtgtacccaacaagattgacatgattgctctttcatttgttcgtaaaggctcggatcttgttaatgtccgcaaggttctggggccacatgcaaagaatattcagttgatgtcaaaggttgagaatcaggagggagtcctgaattttgacgaaatcctgcgggagactgatgcattcatggtggcacgtggtgatcttggaatggagatcccagtagaaaagattttcctggcacagaagatgatgatatacaagtgtaatcttgttgggaagccagtggtgactgctacccaaatgcttgaatcaatgataaagtctcccaggccaacccgagctgaagcaactgatgtagctaatgcagttcttgatggaacagattgtgtgatgcttagtggtgaaagtgctgctggggcatacccagaacttgctgtgaaaatcatggctcgcatttgcattgaagcagaatcatcccttgactatggtgccatcttcaaagagatgataaggtctaccccattgcctatgagtccattggagagccttgcatcatctgctgtccgcacagcaaacaaggccaaagcaaaactcattgttgtgctgacacgtggcgggtctacagccaagttagttgccaagtataggccagcggttccaatattgtcggtggtggttccagtgttgagcacggactcatttgattggacctgcagtgatgagacgccagcaaggcacagcctgatatacaggggcttgattcctatactgggcgagggatctgcaaaggctaccgatgcagaatccacagaggtcattctcgaagctgctcttaagtccgcaacagaaagggccctttgtaagcctggtgatgcagttgttgccctgcatcgtattggagctgcctctgtcataaagatctgcatagtcaaataa

SEQ ID NO: 43 - protein, 511 aa, Glycine max
MANIDIEGILKQQQPYDGRVPKTKIVCTLGPASRSVEMTEKLLRAGMNVARFNFSHGTHDYHQETLNNLKTAMHNTGILCAVMLDTKGPEIRTGFLKDGKPIQLKEGQEVTITTDYDIKGDPEMISMSYKKLPVHLKPGNTILCSDGTITLTVLSCDPDAGTVRCRCENTATLGERKNVNLPGVVVDLPTLTEKDKEDILGWGVPNKIDMIALSFVRKGSDLVNVRKVLGPHAKNIQLMSKVENQEGVLNFDEILRETDAFMVARGDLGMEIPVEKIFLAQKMMIYKCNLVGKPVVTATQMLESMIKSPRPTRAEATDVANAVLDGTDCVMLSGESAAGAYPELAVKIMARICIEAESSLDYGAIFKEMIRSTPLPMSPLESLASSAVRTANKAKAKLIVVLTRGGSTAKLVAKYRPAVPILSVVVPVLSTDSFDWTCSDETPARHSLIYRGLIPILGEGSAKATDAESTEVILEAALKSATERALCKPGDAVVALHRIGAASVIKICIVK

SEQ ID NO: 44 - DNA, 1509 bp, Glycine max
  CDS (1)..(1509)
atggctacgacgaggattgaggcagagaagaagccgaagacgaagatcgtgtgcactctgggccccgcatcacggtcggtcccaatgatcgagaagcttctgcgagcaggcatgaacgtggcgcgcttcaacttctcccatgggtcccacgagtaccaccaggaaaccctcgacaacctccgcgccgccatggagaacaccggtattctctgcgccgtcatgctcgacaccaaggggcctgagattcgaactggttttctcaaggacggtaagcctatccaactgatacaaggtaatgaaataaccatttccactgactatgacctaaagggagatgagaagacgatttgtatgagctacaaaaagctgcctgaggatgtgaagcccgggatggtcatactctgtgcggatggcaccatatcatttacagttttatcatgtgacaaacaagcaggcttggttcaatgccgatgtgagaactctgccactcttggcgagaggaagaatgttaatttgcctggagtgatagtggatctcccaactttgacagacaaggacaaggaagatatcttggcctggggaattccgaataaaattgacatgattgctctttcttttgttcgaaaaggttctgacctggtggaagtcaggaaagttctgggaaaacatgctaagaacattatgctcatgtctaaggttgaaaaccaagaaggggttgcaaattttgatgaaatccttgcaaattcagatgcatttatggtggcacgtggtgaccttggaatggaaattccaatagagaagatatttctcgcacagaaagtgatgatttacaagtgcaacatccaaggaaaaccagttgtcactgcaacccagatgttggagtcaatgatcaaatctcccaggccaaccagggccgaagctactgatgttgccaatgcagttctggatggcacagactgtgtgatgcttagtggtgaaaccgctgctggagcctatccagaccttgctgttcaaacaatggctaaaatatgcattgaagcagagagcacccttgactatggtgatgtgttcaaaaggattatggagcactcaccggtacccatgagcccattagagagtctagcttcttctgctgttagaacagccaactcggctagagcggctcttatcttggttttaactagaggagggagtactgcaaaattggtggcgaaatacaggccagggatgccaattctttccgtggttgttcccgagctcaagactgatagctttgattgggcatgcagtgatgaggcccctgcgagacatagccttatattccgcgggttggttcccgtgttgagtgcagcttctgctagagcttctcatgctgaaacaacagaagaagcaatagaattcgccatgcaacatgccaagtccaagggtctctgccacaacggggattcagtggtggcactgcatcgtgtgggcactgcatctatcatcaagatcttgactgtgaaatga

SEQ ID NO: 45 - protein, 502 aa, Glycine max
MATTRIEAEKKPKTKIVCTLGPASRSVPMIEKLLRAGMNVARFNFSHGSHEYHQETLDNLRAAMENTGILCAVMLDTKGPEIRTGFLKDGKPIQLIQGNEITISTDYDLKGDEKTICMSYKKLPEDVKPGMVILCADGTISFTVLSCDKQAGLVQCRCENSATLGERKNVNLPGVIVDLPTLTDKDKEDILAWGIPNKIDMIALSFVRKGSDLVEVRKVLGKHAKNIMLMSKVENQEGVANFDEILANSDAFMVARGDLGMEIPIEKIFLAQKVMIYKCNIQGKPVVTATQMLESMIKSPRPTRAEATDVANAVLDGTDCVMLSGETAAGAYPDLAVQTMAKICIEAESTLDYGDVFKRIMEHSPVPMSPLESLASSAVRTANSARAALILVLTRGGSTAKLVAKYRPGMPILSVVVPELKTDSFDWACSDEAPARHSLIFRGLVPVLSAASARASHAETTEEAIEFAMQHAKSKGLCHNGDSVVALHRVGTASIIKILTVK

SEQ ID NO: 46 - DNA, 1506 bp, Glycine max
  CDS (1)..(1506)
atggcgacgagggtggtggcggaacagaagccgaagacgaagattgtgtgcacgctggggcccgcatcgcgctctgtcccaatgatcgagaagcttctgcgggcgggcatgaacgtggctcgcttcaacttctcccatgggtcccacgagtaccaccaggaaaccctcgacaacctccgcgccgccatggagaacaccggtattctctgcgccgtcatgctcgacaccaaggggcctgagattcgaactgggtttctcaaggacagtaagcctatccaactgaaacaaggtaatgaaataaccatttccactgactatgacctaaagggtgatgagaagacgatttgtatgagctacaaaaagctgcctgaggatgtgaggcctgggatggtcatactctgcgcggatggcaccatatcatttacagttttatcatgtgacaaacaagcgggtttggttcaatgccgatgcgagaactctgccactcttggtgagaggaagaatgttaatttgcctggagtgatagtggatctcccaactttgacagacaaagacaaggaagatatcttggcctggggagttcccaataaaattgacatgattgctctttcttttgttcgaaaaggttctgacctggtggaagtcaggaaagttctgggaaaacatgccaagaacattatgctcatgtctaaggttgaaaaccaagaaggggttgcaaattttgatgaaatccttgcaaattcagatgcatttatggtggcacgtggtgaccttggaatggaaattccaatagagaagatatttcttgcacagaaagtgatgatttacaagtgcaacatccaaggaaaaccagttgtcactgcaacccagatgttggagtcaatgatcaaatctcccaggccaaccagggctgaagctactgatgttgccaatgcagttctggatggcacagactgtgtgatgcttagtggtgaaaccgctgctggagcctatccagaccttgctgttcgaacaatggctaaaatatgcattgaagcagagagcacccttgactatggagatgtgttcaaaaggattatggagcactcaccagtacccatgagcccattggagagtctagcttcttctgctgttagaacagccaactcggctagagcagctcttatcttggttttaactagaggagggagtactgcaaaattggtggctaaatacaggccaggcatgccaattctttctgtggttgttcccgagcttaagaccgatacctttgactgggcatgcagtgatgaggcccctgcaagacatagccttatattccgcgggttggttcccgtattgagtgcagcttctgctagagcttctcatgctgaaacaactgaagaagcaatagaattcgccatgcaacatgccaagtccaagggtctctgccacaacggggattcggttgtggcacttcatcgtgtgggcactgcttctgtcatcaagatcttgactgtgaaatga

SEQ ID NO: 47 - protein, 501 aa, Glycine max
MATRVVAEQKPKTKIVCTLGPASRSVPMIEKLLRAGMNVARFNFSHGSHEYHQETLDNLRAAMENTGILCAVMLDTKGPEIRTGFLKDSKPIQLKQGNEITISTDYDLKGDEKTICMSYKKLPEDVRPGMVILCADGTISFTVLSCDKQAGLVQCRCENSATLGERKNVNLPGVIVDLPTLTDKDKEDILAWGVPNKIDMIALSFVRKGSDLVEVRKVLGKHAKNIMLMSKVENQEGVANFDEILANSDAFMVARGDLGMEIPIEKIFLAQKVMIYKCNIQGKPVVTATQMLESMIKSPRPTRAEATDVANAVLDGTDCVMLSGETAAGAYPDLAVRTMAKICIEAESTLDYGDVFKRIMEHSPVPMSPLESLASSAVRTANSARAALILVLTRGGSTAKLVAKYRPGMPILSVVVPELKTDTFDWACSDEAPARHSLIFRGLVPVLSAASARASHAETTEEAIEFAMQHAKSKGLCHNGDSVVALHRVGTASVIKILTVK

SEQ ID NO: 48 - DNA, 1500 bp, Glycine max
  CDS (1)..(1500)
atgttagggagaaattgtgggaagttgaagaccaagattgtgtgcactttgggaccatcaagtaggtcagtggagatgctggagaagcttctgaaggcagggatgaacgtggctcgcttcaacttctctcatggcactcactcttaccaccaagagacccttgataatctcagaactgcaatgaacaacaccggcattctctgtgctgtcatgttggacaccaagggtccagagatcagaactgggtttttgaatgaagggaagccaatacaaatccataggggacaagaaatcacaatcacaactgattacagcataaagggtgatgagaacatgatcagcatgagctacaagaagttggcacaccatttgagtccagggagtaatattctgtgtgctgatgggacaattagtttcactgtgctagaatgtgacaaagagaatggcttggttcgatgtcattgcgaaaattctgcagttctgggggagaggaagaatgttaaccttcctggagtggttgttgatcttccaatcttgacagagaaggacaaggaggacattttggagtggggggttcctaataagattgatatcattgctctctcttttgttagaaaaggttcagaccttgtggaggtcagaaatctacttggaaagcatgcaaaaagcatacttctcatgtccaaggttgaaaatcaagagggtgttgcaaattttgatgaaatactggaaaattcagatgcattcatggtggcaagaggtgacctgggaatggaaattccaattgagaagatctttctagctcagaaagttatgatacacaagtcaaacattaaaggcaagcctgtggtgacagccacccagatgttagagtccatgatcaaatctcctcggcctacacgagccgaggccaccgatgttgccaatgcagtccttgatggcacagactgtgttatgcttagcggggaaactgctgcaggagcctatccagacattgctgtccaaaccatggccagaatctgttcagaggcagagagtttcatagactatggtgacctattcaagagagtgatggaaacagctccaactccaatgagtcctttggagagcatggcttcagcggcagttaggactgcaaattgcatcaatgctgcactcatcttagttctaactagaggaggaaccacttcaaaacttgtggcaaagtatagacccagcatgcctattctgtcactggtggttcctgagataacaacagattcttttgaatggttctgcagtcaggaagcccctgcaaggcatagccttatctaccggggactaatacctgttttgggcacaggttcttttggagattccatgactgaatcaacagaagaaaccatacagcttgctctttcatatgcaaagaaaaatgacttgtgcaagcctggagactctgttgtagcacttcaccgtcttgagtctggtactgtcatcaagatattggatgtttgttaa

SEQ ID NO: 49 - protein, 499 aa, Glycine max
MLGRNCGKLKTKIVCTLGPSSRSVEMLEKLLKAGMNVARFNFSHGTHSYHQETLDNLRTAMNNTGILCAVMLDTKGPEIRTGFLNEGKPIQIHRGQEITITTDYSIKGDENMISMSYKKLAHHLSPGSNILCADGTISFTVLECDKENGLVRCHCENSAVLGERKNVNLPGVVVDLPILTEKDKEDILEWGVPNKIDIIALSFVRKGSDLVEVRNLLGKHAKSILLMSKVENQEGVANFDEILENSDAFMVARGDLGMEIPIEKIFLAQKVMIHKSNIKGKPVVTATQMLESMIKSPRPTRAEATDVANAVLDGTDCVMLSGETAAGAYPDIAVQTMARICSEAESFIDYGDLFKRVMETAPTPMSPLESMASAAVRTANCINAALILVLTRGGTTSKLVAKYRPSMPILSLVVPEITTDSFEWFCSQEAPARHSLIYRGLIPVLGTGSFGDSMTESTEETIQLALSYAKKNDLCKPGDSVVALHRLESGTVIKILDVC

SEQ ID NO: 50 - DNA, 1533 bp, Glycine max
  CDS (1)..(1533)
atggcgaacatagacatcgaagggatcttgaagcagcagcctgatgatgggcgcgttccgaagacgaaaatagtgtgtactttgggccccgcttctcgatccgtggaaatgactgagaagcttcttagggctgggatgaacgttgctcgtttcaatttctctcatggcacccacgactatcatcaggaaaccctcaacaatctcaagactgctatgcacaacactggtatactctgtgccgtcatgcttgacactaagggacctgagattcggactggttttctgaaagatggaaaacctattcaacttaaggaaggacaagaaatcaccataactactgattatgacattaagggggatcaggagatgatatccatgagttacaagaagctgcctgtccacttgaagcctggaaacaccatattgtgctctgatgggacgattactctcactgtcttatcttgtgatcctgatgctggtactgttagatgtcgttgtgaaaacactgctacgttgggtgagagaaaaaatgttaaccttcctggtgttgttgttgatctccccacacttactgagaaggataaggaagatattcttcaatggggtgtacccaacaagattgacatgattgctctttcatttgttcgcaaaggctcagatcttgttaatgtccgcaaggttctggggccacatgcaaagactattcagttgatgtctaaggttgagaatcaggaaggagtcctgaattttgacgaaatcctgcgcgagactgatgcattcatggtggcacgaggtgatcttggaatggagatcccagttgaaaagatattcctggcgcagaagatgatgatatacaagtgtaatctggttgggaagccagtggtgactgctacccaaatgcttgaatcaatgataaagtctcccaggccaacccgagctgaagcaactgacgtagccaatgcagttcttgatggaacagattgtgtgatgcttagtggtgaaagtgctgctggggcatacccagaacttgctgtgaaaatcatggctcgtatctgcattgaagcagaatcatcccttgactatggtgccatcttcaaagagatgataaggtctacaccattgccaatgagtccattggagagccttgcatcatctgctgtccgcacagcaaacaaggccaaagcaaaactcattgttgtactgacacgtggcgggtctacagctaagttggttgctaagtataggccagcggttccaatattatcggtggtggttccagtgttgagcacagactcatttgattggacatgcagtgatgagacgccagcaaggcacagcttgatatataggggcttgattccaatattgggggagggatccgccaaggctactgatgcagaatctacagaggtcattctcgaagctgctcttaagtccgcaacacaaaggggcctttgtaagcctggtgatgcagttgttgccctgcatcgtattggcactgcctctgtcataaagatctgcatagtcaaataa

SEQ ID NO: 51 - protein, 510 aa, Glycine max
MANIDIEGILKQQPDDGRVPKTKIVCTLGPASRSVEMTEKLLRAGMNVARFNFSHGTHDYHQETLNNLKTAMHNTGILCAVMLDTKGPEIRTGFLKDGKPIQLKEGQEITITTDYDIKGDQEMISMSYKKLPVHLKPGNTILCSDGTITLTVLSCDPDAGTVRCRCENTATLGERKNVNLPGVVVDLPTLTEKDKEDILQWGVPNKIDMIALSFVRKGSDLVNVRKVLGPHAKTIQLMSKVENQEGVLNFDEILRETDAFMVARGDLGMEIPVEKIFLAQKMMIYKCNLVGKPVVTATQMLESMIKSPRPTRAEATDVANAVLDGTDCVMLSGESAAGAYPELAVKIMARICIEAESSLDYGAIFKEMIRSTPLPMSPLESLASSAVRTANKAKAKLIVVLTRGGSTAKLVAKYRPAVPILSVVVPVLSTDSFDWTCSDETPARHSLIYRGLIPILGEGSAKATDAESTEVILEAALKSATQRGLCKPGDAVVALHRIGTASVIKICIVK

SEQ ID NO: 52 - DNA, 1734 bp, Glycine max
  CDS (1)..(1734)
atggctcaggtcgtggcttcacgatccattcaaagcaccccattgtgccccacttctggatctgcacgtgacagaacccaaaacctgttaaagcctccatcttttgcttccaaggtgttcccattgggagagaacaataacaaacgctccaaactcaggctcagaagccttcagatcagtgcaaggaaatctgccccttctgaagtcatccccatgtcacccgaagatgatccaaaaattgaggagcatttgcaacatttacgtggggtgcagccatttggtgagaactctgttggaatgtggtctaagccaacgtttaggcgcaagacgaagatagtgtgcaccattggaccttctaccaatacgagggaaatgatttggaagctggctgaggctggcatgaatgttgctcggttgaatatgtctcatggggaccatgcttctcatcagaaagttattgacttggttaaggagtataatgcttctcatgaagacaatgtgattgcaatcatgcttgacacaaagggtcctgaagttaggagtggggatttgccacaaccaattacattaatgcctgggcaggaattcacttttactattcagagaggtgttggaactgctgattgtgttagtgtgaactacgatgattttgtgaatgatgtggaaatgggggacatgcttcttgtcgatggtggtatgatgtctatggttgttaagtctaagacagaggattctgtgaaatgtgaagttgttgatggaggagagctcaagtcaaggcgacatttgaacgttagaggaaaaagtgcaacactaccttcaatcactgagaaggattgggatgatatcaagtttggagtggataacaaagttgacttctatgctgtttcctttgttaaggatgctgaagttgttcatgaactgaagaattatttgaagagctgcggtgctgatatacatgtcatcgtaaaaattgaaagtgcagactctataccaaatttgcattcaattatcactgcatctgatggggcaatggttgccagaggagatcttggcgctgagctccctattgaagaggttccacttttgcaggaagagataatcaacttgtgtcgtagcatgggaaaggctgttattgtggcaacaaatatgctagaaagcatgattgttcacccaactccaaccagagcagaggtatcagatatagcaattgcagttcgtgaaggttctgatggaataatgttgtctggagaaacagctcatggaaagttcccactaaaagctgtgcaagtaatgcacacagtagcattgcggacagaagccactataccaggtggtaaaatgccacctaacattggtcaagtgttgaagaaccacatgagtgagatgtttgcataccatgcaaccatgatgtctaacacccttggaacctcaactgttgtcttcactagaacgggtttcatggctgtccttctgagtcactatcgtccttctgggaccatatttgcttttacagatgagaagagggtacaacagaggctggctttgtatcaaggagtctgtcccatatacatggaattctgtgatgattctgaggcaacttttagaagagccttggatttgctgcagaagcaagcaatggtgaaggaaggagaagaagtagcacttgtacaaagtggtaggcaacccatatggaggttccaatccacgcacaatatccaggttaggaaagtgtaa

SEQ ID NO: 53 - protein, 577 aa, Glycine max
MAQVVASRSIQSTPLCPTSGSARDRTQNLLKPPSFASKVFPLGENNNKRSKLRLRSLQISARKSAPSEVIPMSPEDDPKIEEHLQHLRGVQPFGENSVGMWSKPTFRRKTKIVCTIGPSTNTREMIWKLAEAGMNVARLNMSHGDHASHQKVIDLVKEYNASHEDNVIAIMLDTKGPEVRSGDLPQPITLMPGQEFTFTIQRGVGTADCVSVNYDDFVNDVEMGDMLLVDGGMMSMVVKSKTEDSVKCEVVDGGELKSRRHLNVRGKSATLPSITEKDWDDIKFGVDNKVDFYAVSFVKDAEVVHELKNYLKSCGADIHVIVKIESADSIPNLHSIITASDGAMVARGDLGAELPIEEVPLLQEEIINLCRSMGKAVIVATNMLESMIVHPTPTRAEVSDIAIAVREGSDGIMLSGETAHGKFPLKAVQVMHTVALRTEATIPGGKMPPNIGQVLKNHMSEMFAYHATMMSNTLGTSTVVFTRTGFMAVLLSHYRPSGTIFAFTDEKRVQQRLALYQGVCPIYMEFCDDSEATFRRALDLLQKQAMVKEGEEVALVQSGRQPIWRFQSTHNIQVRKV

SEQ ID NO: 54 - DNA, 1922 bp, Zea mays
  CDS (148)..(1677)
cccggggaagaatccttctcgacgccgcccccattcattcttggagggcaagaagaacgcgcagtccaaaagcgaaacaaggggaaggggcgaggcagccaaacgaatcccagcacctgcctctcctttgcttgcgcagatctagcgatggcggcgggcggtgagttggcgtggggggaggagcccgtggcgcggcgccggcctaagaccaagatcgtctgcacgctcggcccggcgtcgcgatccgtcgagatgatctcgcgcctgctgcgcgccgggatgtgcgtcgcgcgcttcaacttctcccatggctcccacgagtaccaccaggagacgctcgacaacctgcacgccgccatggagctcaccgggatcctctgcgccgttatgctcgacaccaagggtccagagattagaactggatttttgaaagatgggaagcctattcaattgataaaaggccaagaaatcacaatttctacagactatagcattcagggtgatgagaaaatgatatcaatgagctacaagaagcttgctgttgatctgaagccaggcagtgtcatattgtgtgctgatggtaccatcactcttactgttcttcactgtgataaagaacaaggcttggttcgctgccgctgtgagaacactttcaagcttggcgagaggaagaatgttaatcttccaggagttattgttgatctccccacactcacagacaaggacaaggaggacatccttaaatggggtgttccaaacaagattgacatgattgccttgtcatttgttcggaagggttcggatcttgtggaggttaggaaggtacttggtgagcatgccaagtccataatgctgatgtcaaaggttgagaatcaagagggagtagctaactttgatgatatcctggcaaactctgatgcttttatggtggcaagaggtgatttaggaatggaaattcctatagagaagattttctttgcacagaaggtgatgattttcaagtgcaatattcaaggcaagcctgttgtgactgcaacccagatgttggaatctatgatcaagtctcctcgccctactcgggcagaagcaacggatgttgcaaacgcagttcttgatggcacagactgtgttatgctcagtggtgagactgctgctggggcttatccagggttggcggtgcagactatggctaagatctgcctgcaagcagagtcttgcgtagaccatgctgctattttcaaatcaatcatggcttcagctccaattccaatgagtccattggagagccttgcatcatcagctgttcgcacagcaaactctgccagggcagcacttatcttggtcctgaccaggggaggaactactgctaggcttgtagccaagtataggccatccatgccgattctgtccgttgtggttcctgagctgaagacagactcgttcgactgggcctgcagtgacgagggtccggcaaggcacagcctcattgtgaggggtgtcatcccaatgctgagtgccgccactgccaaggcctttgacaacgaagccactgacgaagctattggttttgccattgaaaatgcgaagacgatggggctatgcaacaccggtcaatccgttgtggccctgcaccgcatcgggatttcatccgtcatcaagcttcttactgtgaagtaggggtccaagggtgagggacaccattttgcttggtgaatttttgtgaggctgcttacgcacatcagcgtatccacagcttttctgttgccaaagatacagactttgcgttctggtacaccttggtgttacaaggttgtgggaatttgtcgtttagatattagcgatttaaacagtttatcaactgctatagctaattaatttgcagctgtgctgcaactttatcgtactgaaaaaaaaaaaaaaaa

SEQ ID NO: 55 - protein, 509 aa, Zea mays
MAAGGELAWGEEPVARRRPKTKIVCTLGPASRSVEMISRLLRAGMCVARFNFSHGSHEYHQETLDNLHAAMELTGILCAVMLDTKGPEIRTGFLKDGKPIQLIKGQEITISTDYSIQGDEKMISMSYKKLAVDLKPGSVILCADGTITLTVLHCDKEQGLVRCRCENTFKLGERKNVNLPGVIVDLPTLTDKDKEDILKWGVPNKIDMIALSFVRKGSDLVEVRKVLGEHAKSIMLMSKVENQEGVANFDDILANSDAFMVARGDLGMEIPIEKIFFAQKVMIFKCNIQGKPVVTATQMLESMIKSPRPTRAEATDVANAVLDGTDCVMLSGETAAGAYPGLAVQTMAKICLQAESCVDHAAIFKSIMASAPIPMSPLESLASSAVRTANSARAALILVLTRGGTTARLVAKYRPSMPILSVVVPELKTDSFDWACSDEGPARHSLIVRGVIPMLSAATAKAFDNEATDEAIGFAIENAKTMGLCNTGQSVVALHRIGISSVIKLLTVK

SEQ ID NO: 56 - DNA, 1509 bp, Glycine max
  CDS (1)..(1509)
atggctacgacgagggtggtggcggaacagaagccgaagacgaagattgtgtgcacgctgggccccgcatcgcgctctgtcccaatgatcgagaagcttctgcgggcgggcatgaacgtggctcgcttcaacttctcccatgggtcccacgagtaccaccaggaaaccctcgacaacctccgcgccgccatggagaacaccggtattctctgcgccgtcatgctcgacaccaaggggcctgagattcgaactgggtttctcaaggacagtaagcctatccaactgatacaaggtaatgaaataaccatttccactgactatgacctaaagggtgatgagaagacgatttgtatgagctacaaaaagctgcctgaggatgtgaagcccgggatggtcatactctgcgcggatggcaccatatcatttacagttttatcatgtgacaaacaagcaggtttggttcaatgccgatgtgagaactctgccactcttggtgagaggaagaatgttaatttgcctggagtgatagtggatctcccaactttgacagacaaagacaaggaagatatcttggcctggggagttccgaataaaattgacatgattgctctttcttttgttcgaaaaggttctgacctggtggaagtcaggaaagttctgggaaaacatgctaagaacattatgctcatgtctaaggttgaaaaccaagaaggggttgcaaattttgatgaaatccttgcaaattcagatgcatttatggtggcacgtggtgaccttggaatggaaattccaatagagaagatatttctcgcacagaaagtgatgatttacaagtgcaacatccaaggaaaaccagttgtcactgcaacccagatgttggagtcaatgatcaaatctcccaggccaaccagggccgaagctactgatgttgccaatgcagttctggatggcacagactgtgtgatgcttagtggtgaaaccgctgctggagcctatccagaccttgctgttcaaacaatggctaaaatatgcattgaagcagagagcacccttgactatggtgatgtgttcaaaaggattatggagcactcaccggtacccatgagcccattagagagtctagcttcttctgctgttagaacagccaactcggctagagcggctcttatcttggttttaactagaggagggagtactgcaaaattggtggctaaatacaggccagggatgccaattctttccgtggttgttcccgagcttaagaccgatacctttgactgggcatgcagtgatgaggcccctgcgagacatagccttatattccgcgggttggttcccgtgttgagtgcagcttctgctagagcttctcatgctgaaacaacagaagaagcaatagaattcgccatgcaacatgccaagtccaagggtctctgccacaacggggattcagtggtggcactgcatcgtgtgggcactgcatctatcatcaagatcttgactgtgaaatga

SEQ ID NO: 57 - protein, 502 aa, Glycine max
MATTRVVAEQKPKTKIVCTLGPASRSVPMIEKLLRAGMNVARFNFSHGSHEYHQETLDNLRAAMENTGILCAVMLDTKGPEIRTGFLKDSKPIQLIQGNEITISTDYDLKGDEKTICMSYKKLPEDVKPGMVILCADGTISFTVLSCDKQAGLVQCRCENSATLGERKNVNLPGVIVDLPTLTDKDKEDILAWGVPNKIDMIALSFVRKGSDLVEVRKVLGKHAKNIMLMSKVENQEGVANFDEILANSDAFMVARGDLGMEIPIEKIFLAQKVMIYKCNIQGKPVVTATQMLESMIKSPRPTRAEATDVANAVLDGTDCVMLSGETAAGAYPDLAVQTMAKICIEAESTLDYGDVFKRIMEHSPVPMSPLESLASSAVRTANSARAALILVLTRGGSTAKLVAKYRPGMPILSVVVPELKTDTFDWACSDEAPARHSLIFRGLVPVLSAASARASHAETTEEAIEFAMQHAKSKGLCHNGDSVVALHRVGTASIIKILTVK

SEQ ID NO: 58 - DNA, 1983 bp, Zea mays
  CDS (144)..(1673)
gcacgagcgcacgagcgacgccgcccccattcattcttggagggcaagaagaacgcgcagtccaaaagcgaaacaaggggaaggggcgaggcagccaaacgaatcccagcacctgcctctcctttgcttgcgcagatctagcgatggcggcgggcggtgagttggcgtggggggaggagcccgtggcgcggcgccggcctaagaccaagatcgtctgcacgctcggcccggcgtcgcgatccgtcgagatgatctcgcgcctgctgcgcgccgggatgtgcgtcgcgcgcttcaacttctcccatggctcccacgagtaccaccaggagacgctcgacaacctgcacgccgccatggagctcaccgggatcctctgcgccgttatgctcgacaccaagggtccagagattagaactggatttttgaaagatgggaagcctattcaattgataaaaggccaagaaatcacaatttctacagactatagcattcagggtgatgagaaaatgatatcaatgagctacaagaagcttgctgttgatctgaagccaggcagtgtcatattgtgtgctgatggtaccatcactcttactgttcttcactgtgataaagaacaaggcttggttcgctgccgctgtgagaacactttcaagcttggcgagaggaagaatgttaatcttccaggagttattgttgatctccccacactcacagacaaggacaaggaggacatccttaaatggggtgttccaaacaagattgacatgattgccttgtcatttgttcggaagggttcggatcttgtggaggttaggaaggtacttggtgagcatgccaagtccataatgctgatgtcaaaggttgagaatcaagagggagtagctaactttgatgatatcctggcaaactctgatgcttttatggtggcaagaggtgatttaggaatggaaattcctatagagaagattttctttgcacagaaggtgatgattttcaagtgcaatattcaaggcaagcctgttgtgactgcaacccagatgttggaatctatgatcaagtctcctcgccctactcgggcagaagcaacggatgttgcaaacgcagttcttgatggcacagactgtgttatgctcagtggtgagactgctgctggggcttatccagagttggcggtgcagactatggctaagatctgcctgcaagcagagtcttgcgtagaccatgctgctattttcaaatcaatcatggcttcagctccaattccaatgagtccattggagagccttgcatcatcagctgttcgcacagcaaactctgccagggcagcacttatcttggtcctgaccaggggaggaactactgctaggcttgtagccaagtataggccatccatgccgattctgtccgttgtggttcctgagctgaagacagactcgttcgactgggcctgcagtgacgagggtccggcaaggcacagcctcattgtgaggggtgtcatcccaatgctgagtgccgccactgccaaggcctttgacaacgaagccactgacgaagctattggttttgccattgaaaatgcgaagacgatggggctatgcaacaccggtcaatccgttgtggccctgcaccgcatcgggatttcatccgtcatcaagcttcttactgtgaagtaggggtccaagggtgagggacaccattttgcttggtgaatttttgtgaggctgcttacgcacatcagcgtatccacagcttttctgttgccaaagatacagactttgcgttctggtacaccttggtgttacaaggttgtgggaatttgtcgtttagatattagcgatttaaacagtttatcaactgctatagctaattaatttgcagctgtgctgcaactttatcgtactgaaaattttatgtttgtttcacaaaaaaaaaaaaaaaaaaaaaaaaaaaaaaaaaaaaaaaaaaaaaaaaaaaaaaaaaaaa

SEQ ID NO: 59 - protein, 509 aa, Zea mays
MAAGGELAWGEEPVARRRPKTKIVCTLGPASRSVEMISRLLRAGMCVARFNFSHGSHEYHQETLDNLHAAMELTGILCAVMLDTKGPEIRTGFLKDGKPIQLIKGQEITISTDYSIQGDEKMISMSYKKLAVDLKPGSVILCADGTITLTVLHCDKEQGLVRCRCENTFKLGERKNVNLPGVIVDLPTLTDKDKEDILKWGVPNKIDMIALSFVRKGSDLVEVRKVLGEHAKSIMLMSKVENQEGVANFDDILANSDAFMVARGDLGMEIPIEKIFFAQKVMIFKCNIQGKPVVTATQMLESMIKSPRPTRAEATDVANAVLDGTDCVMLSGETAAGAYPELAVQTMAKICLQAESCVDHAAIFKSIMASAPIPMSPLESLASSAVRTANSARAALILVLTRGGTTARLVAKYRPSMPILSVVVPELKTDSFDWACSDEGPARHSLIVRGVIPMLSAATAKAFDNEATDEAIGFAIENAKTMGLCNTGQSVVALHRIGISSVIKLLTVK

SEQ ID NO: 60 - DNA, 1984 bp, Sorghum bicolor
  CDS (202)..(1710)
gtcctcgtcgcccacggaatcgcaattccacaccttcctagcagtctcctcaaagcgcccccattcattcttagcagatctcgctgctttccgccgctcgacgccgacgccgacgccgacgcagacgccaccaccgcttccccccattcccccgtcccggaccgcggagcagagagggagagagatccggagcggcgcgcgatggcgaacatcgacatggcgaagatcctggcggacctggaccgcggcgccggcgacgcgcgggtgcccaagaccaagctcgtctgcacgctcggcccggcctcccgcaccgtgcctatgctcgagaagctgcttcgcgccggcatgaacgtcgcgcgcttcaacttctcccacggcacccacgagtaccaccaggagacgctcgacaacctccgacaggccatgcacaacaccggcatcctctgcgccgtcatgctcgacaccaagggtcctgagattcgtacagggtttttgaaggatggtaaaccaattaagctaaccaagggtcaagaaatcactgtcaccactgattatgatatcaagggtgatgaaaatatgattgctatgagttacaagaaactgcctgttgacgtgaagcctggaaatgtcatactctgcgcagatggtactatctctctggccgttctgtcttgcgatcctgatgctggaactgtgaggtggaggtgtgtgaaccctccagggcttggtgtgggtctccccacactcacagacaaggacaaggaggacatccttaagtggggtgttccaaacaagattgacatgattgccttgtcatttgttcggaagggttcggatcttgtggaggttaggaaggtacttggcgagcatgccaagtccataatgctgatgtcaaaggttgagaatcaagagggagtagctaactttgatgatatcctggcaaactctgatgcttttatggtggcaagaggtgatttagggatggaaattcctatagagaagattttctttgcacagaaggtgatgattttcaagtgcaatattcaaggcaagcctgttgtgactgcaacccagatgttggaatctatgatcaagtctcctcgccctactcgggcagaagcaaccgatgttgcaaacgcagttcttgatggcacgggtcctgtcatgcttagtggcgagactgctgctggggcttatccagagctggcggtgcagactatggccaagatctgcctacaagcagagtcttgtgtagaccatgcttctgttttcaaatcaatcatggcttcagctccaattccaatgagcccattggagagccttgcatcatcagctgtccgcacagcaaactctgccaaggcagcacttatcttagtcctgaccaggggaggaacaactgctaggcttgtggccaagtataggccatccatgccgattctgtccgttgtggttcctgagctgaagacagactcgttcgactggacctgcagtgacgaggggccggcaaggcacagcctcattgtgaggggtgttatcccaatgctgagtgctggcactgccaaggcctttgacaatgaagccactgaagaagctcttggttttgccattgaaaatgcaaaggcgatggggctatgcaacaccggtgagtccgttgtggcccttcaccgcatcgggactgcatccgtcatcaagctcctgactgtgaactagggtctagccgaagggggagccacaccactttgtttggtggaatttttgtgaggctgcttacgcatatcagcgaatctgcagcttttttgttgccaaagatacagactttgggttctggtacaccttggtgtcacaaggttgtgggaatttgtcatttagatgttagtgatttaaacagttatcaactgctatagctaattaatttgcactgtgttgcaactgctatcgtactgaaaactttatggttgcttcaccatgtttgctggttgatttt

SEQ ID NO: 61 - protein, 502 aa, Sorghum bicolor
MANIDMAKILADLDRGAGDARVPKTKLVCTLGPASRTVPMLEKLLRAGMNVARFNFSHGTHEYHQETLDNLRQAMHNTGILCAVMLDTKGPEIRTGFLKDGKPIKLTKGQEITVTTDYDIKGDENMIAMSYKKLPVDVKPGNVILCADGTISLAVLSCDPDAGTVRWRCVNPPGLGVGLPTLTDKDKEDILKWGVPNKIDMIALSFVRKGSDLVEVRKVLGEHAKSIMLMSKVENQEGVANFDDILANSDAFMVARGDLGMEIPIEKIFFAQKVMIFKCNIQGKPVVTATQMLESMIKSPRPTRAEATDVANAVLDGTGPVMLSGETAAGAYPELAVQTMAKICLQAESCVDHASVFKSIMASAPIPMSPLESLASSAVRTANSAKAALILVLTRGGTTARLVAKYRPSMPILSVVVPELKTDSFDWTCSDEGPARHSLIVRGVIPMLSAGTAKAFDNEATEEALGFAIENAKAMGLCNTGESVVALHRIGTASVIKLLTVN

SEQ ID NO: 62 - DNA, 1741 bp, Gossypium hirsutum
  CDS (89)..(1609)
ctaattttcaacctttactcttctgtgtgaggagaaaaaggaaaaacctttccacaaatctctatctgcatctgctttgaaactaaaaatggaaatcaataaccaccatgaaggaggtttcgaaatggagaagaagcccaagacgaagatcgtatgcactctgggtcctgcatccaggtccgtccctatgatcgagaagctgttgagggccggcatgaacgtcgctcgtttcaacttctctcatggatctcatgcctaccatcaggaaacccttgacaatctcagggcagctatgctcaacaccggtattctctgcgccgtcatgctcgataccaagggtcccgagatccgaactggttttcttaaggatggaaaaattcagctcaaacagggtcaagaaatcaccataacaactgactatagcataaagggtgatgagacactgataagtatgagttacaaaaagttggccgaggatgtcaaaccagggatggtcatactttgtgcagatgggacaatctcttttacagtcttatcttgtgacaaacaaaagggtttggttcactgtcgctgtgagaattctgcagttcttggtgagaggaagaacgttaatcttccaggggtcgttgttgacctcccaaccttgactgaaaaggacaaggaagatatcttggaatggggagttccgaaccaaattgacatgattgctctttcttttgttcgaaaaggatcagacctcgtggaggttcggaagctgcttggaaagcatgctaagaatattcttctcatgtcgaaggttgaaaatcaagaaggggtagcaaattttgatgacatccttacaaattcagatgcatttatggtggcacgaggtgaccttggaatggagattcccattgaaaagatatttctagcacagaaggtgatgatttacaagtgtaacatccaaggaaaacctgttgtcactgcaacacagatgttggaatccatgataaagtctccccggccaaccagggctgaggccactgacgttgccaatgcagttcttgatggcacagactgtgtgatgttaagtggtgaaaccgcagctggagcttacccggaacttgcagttcgaaccatggccaaaatatgcgtagaagcagaaagcacacttgattatggagatgtcttcaaaaggattatggaacactcaccggtgccaatgagtccattggaaagcctggcttcttcagctgttagaacagcaaattcagcaaaagcagctcttatattggtcttaaccaggggaggaagtaccgcaaagctggtggctaagtacaggcctggcatacccattttatccgtggttgtccctgagatccagactgattcgttcgattggtcgtgcagtgatgaaactccagcaaggcacagcttagtctttcgtggtttgatcccggttttatatgctggatctgcaagagcttctcatgaagagacaacaggggaagcattggagtttgctattcagcatgccaagacaaagggtctctgccaaaatggggattccattgttgcactgcatcggattggaactgcatctgtaattaagatcttgaatgtaaagtgaattgacttggtgatttccgcttcactttcagactttctgtccatggcactacttactttttcagttttagatgcaacaaacgtgattaacaagatgactaataaataaaatgggctgatgatttgcgttctt

SEQ ID NO: 63 - protein, 506 aa, Gossypium hirsutum
MEINNHHEGGFEMEKKPKTKIVCTLGPASRSVPMIEKLLRAGMNVARFNFSHGSHAYHQETLDNLRAAMLNTGILCAVMLDTKGPEIRTGFLKDGKIQLKQGQEITITTDYSIKGDETLISMSYKKLAEDVKPGMVILCADGTISFTVLSCDKQKGLVHCRCENSAVLGERKNVNLPGVVVDLPTLTEKDKEDILEWGVPNQIDMIALSFVRKGSDLVEVRKLLGKHAKNILLMSKVENQEGVANFDDILTNSDAFMVARGDLGMEIPIEKIFLAQKVMIYKCNIQGKPVVTATQMLESMIKSPRPTRAEATDVANAVLDGTDCVMLSGETAAGAYPELAVRTMAKICVEAESTLDYGDVFKRIMEHSPVPMSPLESLASSAVRTANSAKAALILVLTRGGSTAKLVAKYRPGIPILSVVVPEIQTDSFDWSCSDETPARHSLVFRGLIPVLYAGSARASHEETTGEALEFAIQHAKTKGLCQNGDSIVALHRIGTASVIKILNVK

SEQ ID NO: 64 - DNA, 1596 bp, Caenorhabditis elegans
  CDS (1)..(1596)
atgagtgacgattcgttccagaaagagcttgaagcttctggatatgataagcaagagcagaagctcgctgctgttccagccactacccatatggagcatttgtgtcgtttggacattcgtgaggctccacatctcgttcgtcagaccggaattatttgcacaattggaccagcttgtgccagtgttgaaatgcttcaaaaattgattctcaatggaatgaacattgctcgtctcaacttttcccatggatctcatgagtaccatgccggaaccatcgccaacgttcgtgaagctgccgattcattctctgacaagcgtgtcattggaattgctttggacacgaagggacctgaaatccgtactggacttcttgccggcggtgcttctgctgaaattgagcttgcacgaggagcatcaatccgtttgactactgatccacacttttctgaatcaggaactgctgtcaatctttttgttgattacaagaacattgccaaagttctttcggttggatcccgtgtctacattgatgacggacttatctcattgattgtcgaagaattgcaaactgacgctgtcatttgctctgttgaaaatggtggaatgttgggaagcagaaagggagtcaatcttccaggaactatcgttgatttgccagctgtttccgagaaggactgtaaggatttgcagtttggtgtggaacaaggtgttgatatcatctttgcttcattcatccgaaacgctgaaggaattcgtacgattcgtaaagttctcggagagaaaggaaagaagattaagattattgcaaagattgagaatcaagaaggagttgataatgctgatgaaattatctctgaatctgatggagttatggttgctcgtggagatctcggtatcgaaattccagccgagaaggtgttccttgcacaaaagatgctcatctccaagtgtaatcgtgctggaaaacctgtcatttgtgcaactcagatgcttgaatcgatggttcacaagccacgtccaaccagagctgaaggatcagatgttgccaatgctgtgcttgacggagctgattgtgtgatgctttctggagagactgctaaaggagaatatccagttgatgcactcaagatcatgcattatatatgcaaagaagccgaagcagcagtttatcatcgtcgtctcttcgatgaacttcttcaaaacacacaaaaaccaactgacatgtctcatactattgctatcgctgccacatctgcagctgcatcgtgccatgcttcagcaattcttctcattaccaccactggacgctcggcaatccaatgctctcgctacaagccagccgtcccaattctgacaatctcgagagacgttgctgtgtgccgtcagcttcatctttacagaggagttttcccagttcattatccagctgaacgtgctgccgattggccaactgatgttgataacagaatcaaccatgctatcgccatcggaaaggatcgtggattcattcacaagggtgacttcttggttgttgtcactggatggagacagggagccggagctaccaacactcttcgtatcatcaccgccgaataa

SEQ ID NO: 65 - protein, 531 aa, Caenorhabditis elegans
MSDDSFQKELEASGYDKQEQKLAAVPATTHMEHLCRLDIREAPHLVRQTGIICTIGPACASVEMLQKLILNGMNIARLNFSHGSHEYHAGTIANVREAADSFSDKRVIGIALDTKGPEIRTGLLAGGASAEIELARGASIRLTTDPHFSESGTAVNLFVDYKNIAKVLSVGSRVYIDDGLISLIVEELQTDAVICSVENGGMLGSRKGVNLPGTIVDLPAVSEKDCKDLQFGVEQGVDIIFASFIRNAEGIRTIRKVLGEKGKKIKIIAKIENQEGVDNADEIISESDGVMVARGDLGIEIPAEKVFLAQKMLISKCNRAGKPVICATQMLESMVHKPRPTRAEGSDVANAVLDGADCVMLSGETAKGEYPVDALKIMHYICKEAEAAVYHRRLFDELLQNTQKPTDMSHTIAIAATSAAASCHASAILLITTTGRSAIQCSRYKPAVPILTISRDVAVCRQLHLYRGVFPVHYPAERAADWPTDVDNRINHAIAIGKDRGFIHKGDFLVVVTGWRQGAGATNTLRIITAE

SEQ ID NO: 66 - DNA, 1584 bp, Zea mays
  CDS (1)..(1584)
atgcattccacgaacctcctgctcgaggagcccatccggatggcctccatcctcgagccctccaagcccagctacttcccggcgatgaccaagatcgtcggcactctcggccccaagtcgcgctccgtcgacacgatctccgcctgcctcaaggccggcatgtccgtcgcccggttcgatttctcgtggggggacgccgcgtaccaccaggagacgctggagaacctcaagctctccatcaagtccaccaagaagctctgcgctgtcatgctcgacaccgtgggcccggagctgcaggtggtgaacaagagcgagaccccgatctccctcgaggagaatggcacggtcgttctcacccctcaccggggccaagacgcctcctccagcttgctgcccatcaacttctctggactcgccaaggcggtgacaccaggggcaacaatattcgtgggacaatacttgttcactggcagtgagaccacctcagtttggttggaggtttctgaagtgaaaggagatgatgtggtgtgtataatcaagaacacagccaccttggctgggtcactgttcacgctgcattgctcccagattcacattgacttgcccaccctgtctgatgaggataaggatgtcattagaaaatggggtactcccaataagattgacttcctttctctgtcctacacaagacatgcagaggatgtgcgccaggcacgggaattcctgtcaaaattgggcgatctaagccagactctgatttttgccaaaattgagaatgtcgagggcttgaaccaatttgatgaaatactggctgaggcagatggtatcattttatcaagagggaacctgggaattgatcttccacctgagaaggtctttttgtttcaaaaatctgctcttcacaagtgcaacatggctggaaagcctgctgttgtcactcgtgttgtggacagtatgactgacaacctcaggcctactcgagcggaggcaactgatgtggcaaatgcagtacttgatgggagtgatgccattctccttggtgctgagactctccgaggtttatatccagttgagactatttcgacagtgggcagaatttgtgctgaggctgagaaggtattcaaccaagatttatacttcaagcaaactgtgaaatatgtcggagaacccatgacccatttggagtccattgcttcctcagctgtgcgagctgctatcaaagttaaggcttcggtgatcatttgcttcacctcttctgggagggctgcaaggctcatcgccaagtacaggcccaccatgcctgttctttctgttgtcattcctcgtctgaagacaaaccaactgagatggagtttcactggtgcttttgaggcaagacagtcgctgatagttagaggcctctttccgatgcttgcagatcctcggcatccagccgaatcaaccagtaatacaaatgagtcagttctgaaggttgctctagaccatggcaaggcatgtggtgtgatcaagtcccatgaccgtgttgtcgtttgccagaaggtgggagattcatcggttgtgaagatcattgagctggacgactag

SEQ ID NO: 67 - protein, 527 aa, Zea mays
MHSTNLLLEEPIRMASILEPSKPSYFPAMTKIVGTLGPKSRSVDTISACLKAGMSVARFDFSWGDAAYHQETLENLKLSIKSTKKLCAVMLDTVGPELQVVNKSETPISLEENGTVVLTPHRGQDASSSLLPINFSGLAKAVTPGATIFVGQYLFTGSETTSVWLEVSEVKGDDVVCIIKNTATLAGSLFTLHCSQIHIDLPTLSDEDKDVIRKWGTPNKIDFLSLSYTRHAEDVRQAREFLSKLGDLSQTLIFAKIENVEGLNQFDEILAEADGIILSRGNLGIDLPPEKVFLFQKSALHKCNMAGKPAVVTRVVDSMTDNLRPTRAEATDVANAVLDGSDAILLGAETLRGLYPVETISTVGRICAEAEKVFNQDLYFKQTVKYVGEPMTHLESIASSAVRAAIKVKASVIICFTSSGRAARLIAKYRPTMPVLSVVIPRLKTNQLRWSFTGAFEARQSLIVRGLFPMLADPRHPAESTSNTNESVLKVALDHGKACGVIKSHDRVVVCQKVGDSSVVKIIELDD

SEQ ID NO: 68 - DNA, 1503 bp, Saccharomyces cerevisiae
  CDS (1)..(1503)
atgtctagattagaaagattgacctcattaaacgttgttgctggttctgacttgagaagaacctccatcattggtaccatcggtccaaagaccaacaacccagaaaccttggttgctttgagaaaggctggtttgaacattgtccgtatgaacttctctcacggttcttacgaataccacaagtctgtcattgacaacgccagaaagtccgaagaattgtacccaggtagaccattggccattgctttggacaccaagggtccagaaatcagaactggtaccaccaccaacgatgttgactacccaatcccaccaaaccacgaaatgatcttcaccaccgatgacaagtacgctaaggcttgtgacgacaagatcatgtacgttgactacaagaacatcaccaaggtcatctccgctggtagaatcatctacgttgatgatggtgttttgtctttccaagttttggaagtcgttgacgacaagactttgaaggtcaaggctttgaacgccggtaagatctgttcccacaagggtgtcaacttaccaggtaccgatgtcgatttgccagctttgtctgaaaaggacaaggaagatttgagattcggtgtcaagaacggtgtccacatggtcttcgcttctttcatcagaaccgccaacgatgttttgaccatcagagaagtcttgggtgaacaaggtaaggacgtcaagatcattgtcaagattgaaaaccaacaaggtgttaacaacttcgacgaaatcttgaaggtcactgacggtgttatggttgccagaggtgacttgggtattgaaatcccagccccagaagtcttggctgtccaaaagaaattgattgctaagtctaacttggctggtaagccagttatctgtgctacccaaatgttggaatccatgacttacaacccaagaccaaccagagctgaagtttccgatgtcggtaacgctatcttggatggtgctgactgtgttatgttgtctggtgaaaccgccaagggtaactacccaatcaacgccgttaccactatggctgaaaccgctgtcattgctgaacaagctatcgcttacttgccaaactacgatgacatgagaaactgtactccaaagccaacctccaccaccgaaaccgtcgctgcctccgctgtcgctgctgttttcgaacaaaaggccaaggctatcattgtcttgtccacttccggtaccaccccaagattggtttccaagtacagaccaaactgtccaatcatcttggttaccagatgcccaagagctgctagattctctcacttgtacagaggtgtcttcccattcgttttcgaaaaggaacctgtctctgactggactgatgatgttgaagcccgtatcaacttcggtattgaaaaggctaaggaattcggtatcttgaagaagggtgacacttacgtttccatccaaggtttcaaggccggtgctggtcactccaacactttgcaagtctctaccgtttaa

SEQ ID NO: 69 - protein, 500 aa, Saccharomyces cerevisiae
MSRLERLTSLNVVAGSDLRRTSIIGTIGPKTNNPETLVALRKAGLNIVRMNFSHGSYEYHKSVIDNARKSEELYPGRPLAIALDTKGPEIRTGTTTNDVDYPIPPNHEMIFTTDDKYAKACDDKIMYVDYKNITKVISAGRIIYVDDGVLSFQVLEVVDDKTLKVKALNAGKICSHKGVNLPGTDVDLPALSEKDKEDLRFGVKNGVHMVFASFIRTANDVLTIREVLGEQGKDVKIIVKIENQQGVNNFDEILKVTDGVMVARGDLGIEIPAPEVLAVQKKLIAKSNLAGKPVICATQMLESMTYNPRPTRAEVSDVGNAILDGADCVMLSGETAKGNYPINAVTTMAETAVIAEQAIAYLPNYDDMRNCTPKPTSTTETVAASAVAAVFEQKAKAIIVLSTSGTTPRLVSKYRPNCPIILVTRCPRAARFSHLYRGVFPFVFEKEPVSDWTDDVEARINFGIEKAKEFGILKKGDTYVSIQGFKAGAGHSNTLQVSTV

SEQ ID NO: 70 - DNA, 1521 bp, Saccharomyces cerevisiae
  CDS (1)..(1521)
atgccagagtccagattgcagagactagctaatttgaaaataggaactccgcagcagctcagacgcacctccataataggtaccattgggcccaagacaaatagctgcgaggccattactgctctgagaaaagctggtttgaacatcattcgattgaacttttcccatggctcctacgaattccatcaatcagtaatcgaaaatgctgtgaaatcggaacagcaattccctggcaggccgctcgccattgccctggataccaagggtcccgagatcagaacaggtcgcacgttaaatgaccaagatctttatatccccgtagaccaccaaatgatctttaccactgacgcaagttttgcaaacacctccaatgataaaatcatgtatatagactatgctaacctgacaaaagttatcgttccggggagatttatatacgtggacgacgggattctctcttttaaagtgctccaaatcattgacgaatctaatttaagggtgcaagcggtaaactcgggttatatcgcatctcataaaggtgttaatctgcctaataccgacgttgatttgccccccttgtccgccaaagacatgaaggacttgcaattcggagtccgcaatggcattcacatcgtatttgcctctttcataagaacttcagaagatgtgttgtctatcagaaaagcgttgggttctgaagggcaagatatcaagattatatccaagatagaaaaccagcaagggttggataattttgacgaaatcctggaagtcacggatggtgttatgatagcgagaggcgatttaggaattgaaatcctggcacctgaagtattagccattcaaaaaaagctgattgcaaaatgtaatttggcgggcaaacctgtcatttgcgcgactcagatgctggattcaatgacacacaatccgagaccgacaagggctgaagtatcggatgtgggtaacgctgtgttggatggtgctgattgtgttatgctttctggagaaacggcgaagggtgattatccggtgaatgcagttaatattatggcggcgaccgctctgattgctgaaagtactatcgctcatttggctctttatgacgatctcagagacgccactcccaaacctacttccactacggaaactgtagcagctgcagctaccgcagcaatcttggagcaagatggtaaggccatcgttgtattatctactacagggaacacggcaaggctactgtcgaagtatagaccaagctgccctatcatattagtaacaagacacgcaagaacggcaagaattgcgcatttgtatagaggtgttttcccatttctgtatgaaccgaaacgcctagacgactggggtgaggatgttcataggcgcctaaagtttggtgttgaaatggcgaggtctttcggaatggtggacaacggtgatactgttgtttccattcaaggattcaaaggaggagtcggccattccaataccttacgcatttctactgttggtcaagaattctag

SEQ ID NO: 71 - protein, 506 aa, Saccharomyces cerevisiae
MPESRLQRLANLKIGTPQQLRRTSIIGTIGPKTNSCEAITALRKAGLNIIRLNFSHGSYEFHQSVIENAVKSEQQFPGRPLAIALDTKGPEIRTGRTLNDQDLYIPVDHQMIFTTDASFANTSNDKIMYIDYANLTKVIVPGRFIYVDDGILSFKVLQIIDESNLRVQAVNSGYIASHKGVNLPNTDVDLPPLSAKDMKDLQFGVRNGIHIVFASFIRTSEDVLSIRKALGSEGQDIKIISKIENQQGLDNFDEILEVTDGVMIARGDLGIEILAPEVLAIQKKLIAKCNLAGKPVICATQMLDSMTHNPRPTRAEVSDVGNAVLDGADCVMLSGETAKGDYPVNAVNIMAATALIAESTIAHLALYDDLRDATPKPTSTTETVAAAATAAILEQDGKAIVVLSTTGNTARLLSKYRPSCPIILVTRHARTARIAHLYRGVFPFLYEPKRLDDWGEDVHRRLKFGVEMARSFGMVDNGDTVVSIQGFKGGVGHSNTLRISTVGQEF

SEQ ID NO: 72 - DNA, 1533 bp, Arabidopsis thaliana
  CDS (1)..(1533)
atggagaagttacttgctggacaaacaaacaatggatccctcaagtcaaagacgaagatcgtctgtactctcggaccggcttcgagatcggttgagatggttgagaagcttctcaaagccggtatgaacgtagcccggttcaacttctcccatggttctcactcataccatcaagaaactcttgacaatctcagaaccgccatggagaacacttgtattccctgtgccgtcatgctcgacaccaagggtcctgagatccgaaccgggtttctcaaagaaggcaaaccggttgagctaattcaaggtcaagagattacaatctcaactgattacaccatggaaggagattcaaacacaatctcaatgagttacaagaaacttgctgaagatctcaagtccggtgacgtgattctctgttccgacggtacaatctctcttaccgtcttgtcttgtgacaagaatctcggtcttgttcgtgcccgttgcgagaactctgcagttcttggagaaagaaagaacgtgaacctccctggaatcgtagttgatcttccaacactcacagagaaggatcaagaggatattctccaatggggagttccgaataagatcgatatcatcgctctttcctttgttcgtaaaggatctgatctggtcgaggtcaggaagttgcttggagagaacgcaaagagtatcatgctcatgtcaaaggtggagaatcaagaaggagtgatgaattttgacaagattctggaatattctgatgcattcatggtggctagaggtgatttaggaatggagattccgattgaaaagatgtttcttgctcagaagatgatgattcagaaggctaatgctcttgggaagccaatcgtcacagccacacagatgcttgagtcaatgaccaaatctcctcgtccaactagagcagaagccaccgatgtagctaacgctgtccttgacggcactgattgcgtcatgctcagtggagaaaccgccgccggagctcaccctgaaaccgccgtgctaacaatgtcaagaatctgtaaggaagcagaggatttcatcgattacgacacaatgcacaagaagattcaagatatcgtttcgttgcctttatctcctattgagagcttggccgcttcagccgtttcgacggcgaggagtctttgtgcggctgcgattgtcgttctaaccaagggaggttacacggtggagcttgtggccaagtacaggcctagtgttccgattctgtccgtaattgtgccggagattactcgtacggatgatttcgagtggtcgtgctctgaatctgcggctcatgtggcaagacgtggtttgatctaccgtggaattgttcctgtgatggcgacgggagcatccgctaggtcttcgaacaaggactcgacggaggagacgattcaattcgccattgaattcgcgaagaagaagggaatatgtaagacaggagactcgattgtggcgttgcacaagatcgatggctcctctgttgtcaagattttgaacgtggagtag

SEQ ID NO: 73 - protein, 510 aa, Arabidopsis thaliana
MEKLLAGQTNNGSLKSKTKIVCTLGPASRSVEMVEKLLKAGMNVARFNFSHGSHSYHQETLDNLRTAMENTCIPCAVMLDTKGPEIRTGFLKEGKPVELIQGQEITISTDYTMEGDSNTISMSYKKLAEDLKSGDVILCSDGTISLTVLSCDKNLGLVRARCENSAVLGERKNVNLPGIVVDLPTLTEKDQEDILQWGVPNKIDIIALSFVRKGSDLVEVRKLLGENAKSIMLMSKVENQEGVMNFDKILEYSDAFMVARGDLGMEIPIEKMFLAQKMMIQKANALGKPIVTATQMLESMTKSPRPTRAEATDVANAVLDGTDCVMLSGETAAGAHPETAVLTMSRICKEAEDFIDYDTMHKKIQDIVSLPLSPIESLAASAVSTARSLCAAAIVVLTKGGYTVELVAKYRPSVPILSVIVPEITRTDDFEWSCSESAAHVARRGLIYRGIVPVMATGASARSSNKDSTEETIQFAIEFAKKKGICKTGDSIVALHKIDGSSVVKILNVE

SEQ ID NO: 74 - DNA, 1494 bp, Arabidopsis thaliana
  CDS (1)..(1494)
atggagatgttacttggtggacaagcaaccaatggagctcttcgttcaaagacgaagatagtttgtactcttggaccagcttcaagatcggtggagatgattgagaagcttctcaaggctggtatgaacgtagcccggttcaatttctcccatggttctcactcttaccatcaagaaactctcgataatctcagaaccgccatggacaacactggtatcctctgcgccgtcatgctcgacacaaagagtcctgtgatacgaaccgggtttctcaaagaaggcaaaccgatacagctaaagcaaggtcaagagatcaccatctcaattgattacaagatacaaggagattccaacactatctccatgagctacaagaaacttgcagaggatctcaaacctggtgacgtgatcctttgttcagacggaacaatctctctaaatgtcttgtcctgtgacaagtatctcggtcttgttcgttgccgatgcgagaactctgctcttcttggagaaagaaaaaacgttaatcttcctggaattgtagttgatctcccaacactcactgagaaagataaagaagatattatgcaatggggagttccgaacaaaatcgacattatcgctctctcttttgttcgtaaaggatctgacctaatccaagtaaggaaattacttggagagcactcaaagagcatcatgcttatgtcaaaggtggagaatcaagaaggagtaatgaatttcgataagatcctggagaattctgatgctttcatggtggctagaggagatcttgggatggagataccaatcgaaaagatgtttcttgctcagaaaacaatgatcaacaaggctaatgctcatgggaaaccagtggtcacagccacacagatgcttgaatccatgacagtctctcctcgcccgactagagctgaagctaccgacgtagcaaacgcggttcttgacgggacagattgcgttatgcttagcggagaaactgctgctggagctcaccctgagactgccgtgttaacaatgtcaaggatctgcaaagaagcagaggatttcatagattacgacattctccacaagaaaaccctaggaatggtttcgttaccgttatctccaatcgagagcttagctgcttcagctgtttcgactgcgcggagtgttttcgcgtccgcgatcgttgttctcactagaggcggttacacggcggagcttgtggctaaatacaggccaagcgttccgattctgtcggtgattatgccagagattgctgaatgctcggactcggtagctcatgtggcgagacgtggtttgatttaccgtgggattattccggtggtgggatgttcagctagagattcaacggaggagatgattagattagctataggatttgccaagacgaagggaatttgtaagactggagattccattgtggctttgcacaagattgatggttcatctattgtcaggatagtgagcgtcgagtaa

SEQ ID NO: 75 - protein, 497 aa, Arabidopsis thaliana
MEMLLGGQATNGALRSKTKIVCTLGPASRSVEMIEKLLKAGMNVARFNFSHGSHSYHQETLDNLRTAMDNTGILCAVMLDTKSPVIRTGFLKEGKPIQLKQGQEITISIDYKIQGDSNTISMSYKKLAEDLKPGDVILCSDGTISLNVLSCDKYLGLVRCRCENSALLGERKNVNLPGIVVDLPTLTEKDKEDIMQWGVPNKIDIIALSFVRKGSDLIQVRKLLGEHSKSIMLMSKVENQEGVMNFDKILENSDAFMVARGDLGMEIPIEKMFLAQKTMINKANAHGKPVVTATQMLESMTVSPRPTRAEATDVANAVLDGTDCVMLSGETAAGAHPETAVLTMSRICKEAEDFIDYDILHKKTLGMVSLPLSPIESLAASAVSTARSVFASAIVVLTRGGYTAELVAKYRPSVPILSVIMPEIAECSDSVAHVARRGLIYRGIIPVVGCSARDSTEEMIRLAIGFAKTKGICKTGDSIVALHKIDGSSIVRIVSVE

SEQ ID NO: 76 - DNA, 1533 bp, Arabidopsis thaliana
  CDS (1)..(1533)
atggagatgttacttggtggacaagcaaccaatggagctcttcgttcaaagacgaagataatttgtactcttggaccggtttcaagatcggtggagatgattgagaagcttctcaaggctggtatgaacgtagcccggttcaatttctctcatggttctcactcttaccatcaagaaactctcgataatctccgaaccgccatggacaacactggtattctctccgccgtcatgctcgacacaaagggtcctgagatacgaaccgggtttctcaaagaaggcaaaccgatacagctaaaccaaggtcaagagatcaccatctcaattgattacatgatagaaggagattcaaacgttatctccatgagctacaagaaacttgcagaagacgtcaaacctggtgatgtgattctctgttcagacggcacaatctctttaactgtcttgtcctgtgacaagtctttcggtcttgttcgttgccgttgcgagaactctgcaattctaggagaaagaaaaaacgttaatcttcctggaattgtagttgatctcccaacacttactgagaaagataaagaagatatcatccaatggggagttccgaacaaaatcgacatcatcgctctttcttttgttcgtaaaggatctgacctaactgaagttaggaggttacttggagaacactcaaagaacatcatgctcatgtcaaaggtggagaatcaagaaggggtcatgaattgtgaaaagattctggagaattctgatgctttcatggtggctagaggagatcttggaatggagattccgatcgaaaagatgttccttgctcagaaaacaatgatcaagatggctaatgctcttgggaaaccagttgtcacagccacacagatgcttgaatccatgacagtatctcctcgtccgactagagctgaagccactgacgttgcaaacgctgttcttgacgggacagactgcgttatgcttagtggagaaaccgctgctggagctcaccctgaggctgccgtgctaacaatgtcaaggatctgtaaagaagcagaggatttcatcgattacgacattctccacaagaaaaccctaggaatggtttcgttaccgttatctccgatcgagagcttagctgcttcagttgtttcgacggcacagagtgtttttgcgtcggcgatcgttgttctcaccaaaggcggttacacggcggagcttgtggctaaatacaggccgagcgttccgattttgtcagtgattgtgccagagattgctcaagggaatgatatggagatgtcgtgctcagactcggtggctcatgcggcgagacgtggtttgatttaccgtaggattattccggtggtggcgacgggatcttcggctagggattcaaacaaagatgcaacggaggagatgattaatttggctatcggattcgcgaagacgaagggaatttgcaagaatggagattcgattgtggcgttgcacaagattgatggttcctctgttgttaagatagtgaccgtggagtaa

SEQ ID NO: 77 - protein, 510 aa, Arabidopsis thaliana
MEMLLGGQATNGALRSKTKIICTLGPVSRSVEMIEKLLKAGMNVARFNFSHGSHSYHQETLDNLRTAMDNTGILSAVMLDTKGPEIRTGFLKEGKPIQLNQGQEITISIDYMIEGDSNVISMSYKKLAEDVKPGDVILCSDGTISLTVLSCDKSFGLVRCRCENSAILGERKNVNLPGIVVDLPTLTEKDKEDIIQWGVPNKIDIIALSFVRKGSDLTEVRRLLGEHSKNIMLMSKVENQEGVMNCEKILENSDAFMVARGDLGMEIPIEKMFLAQKTMIKMANALGKPVVTATQMLESMTVSPRPTRAEATDVANAVLDGTDCVMLSGETAAGAHPEAAVLTMSRICKEAEDFIDYDILHKKTLGMVSLPLSPIESLAASVVSTAQSVFASAIVVLTKGGYTAELVAKYRPSVPILSVIVPEIAQGNDMEMSCSDSVAHAARRGLIYRRIIPVVATGSSARDSNKDATEEMINLAIGFAKTKGICKNGDSIVALHKIDGSSVVKIVTVE

SEQ ID NO: 78 - DNA, 1494 bp, Arabidopsis thaliana
  CDS (1)..(1494)
atggctatggaacagaggcctaagacgaagatcgtgtgcacactcgggccggcgtccagatctgtcccaatggtcgagaagcttcttatggcggggatgagcgtggctcgcttcaacttttctcatggatcttacgaatatcaccaggagactctcgacaatcttcgtcaggccatgcttaacactggcatgctatgtgctgtcatgctcgacaccaagggaccagagattcgaaccgggttcttaaaggatgggaaacctatccagctcaaacaaggccaagaaatcaccatttcaactgactatgacttgaagggtgatgagaaaactatttgcatgagctacaagaagttggcgcaagatgtgaatccaggcatggtcatactctgtgccgatggtaccatctcgttaaaggtcctttcttgtgacaaagaaaagggcactgtccgttgtcgttgtgagaacacttcaatgcttggtgaaagaaagaacgttaatctccctggtgttgtggttgatctcccaactctaactgaaaaagacaagcaagacattcttgaatggggagttcccaatcaaatcgacatgattgctctgtcttttgtcagaaaaggttcggacttggtacaagttaggaagctacttggaaaacatgctaaaaccatacttctcatgtcaaaggttgaaaaccaagaaggtgtagcgaattttgatgatatcttgataaactcggatgcgtttatgatcgcaagaggtgaccttggaatggagattccaattgagaagatattcttagctcagaaagtgatgatctacaagtgcaatttcatggggaagccagtggttacagcgactcagatgcttgagtctatgatcaaatccccacgaccaacaagagcagaagctactgatgttgcaaatgctgtcctcgatggcacagactgtgtcatgcttagtggtgaaaccgcagctggagcatacccagagcttgctgttcgtacaatggccaagatatgtgtggaagcagagagcacacttgactatggagacatcttcaagaggataatgcttcacgctgcggtccctatgagcccgatggagtcacttgcttcatctgcggtcagaaccgctacttcctcaagagccactcttatgatggtcttgaccagaggaggcagcacggcgaggctggtggctaagtatagaccagggatacccattttgtccgtggtggttcctgaaatcacgtctgactcttttgattgggcgtgtagcaacgaggcaccggcaagacacagtctcatctaccgtggtttagtcccggtgctgtatgctggatcggctagagcctcgatcgacgagtcaacagaagaaactctcgagttcgcgtcagagtatggtaaaaagaagcaactctgcaagaccggagactctgttgtggctctcttccgtacaggtaacgctattgttatcaagatcttgaccgtcaagtga

SEQ ID NO: 79 - protein, 497 aa, Arabidopsis thaliana
MAMEQRPKTKIVCTLGPASRSVPMVEKLLMAGMSVARFNFSHGSYEYHQETLDNLRQAMLNTGMLCAVMLDTKGPEIRTGFLKDGKPIQLKQGQEITISTDYDLKGDEKTICMSYKKLAQDVNPGMVILCADGTISLKVLSCDKEKGTVRCRCENTSMLGERKNVNLPGVVVDLPTLTEKDKQDILEWGVPNQIDMIALSFVRKGSDLVQVRKLLGKHAKTILLMSKVENQEGVANFDDILINSDAFMIARGDLGMEIPIEKIFLAQKVMIYKCNFMGKPVVTATQMLESMIKSPRPTRAEATDVANAVLDGTDCVMLSGETAAGAYPELAVRTMAKICVEAESTLDYGDIFKRIMLHAAVPMSPMESLASSAVRTATSSRATLMMVLTRGGSTARLVAKYRPGIPILSVVVPEITSDSFDWACSNEAPARHSLIYRGLVPVLYAGSARASIDESTEETLEFASEYGKKKQLCKTGDSVVALFRTGNAIVIKILTVK

SEQ ID NO: 80 - DNA, 1533 bp, Arabidopsis thaliana
  CDS (1)..(1533)
atgtcgaacatagacatagaagggatcttgaaggagctacctaatgatgggaggatcccaaagacgaagatagtttgcacattaggaccagcttctcgcactgtttccatgatcgaaaagcttttgaaagccggtatgaatgtggctcgcttcaacttctcacatggaagccatgaataccatcaagagacactcgacaacctccgctctgctatgcataataccggcattctcgctgctgtcatgcttgatactaaggggcctgagattcgtactggtttcttgaaagatgggaaccctatacaactgaaggaaggtcaagagattactataaccactgattatgacattcaaggagacgaatcaacgatatccatgagctataaaaagctgcctttggatgtgaagcccggaaacaccatactctgtgcagatggaagcataagtctagctgtcttgtcatgtgatcctgagtctggaactgttaggtgccggtgtgaaaactcggcgatgcttggtgaaagaaagaatgtgaatcttcctggcgttgttgttgatcttcccactttgacagataaggatattgaagatattctcggttggggtgttccgaacagcattgatatgattgctctttcgtttgtccgtaaaggttcggatcttgttaatgtccgcaaggttcttggatctcatgctaaaagcataatgctcatgtcaaaggttgagaaccaggaaggtgtgattaactttgatgagatcttgcgtgaaacagatgcgttcatggttgcccgtggtgatctcgggatggagattccgatagagaagatcttcttggctcaaaagttgatgatctacaagtgtaaccttgcgggtaaaccggtggtcacagccactcagatgctggagtcaatgatcaaatcacctcggccaacccgagctgaagccacagatgttgcaaatgctgttcttgatggtactgactgtgtgatgcttagcggtgagagtgcagcaggagcttatccggaaatagctgtgaaagtcatggctaagatctgcattgaagccgaatcctcgcttgattacaacacaatctttaaagagatgatccgagcaactccacttccaatgagcccactcgagagtcttgcatcatccgctgtacggactgctaacaaagcgagggcaaaactcatcattgtgttgacacgtggaggttcaactgctaatctcgtggctaaatacagaccggctgttccgattctgtcagtggttgtcccggttatgaccactgattcctttgactggtcttgtagtgacgagtcacctgcaaggcatagtctgatatacagaggtctaatccctatgttggctgaaggatctgcaaaggcaacagatagtgaagccaccgaagttatcattgaagctgctctgaagtcggctactcagagaggactgtgcaaccgtggtgatgcaatcgtggcgctgcaccgtattggagctgcctcagttattaagatctgtgtggttaagtga

SEQ ID NO: 81 - protein, 510 aa, Arabidopsis thaliana
MSNIDIEGILKELPNDGRIPKTKIVCTLGPASRTVSMIEKLLKAGMNVARFNFSHGSHEYHQETLDNLRSAMHNTGILAAVMLDTKGPEIRTGFLKDGNPIQLKEGQEITITTDYDIQGDESTISMSYKKLPLDVKPGNTILCADGSISLAVLSCDPESGTVRCRCENSAMLGERKNVNLPGVVVDLPTLTDKDIEDILGWGVPNSIDMIALSFVRKGSDLVNVRKVLGSHAKSIMLMSKVENQEGVINFDEILRETDAFMVARGDLGMEIPIEKIFLAQKLMIYKCNLAGKPVVTATQMLESMIKSPRPTRAEATDVANAVLDGTDCVMLSGESAAGAYPEIAVKVMAKICIEAESSLDYNTIFKEMIRATPLPMSPLESLASSAVRTANKARAKLIIVLTRGGSTANLVAKYRPAVPILSVVVPVMTTDSFDWSCSDESPARHSLIYRGLIPMLAEGSAKATDSEATEVIIEAALKSATQRGLCNRGDAIVALHRIGAASVIKICVVK

SEQ ID NO: 82 - DNA, 1740 bp, Arabidopsis thaliana
  CDS (1)..(1740)
atggctcaagtggttgctaccaggtcaattcaaggctcgatgttatctcccaacggtggatctgtgtctacaagatccgagaagctattgaaaccagcgagttttgcagtgaaggttcttggcaacgaagcaaagagaagtggaagagtctctgtaagaagcagaagagtggttgatactactgtgagatccgctcgtgttgagactgaagtcattcctgtttctcctgaagatgtgcctaacagagaggagcagcttgagaggttgttggaaatgcagcagtttggtgatacatcggtagggatgtggtcgaagccgacagtgaggaggaagacaaagattgtttgcaccgttggtccgtcgaccaacacacgagaaatgatatggaaattggctgaagctgggatgaatgttgctaggatgaatatgtctcatggagatcatgcttcacataagaaggttattgatttggttaaagaatacaatgcacaaactaaagacaacactattgctatcatgcttgacaccaagggtccggaagttaggagtggagatttacctcagccaattatgttagatcctggtcaagagtttacctttacaattgagagaggagtcagcacaccaagttgtgtcagtgttaactatgatgatttcgttaatgacgtggaagcgggtgacatgcttcttgttgatggtggtatgatgtcgtttatggtgaagtcaaagaccaaagactctgtcaaatgtgaagttgttgatggtggagaacttaagtcaaggagacacctgaatgtccgaggaaagagtgcaactttaccttcaatcactgagaaggactgggaggatattaaatttggagtggagaacaaagttgacttttatgcagtttcctttgtcaaagatgctcaagttgtacacgagttgaagaaataccttcaaaatagtggtgctgatatacacgtgatagtgaaaattgagagtgcagactccatacctaacttgcactccattatcacagcatcagatggggcaatggttgcaagaggtgatcttggtgcagagcttccaattgaagaagtccccattcttcaggaggagatcattaacctgtgccgtagtatgggaaaagctgttattgttgcgactaacatgcttgagagtatgatagttcatccaactccaacccgggcagaggtctcagacattgctatcgctgttagagaaggtgctgatgcggtaatgctttcaggagaaactgctcacggaaagttcccattgaaagctgctggagtgatgcacactgttgcattgcgaacagaagcaaccattactagcggtgaaatgccacctaatcttggtcaagccttcaagaaccatatgagtgagatgtttgcataccatgcaaccatgatgtcaaacacacttggaacttcaactgttgtcttcaccagaaccggtttcatggccatattgttaagtcactatcgtccttccggcacaatctatgccttcacaaatgagaaaaaaatacaacaaagattagctttgtatcaaggtgtatgccccatatatatggagttcacagatgatgcagaagaaacttttgctaatgctttggctacattactgaaacaaggaatggtgaagaagggagaggaaatagcaatcgtacagagcggtacacagccaatctggcgatctcaatcgacacataacatccaagtccgcaaggtttaa

SEQ ID NO: 83 - protein, 579 aa, Arabidopsis thaliana
MAQVVATRSIQGSMLSPNGGSVSTRSEKLLKPASFAVKVLGNEAKRSGRVSVRSRRVVDTTVRSARVETEVIPVSPEDVPNREEQLERLLEMQQFGDTSVGMWSKPTVRRKTKIVCTVGPSTNTREMIWKLAEAGMNVARMNMSHGDHASHKKVIDLVKEYNAQTKDNTIAIMLDTKGPEVRSGDLPQPIMLDPGQEFTFTIERGVSTPSCVSVNYDDFVNDVEAGDMLLVDGGMMSFMVKSKTKDSVKCEVVDGGELKSRRHLNVRGKSATLPSITEKDWEDIKFGVENKVDFYAVSFVKDAQVVHELKKYLQNSGADIHVIVKIESADSIPNLHSIITASDGAMVARGDLGAELPIEEVPILQEEIINLCRSMGKAVIVATNMLESMIVHPTPTRAEVSDIAIAVREGADAVMLSGETAHGKFPLKAAGVMHTVALRTEATITSGEMPPNLGQAFKNHMSEMFAYHATMMSNTLGTSTVVFTRTGFMAILLSHYRPSGTIYAFTNEKKIQQRLALYQGVCPIYMEFTDDAEETFANALATLLKQGMVKKGEEIAIVQSGTQPIWRSQSTHNIQVRKV

SEQ ID NO: 84 - DNA, 1497 bp, Arabidopsis thaliana
  CDS (1)..(1497)
atggcgatgatagagcaaaggccgaagacgaagatcgtttgtactctaggtccagcttccagatctgttccgatggtcgagaagcttcttagggctggtatgaacgttgctcgtttcaatttctctcatggatctcatgaataccatcaagagactctcgataatcttcatcaagctatgcttaacactgggattctctgtgccgtcatgctcgacaccaagggtccagaaatccgaaccgggttcttgaaagatgggaaaccaatccagctgaaacaaggacaagagatcactatttcgactgactatgacttgaagggtgacgagaacacgatttgcatgagctacaaaaagttggctgttgatgtgaacccaggaatggtcattctttgtgctgatggtacaatctccttactggttctctcttgtgacaaagagaacggtacagtccgttgccggtgtgagaactctgcgatgctcggtgagagaaagaacgttaatctcccaggtgttgttgtggatctcccaactctaactgagaaagacaaagaagacatcatgcaatggggagtcccgaatcaaatcgacatgattgctctgtcttttgtcaggaaaggttcagacttggttcaagtccggaaacttctaggaaagcacgccaaaaacattcttctcatgtctaaggtcgagaaccaagaaggtgtggcaaattttgatgacattttggtcaattcagacgctttcatgattgctagaggagatctgggcatggaaatcccgattgagaagatcttcttagctcagaaggtgatgatctacaaatgcaacatccagggaaaacctgtggtcacagcaactcagatgctcgagtccatgatcaaatctcctagacccacaagagccgaagctacggatgtagcaaacgcagtccttgatggtacagactgtgtcatgctcagtggtgaaactgcagctggagcataccctgaactagccgtccgtacaatggctaagatctgcgtggaagccgagagcacccttgactacggtgatgtcttcaagaggatcatgctgtactctccagttccaatgagtccactcgagtcacttgcatcttcagctgtcagaactgctaactcagctagagccactctcatcatggtcctaaccagaggaggaagcacagcaagacttgtggctaagtacagaccaggaatgcctattctatccgtcgttgttcctgagatcaaaaccgacttctttgactggtcttgcagcgatgaatcccccgcgagacacagccttatcttccgtggtctgatcccagtgctctacgctggatccgcaagagcctcacacgatgaatcaacagaagaagctatcgagtttgctactcagtacgggaaagagaaagagctatgcaagactggagattccgttgttgctctactccgagtcggtaatgcttccgtgatcaagatcttgaccgtcaagtga

SEQ ID NO: 85 - protein, 498 aa, Arabidopsis thaliana
MAMIEQRPKTKIVCTLGPASRSVPMVEKLLRAGMNVARFNFSHGSHEYHQETLDNLHQAMLNTGILCAVMLDTKGPEIRTGFLKDGKPIQLKQGQEITISTDYDLKGDENTICMSYKKLAVDVNPGMVILCADGTISLLVLSCDKENGTVRCRCENSAMLGERKNVNLPGVVVDLPTLTEKDKEDIMQWGVPNQIDMIALSFVRKGSDLVQVRKLLGKHAKNILLMSKVENQEGVANFDDILVNSDAFMIARGDLGMEIPIEKIFLAQKVMIYKCNIQGKPVVTATQMLESMIKSPRPTRAEATDVANAVLDGTDCVMLSGETAAGAYPELAVRTMAKICVEAESTLDYGDVFKRIMLYSPVPMSPLESLASSAVRTANSARATLIMVLTRGGSTARLVAKYRPGMPILSVVVPEIKTDFFDWSCSDESPARHSLIFRGLIPVLYAGSARASHDESTEEAIEFATQYGKEKELCKTGDSVVALLRVGNASVIKILTVK

SEQ ID NO: 86 - DNA, 1401 bp, Thermotoga maritima MSB8
  CDS (1)..(1401): transl_table=11
atgcgaagtacaaagatcgtatgtacggtcggaccaagaacagacagctatgaaatgatagaaaagatgatagaccttggagtgaacgtcttcagaataaacacctcacatggtgactggaacgagcaggaacagaaaatactcaaaataaaagatctgagagagaaaaagaaaaaacccgtagccattctgatcgatcttgcggggccgaagatcagaaccggatacctcgaaaaagagtttgtggaattaaaagaaggccagatcttcactctcaccacaaaggaaatacttggaaacgaacacatagtctcggtgaatctcagctctcttccaaaggacgtgaagaaaggagacaccattctgctgagcgatggagagatagtgcttgaggtaattgaaacaaccgatacagaagtgaaaacagtggtgaaagtcggtggaaagatcacacacaggagaggtgtgaacgtaccgacggccgatctttcggtggaatccataacggacagagacagagaattcataaaactcggaacgttgcatgacgttgaatttttcgctctttcttttgtgagaaagccagaggacgtgctcaaggcaaaagaagagatcagaaaacacggaaaggaaatacctgtaatctccaaaatagaaacgaaaaaggctctggagcgtctcgaggagataataaaggtgagcgatggaatcatggtcgcacgcggtgacctgggagtggagatacccatagaagaagtccccatcgttcagaaagaaatcatcaaactctccaagtactactccaaaccagtcatagtcgcaactcagatactcgaatcgatgatagaaaatccgttccccacgagggcagaggtcaccgacatagccaacgccatcttcgatggagcggacgccctgctcctcacagcggaaacagcggttggaaaacatcccctggaagccataaaggtgctgagtaaagtagcaaaagaagccgaaaaaaaactggaatttttcagaacgatagaatacgataccagcgacatatctgaggctatatcacacgcctgctggcagctctctgaatctctgaacgcgaagctgatcatcacacctaccatatccgggagtaccgctgttcgtgtttcaaagtacaacgtttctcaacccattgtggccctgacaccagaagagaaaacctactacagactttctctcgtgaggaaggtgatacccgttctcgctgaaaaatgttcccaggaattagagtttatcgaaaaagggctgaagaaagtagaagaaatgggtttggcagaaaaaggggatctggtggttctcacttccggcgttccaggaaaggtgggaacgacaaacaccataagggtgttgaaggtggattga

SEQ ID NO: 87 - protein, 466 aa, Thermotoga maritima MSB8
MRSTKIVCTVGPRTDSYEMIEKMIDLGVNVFRINTSHGDWNEQEQKILKIKDLREKKKKPVAILIDLAGPKIRTGYLEKEFVELKEGQIFTLTTKEILGNEHIVSVNLSSLPKDVKKGDTILLSDGEIVLEVIETTDTEVKTVVKVGGKITHRRGVNVPTADLSVESITDRDREFIKLGTLHDVEFFALSFVRKPEDVLKAKEEIRKHGKEIPVISKIETKKALERLEEIIKVSDGIMVARGDLGVEIPIEEVPIVQKEIIKLSKYYSKPVIVATQILESMIENPFPTRAEVTDIANAIFDGADALLLTAETAVGKHPLEAIKVLSKVAKEAEKKLEFFRTIEYDTSDISEAISHACWQLSESLNAKLIITPTISGSTAVRVSKYNVSQPIVALTPEEKTYYRLSLVRKVIPVLAEKCSQELEFIEKGLKKVEEMGLAEKGDLVVLTSGVPGKVGTTNTIRVLKVD

SEQ ID NO: 88 - DNA, 1413 bp, Vibrio cholerae O1 biovar eltor str. N16961
  CDS (1)..(1413): transl_table=11
atgaaaaagaccaaaatcgtatgtacgattggcccaaaaactgagtctgtagagaaactgactgagcttgtaaacgctggcatgaatgttatgcgtctcaacttctctcacggtgactacgttgaacacggcactcgtatcactaacttccgtaaagtgatggaagtgaccggtaaacaactggcgatcctactggatactaaaggtccagagatccgtactatcaagctggaaaacggtgacgatgtggatctggtcgctggccaagagttcactttcacaactgacacgaaagttgttggtaacaaagagcgcgtagcagtcacttactctggttttgcaaaagacctgaacgtgggcaaccgtattctggttgacgacggtcttatagagatggaagtactggcgaccactgacactgaagtgaagtgtaaagttctgaacaacggcgctctgggtgaaaacaaaggtgttaacctgccaggcgtttctgtcaatctgccagcgctgtctgaaaaagacaaaaacgacctgaaatttggttgtgagcaaggcgttgatttcgttgctgcctctttcatccgtaaaggttctgacgtgaaagaaatccgtgaagtattagcttctcacggcggtcaaaacattcaaatcatctctaaaatcgaaaaccaagaaggcttggacaacttcgatgagatccttgagctgtctgacggcatcatggttgcacgtggcgacctaggtgtagaaatcccagcagaagaagttatcttcgctcaaaagatgatgatcgagaaatgtaaccgtgcacgtaaagtggttatcacggcgacgcaaatgctggattcaatgatcaagaacccacgtccaactcgcgcagaagcgggcgacgttgcgaacgcgatcatggatggtactgatgctgtaatgctttctggcgaaacagcaaaaggtaagtacccagttgaagcggtgaagatcatggcgcaaattgctgagcgtactgaccctgtactgaaagcagaactgggttcacgcctagacagcccacgtctacgtatcactgaagccgtatgtaaaggtgcagtagacaccgcagagaaactggcagcgccactgatcatcgtagcaactgaagcgggtaaatctgctcgttcagttcgtaagtacttcccaacggctaacattattgcagtcaccaccaacaagaaaacagcagctcagttagtgctttctaaaggtgtaacgccagttgtggttgacgcgattgacaacactgacgctttctaccacctaggtaaagagattgcgctgcaatctggccttggcaagaaaggcgacatcgtagtgatggtttcaggcgcactggttgcttctggcacaacgaacactgcatcagtacacgtactgtaa

SEQ ID NO: 89 - protein, 470 aa, Vibrio cholerae O1 biovar eltor str. N16961
MKKTKIVCTIGPKTESVEKLTELVNAGMNVMRLNFSHGDYVEHGTRITNFRKVMEVTGKQLAILLDTKGPEIRTIKLENGDDVDLVAGQEFTFTTDTKVVGNKERVAVTYSGFAKDLNVGNRILVDDGLIEMEVLATTDTEVKCKVLNNGALGENKGVNLPGVSVNLPALSEKDKNDLKFGCEQGVDFVAASFIRKGSDVKEIREVLASHGGQNIQIISKIENQEGLDNFDEILELSDGIMVARGDLGVEIPAEEVIFAQKMMIEKCNRARKVVITATQMLDSMIKNPRPTRAEAGDVANAIMDGTDAVMLSGETAKGKYPVEAVKIMAQIAERTDPVLKAELGSRLDSPRLRITEAVCKGAVDTAEKLAAPLIIVATEAGKSARSVRKYFPTANIIAVTTNKKTAAQLVLSKGVTPVVVDAIDNTDAFYHLGKEIALQSGLGKKGDIVVMVSGALVASGTTNTASVHVL

SEQ ID NO: 90 - DNA, 1755 bp, Bacillus halodurans C-125
  CDS (1)..(1755): transl_table=11
atgcgaaagacaaaaatcgtttgtacgatcggtccggcgagtgaaagtgtagaaaagttagaacaattaatggaagcaggcatgaatgttgcgcggttaaatttttcccatggggactttgaagagcacggtgcacgaatcaaaaacattcgagaagcagcgaaacgtatcggaaaaacagttgcaattttacttgatacaaaaggaccggaaattcgtacccaaacccttgaagggggcgtggccgaattaaaggcagggcaagagcttgtcatctctatgaaggaggttgtaggtacgagtgagcgtatttctgtcacatatccgggcctagttcatgatgttgtaccaggtgcaaaaattttattagatgatgggttaattgggctagaagtcgttgaggttcgcgatcaagagattttgacaaaagtcttgaacagcggcacattgaaaaataaaaaaggtgtcaatgtcccgaacgtaagcgtcaacctgcctggaatcacagaaaaagacgcagcggatatcaagtttgggatagagcaaggcgtcgatttcattgcagcttcattcgttcgcagagcgcaagatgtactagaaattcgcgaattgcttgagcagcacggggcagagcatattaaaatcatccctaagatcgagaatcaagaaggcgttgataacatcgaggaaattcttgaagtatcagacggtttgatggtggcccgcggagatctaggggtagagattcctgctgaggaagttccacttgtgcaaaagtcgcttattaagaaatgcaaccttgtagctaaacctgttattacagcgacacagatgcttgactcgatgcagcgtaacccacgtccaactcgagccgaagctagtgatgtagcgaatgcgatttttgatggaacggatgcgatcatgctttccggtgaaaccgcagctggggattatccagtcgaggcggttcagacgatgagccgaattgcagagcgtgcagagcaagccctaaactatcaagaaatcttgtccaagcatacaaaagaagcgagaacgacgattacgagtgctattagtcaatcggttggccacacagcattcaacttgaatgcaagtgcaatcttgacggcgactgaaagcggccatacagctcgcgtagtagcgaaataccgcccgaaatcaccaattgtagcagttacaagtaacgaaacagttgttcgtcaactcgctctcgtttggggagtgtattcaatccttggagaagaggcagagacgacggatgatatgcttcaagtgaccgttgagacagcgttaaagtcccaattggtgaaacaaggggatcttgtcgtcatcacggcaggtgttccagtgggagagacaggaacgacgaacattatgaaagttcacgtcattggtgaagtggtcgcgaaaggtcaaggcattggacgcgacacggtgaacggcaaagtcgtcattgctgctaatgcagaggaagcaaatgcaaaggttgaagaagggtcgattttagttactttcagcacggataaggatatgatgccagcctttgaaaaagcagccgccgtcattaccgaagaaggtgggattacatcccatgccgcagttgttggtctaagtcttaatacacctgtgatcgtcggtgtacaaaatgcgtctgcgctctttaaagatggggaagaaataacggtcgatacgagccgcggtgacatttacagagggcaagcaagtgtactataa

SEQ ID NO: 91 - protein, 584 aa, Bacillus halodurans C-125
MRKTKIVCTIGPASESVEKLEQLMEAGMNVARLNFSHGDFEEHGARIKNIREAAKRIGKTVAILLDTKGPEIRTQTLEGGVAELKAGQELVISMKEVVGTSERISVTYPGLVHDVVPGAKILLDDGLIGLEVVEVRDQEILTKVLNSGTLKNKKGVNVPNVSVNLPGITEKDAADIKFGIEQGVDFIAASFVRRAQDVLEIRELLEQHGAEHIKIIPKIENQEGVDNIEEILEVSDGLMVARGDLGVEIPAEEVPLVQKSLIKKCNLVAKPVITATQMLDSMQRNPRPTRAEASDVANAIFDGTDAIMLSGETAAGDYPVEAVQTMSRIAERAEQALNYQEILSKHTKEARTTITSAISQSVGHTAFNLNASAILTATESGHTARVVAKYRPKSPIVAVTSNETVVRQLALVWGVYSILGEEAETTDDMLQVTVETALKSQLVKQGDLVVITAGVPVGETGTTNIMKVHVIGEVVAKGQGIGRDTVNGKVVIAANAEEANAKVEEGSILVTFSTDKDMMPAFEKAAAVITEEGGITSHAAVVGLSLNTPVIVGVQNASALFKDGEEITVDTSRGDIYRGQASVL

SEQ ID NO: 92 - DNA, 1509 bp, Lactococcus lactis subsp. lactis Il1403
  CDS (1)..(1509): transl_table=11
atgaataaacgtgtaaaaatcgtctcaactcttggacctgctgtcgaaattcgtggtggcaaaaaatttggtgaaagcggctattggggagaatctcttgacgtcgaagcatcagcaaaaaacattgcagctttgattgaagaaggcgcaaatgtcttccgtttcaacttctcacacggtgaccatcctgaacaaggtgctcgtatggcaacagttcaccgcgctgaagaaatcgctggtcataaagtaggtttcttgcttgatactaaaggtcctgaaatgcgtacagaactctttgctgacggtgctgatgcaatcagcgttgttactggagataaattccgcgttgcaactaaacaaggtcttaaatcaactcctgaattgattgctttgaacgtagctggtggtcttgatatctttgatgatgttgaaatcggtcaaactattttgattgacgatggtaaacttggtttgtcattgactggtaaagatgcagcaactcgtgagtttgaagttgaagcacaaaatgatggcgttattggtaaacaaaaaggtgttaacattcctaacactaaaattcctttcccagctcttgctgaacgtgatgatgcggatatccgtttcggactttcacaacctggtggaatcaactttatcgctatctcattcgtacgtactgcaaatgacgttaaagaagtacgtcgtatttgtgaagaaactggaaatccacacgtacaacttttggctaaaattgaaaaccaacaaggtatcgaaaaccttgatgaaatcatcgaagcagctgatggtatcatgattgctcgtggtgacatgggtatcgaagttccatttgaaatggttccagtttaccaaaaattgatcatcagcaaagttaacaaagcaggtaaaatcgttgttactgcaacaaacatgcttgaatcaatgacttacaacccacgtgctactcgttcagaaatttcagacgtattcaacgctgttattgacggaactgacgcaacaatgctttcaggtgaatctgctaatggtaaatacccacgcgaatcagttcgtacaatggctactgttaacaaaaatgctcaaacaatgttgaaagaatacggacgtcttcacccagaacgttacgacaaatcaactgtaacagaagtagttgctgcatcagttaaaaacgctgcagaagctatggatatcaaattgattgttgctttgactgaatcaggtaacactgctcgtttgatttctaaacaccgtcctaatgctgatatcttggctattacatttgacgaaaaagttgaacgtggattgatgattaactggggtgtaatcccaacaatgactgaaaaaccttcatctacagatgacatgtttgaagttgctgaaaaagttgctttggcttcaggtttagttgaatctggtgacaatatcatcatcgttgctggtgttccagttggtactggtcgtacaaatacaatgcgtatccgcactgttaaataa

SEQ ID NO: 93 - protein, 502 aa, Lactococcus lactis subsp. lactis Il1403
MNKRVKIVSTLGPAVEIRGGKKFGESGYWGESLDVEASAKNIAALIEEGANVFRFNFSHGDHPEQGARMATVHRAEEIAGHKVGFLLDTKGPEMRTELFADGADAISVVTGDKFRVATKQGLKSTPELIALNVAGGLDIFDDVEIGQTILIDDGKLGLSLTGKDAATREFEVEAQNDGVIGKQKGVNIPNTKIPFPALAERDDADIRFGLSQPGGINFIAISFVRTANDVKEVRRICEETGNPHVQLLAKIENQQGIENLDEIIEAADGIMIARGDMGIEVPFEMVPVYQKLIISKVNKAGKIVVTATNMLESMTYNPRATRSEISDVFNAVIDGTDATMLSGESANGKYPRESVRTMATVNKNAQTMLKEYGRLHPERYDKSTVTEVVAASVKNAAEAMDIKLIVALTESGNTARLISKHRPNADILAITFDEKVERGLMINWGVIPTMTEKPSSTDDMFEVAEKVALASGLVESGDNIIIVAGVPVGTGRTNTMRIRTVK

SEQ ID NO: 94 - DNA, 1413 bp, Escherichia coli O157:H7 EDL933
  CDS (1)..(1413): transl_table=11
atgaaaaagaccaaaattgtttgcaccatcggaccgaaaaccgaatctgaagagatgttagctaaaatgctggacgctggcatgaacgttatgcgtctgaacttctctcatggtgactatgcagaacacggtcagcgcattcagaatctgcgcaacgtgatgagcaaaactggtaaaaccgccgctatcctgcttgataccaaaggtccggaaatccgcaccatgaaactggaaggcggtaacgacgtttctctgaaagctggtcagacctttactttcaccactgataaatctgttatcggcaacagcgaaatggttgcggtaacgtatgaaggtttcactactgacctgtctgttggcaacaccgtactggttgacgatggtctgatcggtatggaagttaccgccattgaaggtaacaaagttatctgtaaagtgctgaacaacggtgacctgggcgaaaacaaaggtgtgaacctgcctggcgtttccattgctctgccagcactggctgaaaaagacaaacaggacctgatctttggttgcgaacaaggcgtagactttgttgctgcttcctttattcgtaagcgttctgacgttatcgaaatccgtgagcacctgaaagcgcacggcggcgaaaacatccacatcatctccaaaatcgaaaaccaggaaggcctcaacaacttcgacgaaatcctcgaagcctctgacggcatcatggttgcgcgtggcgacctgggtgtagaaatcccggtagaagaagttatcttcgcccagaagatgatgatcgaaaaatgtatccgtgcacgtaaagtcgttatcactgcgacccagatgctggattccatgatcaaaaacccacgcccgactcgcgcagaagccggtgacgttgcaaacgccatcctcgacggtactgacgcagtgatgctgtctggtgaatccgcaaaaggtaaatacccgctggaagcggtttctatcatggcgaccatctgcgaacgtaccgaccgcgtgatgaacagccgtctcgagttcaacaatgacaaccgtaaactgcgcattaccgaagcggtatgccgtggtgccgttgaaactgctgaaaaactggatgctccgctgatcgtggttgctactcagggcggtaaatctgctcgcgcagtacgtaaatacttcccggatgccaccatcctggcactgaccaccaacgaaaaaacggctcatcagttggtactgagcaaaggcgttgtgccgcagcttgttaaagagatcacttctactgatgatttctaccgtctgggtaaagaactggctctgcagagcggtctggcacacaaaggtgacgttgtagttatggtttctggtgcactggtaccgagcggcactactaacaccgcatctgttcacgtcctgtaa

SEQ ID NO: 95 - protein, 470 aa, Escherichia coli O157:H7 EDL933
MKKTKIVCTIGPKTESEEMLAKMLDAGMNVMRLNFSHGDYAEHGQRIQNLRNVMSKTGKTAAILLDTKGPEIRTMKLEGGNDVSLKAGQTFTFTTDKSVIGNSEMVAVTYEGFTTDLSVGNTVLVDDGLIGMEVTAIEGNKVICKVLNNGDLGENKGVNLPGVSIALPALAEKDKQDLIFGCEQGVDFVAASFIRKRSDVIEIREHLKAHGGENIHIISKIENQEGLNNFDEILEASDGIMVARGDLGVEIPVEEVIFAQKMMIEKCIRARKVVITATQMLDSMIKNPRPTRAEAGDVANAILDGTDAVMLSGESAKGKYPLEAVSIMATICERTDRVMNSRLEFNNDNRKLRITEAVCRGAVETAEKLDAPLIVVATQGGKSARAVRKYFPDATILALTTNEKTAHQLVLSKGVVPQLVKEITSTDDFYRLGKELALQSGLAHKGDVVVMVSGALVPSGTTNTASVHVL

SEQ ID NO: 96 - DNA, 1449 bp, Deinococcus radiodurans R1
  CDS (1)..(1449): transl_table=11
atgaaacactttgaccgtgccaccaaaatcgtggcgactgtcggccccgccagccgcagcaccgaagttctcgggcgcatgatcgacgttggcctgaacgtggtccgcctcaacttcagccacggcgacctcgaagaccaccgtcagacggtgcagatggtgcgtgacctcgccgtgagcaagggcgtgaccatcggtatcctgcaagacctgcaaggccccaagattcgggtgggccgctttgccgaaggttcggtgaccctgaatcccgggcagaagttcgtcatcacgatggacgaggtggagggcaatgccgagcgcgtgggcagcacctacaagggcctcgccggtgacgtgacccccggcatgacgctgctgctcgacgacggcaacatgagcctgcgggtggaccacgtgcgcggcaacgacattcagacgactgtcctgatcggcggcacgttgaaaaacaacaagggcatcaacgtgcccgaagccgacctgaccgtgcccgcactgtcggaaaaagatgtgcaggacatggaatttggcgcgagcctcggcgtggactgggtggccttgagcttcgtgcgctcgcgcgatgacctgctgctcgcccggcattacctcgcccgcttcggcagccgcgccaagctgatggccaaaatcgagaagccgcaggcggtggaccgcttcgccgacatcctcaaggaagtggacggcgtgatggtggcgcgcggcgacctcggtgtggaaatgcgccccgagcaggtgccgaccatccagaaacgcatcatccgcatgtgccgtgaggcgggcaagccggtcattacggccacccagatgctcgaaagcatgatcaacctgccgcgccccacccgcgccgaggcgtcggacgtggcgaacgctatttatgacggcaccgacgcggtgatgctttccgccgaatcggcggcgggccagtacccggtcgagtcggtcgctatgatggaccgtattgcccgcgaggccgaagcgagcgagctttaccagttgatgcagcgtcaggtcgtgatggacaccgagcaggcgcaggacgccattgcgctcgccgcctgcaacatcggggctaagctcgaagcgcccgccatcgtgacctttaccagcacgggcggggcggccacccgcatttccaagaaccgtccgccgctcgccatcgtcgcgctgacccccaacgagatcacccgcaaccagctcgcgctttcctggggcgtctaccccatgctcagcgaagaccccgaggacaccgatgacatggtacgcatcgccaacgacgagctgaaaaagagcggcctggccgacgtgggcgaccgctacgtgattacggcgggcgtgcccttcggcgtgcgcggcaccaccaatatgctgcgcgtggaaaagttgaaggccgaggacttgtcggaccgcgtttaa

SEQ ID NO: 97 - protein, 482 aa, Deinococcus radiodurans R1
MKHFDRATKIVATVGPASRSTEVLGRMIDVGLNVVRLNFSHGDLEDHRQTVQMVRDLAVSKGVTIGILQDLQGPKIRVGRFAEGSVTLNPGQKFVITMDEVEGNAERVGSTYKGLAGDVTPGMTLLLDDGNMSLRVDHVRGNDIQTTVLIGGTLKNNKGINVPEADLTVPALSEKDVQDMEFGASLGVDWVALSFVRSRDDLLLARHYLARFGSRAKLMAKIEKPQAVDRFADILKEVDGVMVARGDLGVEMRPEQVPTIQKRIIRMCREAGKPVITATQMLESMINLPRPTRAEASDVANAIYDGTDAVMLSAESAAGQYPVESVAMMDRIAREAEASELYQLMQRQVVMDTEQAQDAIALAACNIGAKLEAPAIVTFTSTGGAATRISKNRPPLAIVALTPNEITRNQLALSWGVYPMLSEDPEDTDDMVRIANDELKKSGLADVGDRYVITAGVPFGVRGTTNMLRVEKLKAEDLSDRV

SEQ ID NO: 98 - DNA, 1422 bp, Clostridium acetobutylicum ATCC 824
  CDS (1)..(1422): transl_table=11
atgcaaaaaactaaaatgatttttacagttggaccagcaagtgagacagaggagattgtaacagctttcataaaagctggaatgaatgcttcaagacataacttttcacacggtgatcatgcagagcacggtggaagaatagctttagtaaaaaaggttagagcaaagcttaataagcctgtagctatatgccttgatactaaaggaccagaaataagaactggagatttcaatccttcaaagcttgaacttcaaaaaggttcaaaatttactatcgtttgtggcgaagaaatagttggagatgctacaaaatgttcaatatcatataaagatttatacaaagatgtaaaaccaggaaacactatattaatagatgatggtttagttggacttacagtagaagctatagaaggaacaaatgtaatttgtactgtagcaaatacaggattagttggaagccataaaggagtaaatgttccaaacgtttcaatacaacttcctgcaatgacagaaaaagataagagcgatttaatattcggatgtaaagaagaaatagatatggtaagtgcatcattcataagaaaacctgaagatgtacttgcaataagaaaagtattaaatgagaatggcggagaaaacattcaaatattctctaaaattgaaaatcaagaaggcgtggacaacatagatgctattatagaagtttctgacggaataatggtagctagaggagatatgggagttgaaattcctatacaaagagttccattaatccaaaaaatgataatcaaaaaatgtaatgcagtaggaaaacctgttataacagcaactcaaatgcttgattcaatgatgagaaatccaagacctacaagagcagaagcttcagatatagcaaatgctatatttgatggaacagatgctataatgttaagtggagaaagcgctaatggatcatatccaatagaagctgtaactacaatggcaaaaatagcacaagaggcagaaaatgaaatcaattatgataaattcctagcagaaagaaaaggaaatgaaaagaaaaatacttctgatgtaataagtcttggaacttgcacagcagcagcagacttagaagcttcagcaataataactgcaactcaaacaggaagcacagcaagaacagtttcaaaatatagaccaaaagcacctgtaatagcagttactccatctgaaaaagtagcaagaaaacttgcaatgagctggggagtacaccctataatatctgataaatttggttcaactgatgaacttatctctacttcagtagataaagcccttgaagcaggatatgtacaaaaaggagatcttgtagttgtagctgcaggtgtaccaacaaatgtatcaggtactacaaacatgcttaaagttcaagttgttgagtaa

SEQ ID NO: 99 - protein, 473 aa, Clostridium acetobutylicum ATCC 824
MQKTKMIFTVGPASETEEIVTAFIKAGMNASRHNFSHGDHAEHGGRIALVKKVRAKLNKPVAICLDTKGPEIRTGDFNPSKLELQKGSKFTIVCGEEIVGDATKCSISYKDLYKDVKPGNTILIDDGLVGLTVEAIEGTNVICTVANTGLVGSHKGVNVPNVSIQLPAMTEKDKSDLIFGCKEEIDMVSASFIRKPEDVLAIRKVLNENGGENIQIFSKIENQEGVDNIDAIIEVSDGIMVARGDMGVEIPIQRVPLIQKMIIKKCNAVGKPVITATQMLDSMMRNPRPTRAEASDIANAIFDGTDAIMLSGESANGSYPIEAVTTMAKIAQEAENEINYDKFLAERKGNEKKNTSDVISLGTCTAAADLEASAIITATQTGSTARTVSKYRPKAPVIAVTPSEKVARKLAMSWGVHPIISDKFGSTDELISTSVDKALEAGYVQKGDLVVVAAGVPTNVSGTTNMLKVQVVE

SEQ ID NO: 100 - DNA, 1419 bp, Clostridium acetobutylicum ATCC 824
  CDS (1)..(1419): transl_table=11
atgcaaaaaacaaaaatgatttttacaatagggccctctagtgattcagaggagaaattaaaagaattaatgaatgctggaatgaatgctgcaaggttaaatttttcacatggcactcatgaagatcacaaagaaaaaatagatattataaaaaaacttagaaaagaactgaacaaaaatgttgcaattgtagttgacatcaaaggaccaaaaattagaactcataattttgaaaatgacaaagctgaaataaaaaaaggtcaaaccttcacagtaatgtgtggaagcgaaattttgggaaattcagagaaatgctccgtttcttatgatgatctttataaagatgtaaaaaaaggtggattactccttgtcgatgatggtcttttagaatttgaaataactgatgtacaagacaaaaacattatttgtaaggcaaaaaataatggtattatttcaaatcataaaggtgtaaatgtacctggtgtttctataggtcttcctgctgtaactgaaaaagatgtattagatttaaaatttgcatgtaaaatgcaagctgatttagtagctgcttcttttataagaaaagcagaagatgtatctgtcgttagaaaggttcttaaagaaaatggtggagaagatataagagttatctctaagatagaaactcaagaaggtgttgataacatcgataagattctcgaactatctgatggaatcatggtagcaagaggagatatgggtgttgaaattccaatagaggatgttccttcaatacagaaaatgataataagaaaatgtaatgatgcaggcaaaatagttataacagctactcaaatgcttgattcaatgataagaaacccaagacctacaagagctgaggcatcagatgttgccaatgcaatatatgacggaacagatgctataatgctaagtggagaaagtgcaagtggtttatatccaattgaagctgctgaaactatggcaaagatagcacaaaaaacagaatctcaaatagactatactaaagctcttaatgaaagaaaaggtgaaattataacaaaaatttcagacgctataagtcttgctgcatgctcaactgctgctgaacttaaagctgctgctataataacagctactcaaagcggtataactgcaagaatggtatctaaattcagaccaacttgccctataatagctgttacacctcatgatgatgttgcaagaagacttgctctaaactttggtataacacctattacatctgaaaaagttgtttcaacagatgaacttatatctgtttcaataaaaagagcacttaacgagaatttaattaaaaaaggtgacttagttgttgtagttgcaggtgttcctgtaggcgaatctggaactactaatatgttaaaaattcaatacacataa

SEQ ID NO: 101 - protein, 472 aa, Clostridium acetobutylicum ATCC 824
MQKTKMIFTIGPSSDSEEKLKELMNAGMNAARLNFSHGTHEDHKEKIDIIKKLRKELNKNVAIVVDIKGPKIRTHNFENDKAEIKKGQTFTVMCGSEILGNSEKCSVSYDDLYKDVKKGGLLLVDDGLLEFEITDVQDKNIICKAKNNGIISNHKGVNVPGVSIGLPAVTEKDVLDLKFACKMQADLVAASFIRKAEDVSVVRKVLKENGGEDIRVISKIETQEGVDNIDKILELSDGIMVARGDMGVEIPIEDVPSIQKMIIRKCNDAGKIVITATQMLDSMIRNPRPTRAEASDVANAIYDGTDAIMLSGESASGLYPIEAAETMAKIAQKTESQIDYTKALNERKGEIITKISDAISLAACSTAAELKAAAIITATQSGITARMVSKFRPTCPIIAVTPHDDVARRLALNFGITPITSEKVVSTDELISVSIKRALNENLIKKGDLVVVVAGVPVGESGTTNMLKIQYT

SEQ ID NO: 102 - DNA, 1758 bp, Bacillus subtilis subsp. subtilis str. 168
  CDS (1)..(1758): transl_table=11
atgagaaaaactaaaattgtttgtaccatcggtccggcaagtgaaagtattgaaatgcttacgaaattaatggagtcaggaatgaacgtggctcgattaaacttttctcacggagattttgaggagcacggtgcaagaattaaaaatatccgcgaagcaagtaaaaaacttggcaagaacgttggaattctgcttgatacaaaaggtcctgaaatccgcacacatacaatggaaaacggcggtattgagcttgaaacaggcaaagagctcattatttcaatggacgaggttgtaggaacaacagataaaatttcagtgacatatgaaggtttagtccatgacgttgaacaaggttcaacgattctgttagatgacggccttatcggtcttgaggtacttgatgtagatgccgctaaacgcgaaatcaaaacaaaagtattaaacaacggaacactcaaaaataaaaaaggtgttaacgtaccgggcgtaagtgtcaatcttccggggattactgaaaaggatgcgcgagacatcgttttcggtattgagcaaggagtagacttcatcgcaccatctttcattcgacgttctacggatgtgctcgaaatccgtgagcttcttgaagagcacaacgctcaggatattcaaatcatccctaaaatcgaaaaccaagagggcgttgacaacatcgatgcgattctcgaagtgtctgacggcttaatggttgcacgcggagacttaggtgtggaaattccagctgaagaagtgccgcttgtgcaaaaagaactgatcaaaaaatgcaacgcgctgggcaaacctgttattacagcgacacaaatgcttgacagcatgcagcgcaacccgcgtccgactcgtgcggaagcaagtgacgttgcaaacgcgatcttcgacggaacagatgcgatcatgctttctggtgaaactgctgccggaagttacccggttgaagcagttcaaacaatgcataacatcgcgtcccgttctgaagaagcattaaattataaagaaattctctcaaaacgcagagaccaagtgggcatgacaattacagacgcaattggacaatctgtcgcacatacggcgattaacctgaatgctgctgcgatcgtaacgccgacagaaagcggccatacagcacgtatgattgcaaaataccgtccgcaggctccgattgttgcggttactgtaaatgactctatttccagaaagcttgccctcgtatctggcgtattcgcggaaagcggccaaaatgcgagctcaacagatgagatgcttgaggatgctgtccaaaaatcattgaacagcggaattgtaaaacacggcgatcttatcgttattacagctggcactgtcggtgagtccggcactacgaacttaatgaaggttcatactgtcggcgatatcatcgctaaaggccaaggcattggacgcaaatcagcttacggtccggttgtcgttgcacaaaatgcaaaagaagctgagcaaaaaatgactgacggtgcggtacttgttaccaaaagcactgaccgtgatatgattgcatcccttgaaaaagcgtctgctcttattacagaagaaggcggtttgactagccatgctgcggtagtcggattaagccttggcatcccggttatcgtgggtctggaaaatgcgacatctattttgacagatggccaggatattacagttgacgcttccagaggcgcagtctatcaaggccgtgcgagcgttctttaa

SEQ ID NO: 103 - protein, 585 aa, Bacillus subtilis subsp. subtilis str. 168
MRKTKIVCTIGPASESIEMLTKLMESGMNVARLNFSHGDFEEHGARIKNIREASKKLGKNVGILLDTKGPEIRTHTMENGGIELETGKELIISMDEVVGTTDKISVTYEGLVHDVEQGSTILLDDGLIGLEVLDVDAAKREIKTKVLNNGTLKNKKGVNVPGVSVNLPGITEKDARDIVFGIEQGVDFIAPSFIRRSTDVLEIRELLEEHNAQDIQIIPKIENQEGVDNIDAILEVSDGLMVARGDLGVEIPAEEVPLVQKELIKKCNALGKPVITATQMLDSMQRNPRPTRAEASDVANAIFDGTDAIMLSGETAAGSYPVEAVQTMHNIASRSEEALNYKEILSKRRDQVGMTITDAIGQSVAHTAINLNAAAIVTPTESGHTARMIAKYRPQAPIVAVTVNDSISRKLALVSGVFAESGQNASSTDEMLEDAVQKSLNSGIVKHGDLIVITAGTVGESGTTNLMKVHTVGDIIAKGQGIGRKSAYGPVVVAQNAKEAEQKMTDGAVLVTKSTDRDMIASLEKASALITEEGGLTSHAAVVGLSLGIPVIVGLENATSILTDGQDITVDASRGAVYQGRASVL

SEQ ID NO: 104 - DNA, 1413 bp, Yersinia pestis CO92
  CDS (1)..(1413): transl_table=11
atgaaaaagactaaaattgtttgtactatcggtccaaaaaccgaatccgaagaaatgctgacaaacctgctgaatgctggcatgaacgttatgcgtttaaacttctctcacggtgactatgcagagcacggtcaacgtatcaaaaacctccgggctgtaatggcaaaaacaggcaaaaaagccgcgattttgctggatactaaaggccctgaaatccggaccatgaaactggaaggcggcaaagatgctgcgctggttgcaggtcagaccttcacgttcacgactgatcaaagcgttgtcggtaacgacaaaattgttgcagtcacctacccaggcttcgccgctgacctgaaaattggtaacactgttctggttgacgatggcttgatcggtatggaagtcattgaagtcactgaacacaccgttgtctgtaaagtcttgaacagtggtgatttgggtgaaaacaaaggcgttaacctgccaggcgtgtcgatccaactgcccgcattagcagaaaaagataaaggcgacctgatcttcggttgcgaacaaggcgttgatttcgttgccgcctcctttatccgtaaacgttctgatgtactggaaattcgtgaacacctgaaagcacacggtggcgaacatatccagatcatctctaaaatcgaaaatcaggaaggtctgaataacttcgacgaaatcctggaagcctctgacggtatcatggttgcccgtggtgacttaggtgttgagatccctgtcgaagaagtcatcttcgcgcagaagatgatgatcgagaaatgtaaccgcgcacgtaaagttgttattactgcaactcaaatgctcgattccatgatcaaaaacccacgtcctacccgcgcagaagccggtgacgttgcaaacgccatccttgacggtaccgacgcggtcatgctgtccggcgaaagtgctaagggtaagtacccattagagtctgtcaccatcatggcgaccatctgtgagcgtacagaccgtgttatgcctagccgcattgagtcactgaacgacaaccgtaaaatgcgaatcactgaagccgtttgccgtggtgctgttgaaaccgcagaaaaactggaagccaaagtgattgtggtcgcaaccggggggggtaaatctgcaaaatctgtccgtaaatacttccctactgcgaccattctggcactgacgaccaatgaaatgacagcccatcagttaattctgactaaaggcgtaatcactcagttggtagacgaaatcgcctcaaccgatgatttctaccgtctcggtaaagaagcggctctggcgagcggcctggcacagaaaggcgacgtggtcatcatggtttcaggtgccttggtaccaagcggtacgaccaatacctcttcagtacacgtgttataa

SEQ ID NO: 105 - protein, 470 aa, Yersinia pestis CO92
MKKTKIVCTIGPKTESEEMLTNLLNAGMNVMRLNFSHGDYAEHGQRIKNLRAVMAKTGKKAAILLDTKGPEIRTMKLEGGKDAALVAGQTFTFTTDQSVVGNDKIVAVTYPGFAADLKIGNTVLVDDGLIGMEVIEVTEHTVVCKVLNSGDLGENKGVNLPGVSIQLPALAEKDKGDLIFGCEQGVDFVAASFIRKRSDVLEIREHLKAHGGEHIQIISKIENQEGLNNFDEILEASDGIMVARGDLGVEIPVEEVIFAQKMMIEKCNRARKVVITATQMLDSMIKNPRPTRAEAGDVANAILDGTDAVMLSGESAKGKYPLESVTIMATICERTDRVMPSRIESLNDNRKMRITEAVCRGAVETAEKLEAKVIVVATGGGKSAKSVRKYFPTATILALTTNEMTAHQLILTKGVITQLVDEIASTDDFYRLGKEAALASGLAQKGDVVIMVSGALVPSGTTNTSSVHVL

SEQ ID NO: 106 - DNA, 1776 bp, Synechocystis sp. PCC 6803
  CDS (1)..(1776): transl_table=11
atgcaaacgtctccccttccccgtcgtaccaaaatcgtcgctaccattggccccgcgacccaaagcaaggaagtgctgagacaactgatccaagccggtgctaccactttccgcctcaatttttcccacggagaccacgcttaccaccaacaaagtatccgtttgattcgccagattgcctttgaactgaaccaaccagtgggcattctccaggatttacaggggccaaagattcgggtgggcaaatttctcaatgatgccggctctgtgcaactcaaaaacggtgatccctataccctcaccagtcgcccggtggaatgtacggaaaccattagttccattagctacgaatatttagccgacgaagtaccttctggggcaagaattttgctcgacgacggcaaactggaaatgttggtggaggaagtggacactgttgcccgggatctccactgtcgggtgattgtggggggaaccctttccagcaataaaggggttaattttcccggggtctgcctttccgttaaggccatgaccgataaagataaggaagatttgatgttcgggctggaccaaggggtggactgggtggccctgagttttgttcgtaatccccaggatattgatgagattaaggggttaattgcggcggcagggaaatccgtgccggtaatcgccaaaattgagaagcacgaagcgattaaggatatgcaggcggtgctggaaaaatgtgacggtgtcatggtggcccggggggacttgggggtagaactacccgcagaagatgtacctattttgcaaaagaaactcattgccactgctaaccggttgggcattcctgtcattactgctacccaaatgttggacagtatggtcaacagcccccgacctactagggctgaagtgtccgacgtggccaatgccatcctcgatggtaccgatgcggtgatgctctccaacgaaacggcgatcggtaaatttcccgtggaagcagtggctattatggccaaaattgcggagcgcattgaacaggaagatatcaatccttcccaagcggaagccagtcgcacttctattcccaatgctatttccagcgccgttagccagattgcggaaaccctcaacgcggcggctattatgtctttgactaagaccggatccaccgcccgccatgtgtcaaagttccgccccaaaacccccattctggccgttacgccccatgtggatgtgtcccgtcagttgcagttggtgtggggagttaagcccctgttggtattggatttaccttccaccagccaaacgttccaagccgccattaacgtggcccaggaaaaccattttctccgggatggagatttggtggtgatgaccgccgggacattgcagggagttgccggttcgacggatttaatcaaagtggaagtggtcaaggccattcttggtcggggtgtaggtattggccaaggagctgtaagtggccgggccagggttgccagtcgtccccaggcgatcgcccaatttacccagggagaaattttagtagttccctctaccaacgctgattgtgtggacatgatgcgacgggcggcgggcattatcaccgaagaagaaagcctgactagccatgcggccattattggtttgcggctgggggtgccggtcattgtgggttttaaaggcgctacccaaaagattcgagatggagccattgtcaccatcgatgcccaaaaaggactgatttattccggtgcattacccccggtgtccaaaggatag

SEQ ID NO: 107 - protein, 591 aa, Synechocystis sp. PCC 6803
MQTSPLPRRTKIVATIGPATQSKEVLRQLIQAGATTFRLNFSHGDHAYHQQSIRLIRQIAFELNQPVGILQDLQGPKIRVGKFLNDAGSVQLKNGDPYTLTSRPVECTETISSISYEYLADEVPSGARILLDDGKLEMLVEEVDTVARDLHCRVIVGGTLSSNKGVNFPGVCLSVKAMTDKDKEDLMFGLDQGVDWVALSFVRNPQDIDEIKGLIAAAGKSVPVIAKIEKHEAIKDMQAVLEKCDGVMVARGDLGVELPAEDVPILQKKLIATANRLGIPVITATQMLDSMVNSPRPTRAEVSDVANAILDGTDAVMLSNETAIGKFPVEAVAIMAKIAERIEQEDINPSQAEASRTSIPNAISSAVSQIAETLNAAAIMSLTKTGSTARHVSKFRPKTPILAVTPHVDVSRQLQLVWGVKPLLVLDLPSTSQTFQAAINVAQENHFLRDGDLVVMTAGTLQGVAGSTDLIKVEVVKAILGRGVGIGQGAVSGRARVASRPQAIAQFTQGEILVVPSTNADCVDMMRRAAGIITEEESLTSHAAIIGLRLGVPVIVGFKGATQKIRDGAIVTIDAQKGLIYSGALPPVSKG

SEQ ID NO: 108 - DNA, 1413 bp, Salmonella enterica subsp. enterica serovar Typhi str. CT18
  CDS (1)..(1413): transl_table=11
atgaaaaagacgaaaattgtttgtactatcggtccgaaaaccgaatccgaagagatgttaagcaaaatgctggacgcgggcatgaacgtgatgcgtctgaacttctctcatggcgattatgcagaacacggtcagcgtatccagaacttgcgcaacgtgatgagcaaaactggtaaaaaagctgctattctgcttgatactaaaggaccagaaatccgcaccattaaactggaaggcggtaacgacgtttcgctgaaagcgggccaaacctttacttttaccaccgacaaatccgtggtcggtaataatgaaatcgttgccgtcacctatgaaggcttcaccagcgacctgagcgttggcaacaccgtcctggttgacgatggtctgatcggtatggaagtgaccgccatcgaaggcaataaagtcatttgtaaggtgctgaacaacggcgatctgggcgagaacaaaggcgttaacctgccgggcgtttctattgctctgccggcgctggctgaaaaagacaaacaggacctgatcttcggttgcgaacagggcgttgactttgttgctgcgtcctttatccgtaaacgttctgacgttgtcgaaattcgcgagcatctgaaagcccacggcggcgaaaacatccagattatctctaagatcgaaaaccaggaaggcctgaacaacttcgatgaaattctcgaagcttccgacggcatcatggttgcgcgtggcgacctgggcgtagaaatcccggttgaagaagtgatctttgcgcagaaaatgatgatcgaaaaatgtatccgcgcacgtaaagtcgtgatcaccgcgactcagatgctggattctatgatcaaaaatccgcgtccgacccgcgcagaagcaggcgatgttgcaaacgccatcctcgacggtacggatgcggttatgctgtccggcgaatccgcaaaagggaaatacccgctggaagccgtttctatcatggcgaccatctgcgaacgtaccgaccgcgtcatgaacagccgtctggactacaacaacgacagccgtaaactgcgcattacggaagcggtatgccgcggcgcggtagaaaccgccgaaaaattgaaagcgccgctgatcgtggtagcgacccagggcggtaaatccgctcgcgccgtgcgtaaatacttcccggacgccaccatcctggcattgaccaccaatgaagtgaccgcccgtcagttagtactgagcaaaggcgtggtatcgcagctggtgaaagaaatcaattctactgatgatttctaccgtctgggcaaagatgtcgccctacaaagcggcctcgcccagaaaggcgacgtcgtagtgatggtctccggcgcgctggttccaagcggcaccactaacaccgcctctgttcacgtactgtaa

SEQ ID NO: 109 - protein, 470 aa, Salmonella enterica subsp. enterica serovar Typhi str. CT18
MKKTKIVCTIGPKTESEEMLSKMLDAGMNVMRLNFSHGDYAEHGQRIQNLRNVMSKTGKKAAILLDTKGPEIRTIKLEGGNDVSLKAGQTFTFTTDKSVVGNNEIVAVTYEGFTSDLSVGNTVLVDDGLIGMEVTAIEGNKVICKVLNNGDLGENKGVNLPGVSIALPALAEKDKQDLIFGCEQGVDFVAASFIRKRSDVVEIREHLKAHGGENIQIISKIENQEGLNNFDEILEASDGIMVARGDLGVEIPVEEVIFAQKMMIEKCIRARKVVITATQMLDSMIKNPRPTRAEAGDVANAILDGTDAVMLSGESAKGKYPLEAVSIMATICERTDRVMNSRLDYNNDSRKLRITEAVCRGAVETAEKLKAPLIVVATQGGKSARAVRKYFPDATILALTTNEVTARQLVLSKGVVSQLVKEINSTDDFYRLGKDVALQSGLAQKGDVVVMVSGALVPSGTTNTASVHVL

SEQ ID NO: 110 - DNA, 1758 bp, Listeria innocua Clip11262
  CDS (1)..(1758): transl_table=11
atgaaaaaaacgaaaattgtttgtacaattggtcctgcaagtgagtcagttgacacattagttcagttgatcgaagcaggaatgaacgttgcacgtcttaatttctctcacggagattttgaagagcacggtgcgcgtattgtaaatatccgtgaagcatcgaaaaaaactggcaaacaagttgctatcttacttgatacaaaaggtccagaaatccgtacaaacgacatggtcggcggaaaattagaattccaaacaggtgacgttgtacgtgtatctatgactcctgttgaaggaacaaaagaaaaattctctgtaacttacggagaactttatgatgacgtagaaattggttcttccattttacttgatgacggtttaatcggtcttgaagtaatcgaaaaagacgaagctaatcgcgaactagtaactaaagtacttaacccaggtgtacttaaaaataaaaaaggtgttaacgtaccgaatgtttctatcaacctaccaggaatcacagaaaaagatgctgctgatatccgcttcggtttagaacaaggtattgactttatcgctgcatctttcgtacgtcgtgctacagatgttcttgaaattactaaaattttagaagagcataacgcaactcacgtacaaatcattcctaaaatcgaaaaccaagaaggcgttgacaacatcgacgaaatcttacaagtatctcaaggcttaatggttgctcgtggtgacctaggtgttgaaattccagctgaagaagttccgattgtacaaaaagaacttatcagaaaatgtaataaacttggtaaacctgttattactgctacacaaatgcttgattccatgcaacgtaacccacgtccaactcgcgctgaagcaagtgacgtagcgaatgcgatttttgatggaacagatgctattatgttatccggtgaaacagctgctggggattatccagtagaagcagttaaaatgatggcgaaaatcgctgttcgtactgaggaagttctagttgctcaagataaatttgcacttaaacttcatgaaaatacagatatgacagaagctatcggtcaagcagttggccatactgcgaaaaacctaaatgtacaaactatcgttgctgcgactcaaagtggtcacacagctcgtatgatttctaaataccgtccaaaatctcatatcgttgctgtaacattcaacgaacatgtatatcgcggattagctctttcttggggcgtatatcctcgtctagctactccagttagcaatacagacgaaatgtttgaccttgcagtaaaagaatctcttgcttcaggtgttgcgaaacaaggcgacctaatcatcatcactgctggtgttccagttacagaaagcggaacaacaaacgttatgaaaatccaattaattggtgaaaaagtagttaaaggccaaggtattggtagcaaatcagttattggtaaagcagtagttgctaaatccaatgcagaagctcttcaaaaagcagaagaaggcggaatcttaatcgttaaaacaactgataaagaaatccttcctgcattcgagaaaagtgctgcagttgttgtggaagaaggcggcttaactagccatgcagcagttgttggaatcaaccttggcattcctgtcatcgttggcgctaaagacgcaacatcccttgtaaaagacggtgaaatcatcactgttgattctcgtcaaggtgttgtatataacggcaaaacagcaactcactaa

SEQ ID NO: 111 - protein, 585 aa, Listeria innocua Clip11262
MKKTKIVCTIGPASESVDTLVQLIEAGMNVARLNFSHGDFEEHGARIVNIREASKKTGKQVAILLDTKGPEIRTNDMVGGKLEFQTGDVVRVSMTPVEGTKEKFSVTYGELYDDVEIGSSILLDDGLIGLEVIEKDEANRELVTKVLNPGVLKNKKGVNVPNVSINLPGITEKDAADIRFGLEQGIDFIAASFVRRATDVLEITKILEEHNATHVQIIPKIENQEGVDNIDEILQVSQGLMVARGDLGVEIPAEEVPIVQKELIRKCNKLGKPVITATQMLDSMQRNPRPTRAEASDVANAIFDGTDAIMLSGETAAGDYPVEAVKMMAKIAVRTEEVLVAQDKFALKLHENTDMTEAIGQAVGHTAKNLNVQTIVAATQSGHTARMISKYRPKSHIVAVTFNEHVYRGLALSWGVYPRLATPVSNTDEMFDLAVKESLASGVAKQGDLIIITAGVPVTESGTTNVMKIQLIGEKVVKGQGIGSKSVIGKAVVAKSNAEALQKAEEGGILIVKTTDKEILPAFEKSAAVVVEEGGLTSHAAVVGINLGIPVIVGAKDATSLVKDGEIITVDSRQGVVYNGKTATH

SEQ ID NO: 112 - DNA, 1431 bp, Nostoc sp. PCC 7120
  CDS (1)..(1431): transl_table=11
atgcgtcgaactaaaattatctgtactgtaggcccggctacatctgcaccagaacgtttagaagcgttggtagaagctgggatgaatgtagcacggctgaatttttctcatggagcttatgacttccatgcccaaactgctcagtatttgcggcaaatcagtgctgacagacaaaagcctgtggcgattatgcaagacctatgcgggccgaagattcgcttgggaactttaccaccagaagggttaatggtagaggctggtcaggaagtgacttttgtcttgcaagaaaagggtagtagtcttgatgaattgcctttacctttgccgaccttgttcgcaatggtacgacctggggaaccaatcttaattaatgatggtcgtgtcaagttgattgtgacagatcgcgatgccgatcgcattcgggctattgccaaaatcgggggtcttctttctacccgtaagggtgttaacctgccagcgactcgtttacctgtcagttccatcaccgaaaaggacttgcaggatttgcgttttggcatcgatttgagtgtagattgggtggcggtgtcttttgtgcgatcgccttatgacctcgaaccagcgcaacggatgattgaagcggcggggaaaactattcgggtaatcgccaaaattgaacgtccagaagccgttgagcaaattgattctatcatcgacgttgctgatgcgattatgattgctcgtggtgacttgggtgtggaaatgcctatccatgaagtcccattgattcaaaaggacatcattcgccgttgcaaccaagctggtaagcccgtgattacagcaacgcaaatgctagagtcgatgattagcgctcccgatcccacccgtgcggaggctacagacgttgctaactctattctcgatggtacagatgccgtcatgctctctggggaaacggctgtaggacaatatcccgtcgccgccgtccaggttatgcacgatatcgccgtgactacagaaaagtctttgcaagagggtagtaaacattgcttatcccatgaagcaggtggtctgagtgtcaccgaatctgtagctgaagcggtctgtcgtatcgcctacgaaacaggcgcaaaagcgattctttgcaacaccacatcagggagtacagcaaagctcgtgtcgaaatatcgtccgactacacccatttttgcgttgacccccgacgaaaccgcctaccatcagttagcactttcttggggtgtggaacctttattaaccccaccagtccacaatgcggaagaaatgtttatgaatctcatcaacaccgccgtgagaacgggtttggtgcatgacggtgacaaggtagttattacttctggagtgccaattggtaaatcaggcacaactagtttaattaaagtgcattctattggacaaccaatcaccgcctaa

SEQ ID NO: 113 - protein, 476 aa, Nostoc sp. PCC 7120
MRRTKIICTVGPATSAPERLEALVEAGMNVARLNFSHGAYDFHAQTAQYLRQISADRQKPVAIMQDLCGPKIRLGTLPPEGLMVEAGQEVTFVLQEKGSSLDELPLPLPTLFAMVRPGEPILINDGRVKLIVTDRDADRIRAIAKIGGLLSTRKGVNLPATRLPVSSITEKDLQDLRFGIDLSVDWVAVSFVRSPYDLEPAQRMIEAAGKTIRVIAKIERPEAVEQIDSIIDVADAIMIARGDLGVEMPIHEVPLIQKDIIRRCNQAGKPVITATQMLESMISAPDPTRAEATDVANSILDGTDAVMLSGETAVGQYPVAAVQVMHDIAVTTEKSLQEGSKHCLSHEAGGLSVTESVAEAVCRIAYETGAKAILCNTTSGSTAKLVSKYRPTTPIFALTPDETAYHQLALSWGVEPLLTPPVHNAEEMFMNLINTAVRTGLVHDGDKVVITSGVPIGKSGTTSLIKVHSIGQPITA

SEQ ID NO: 114 - DNA, 1689 bp, Caenorhabditis elegans
  CDS (1)..(1689)
atggcatcatctcaggtacaagacgtcgagctcgccgaagccggagacaccatcaatgaggtaaaggccagcagtgccagcggaagaggtcgtcttgctcgccgaatgaccatcgaagaggagcatgctggtgattatttcaagcaagagcagaagctcgctgctgttccagccactacccatatggagcatttgtgtcgtttggacattcgtgaggctccacatctcgttcgtcagaccggaattatttgcacaattggaccagcttgtgccagtgttgaaatgcttcaaaaattgattctcaatggaatgaacattgctcgtctcaacttttcccatggatctcatgagtaccatgccggaaccatcgccaacgttcgtgaagctgccgattcattctctgacaagcgtgtcattggaattgctttggacacgaagggacctgaaatccgtactggacttcttgccggcggtgcttctgctgaaattgagcttgcacgaggagcatcaatccgtttgactactgatccacacttttctgaatcaggaactgctgtcaatctttttgttgattacaagaacattgccaaagttctttcggttggatcccgtgtctacattgatgacggacttatctcattgattgtcgaagaattgcaaactgacgctgtcatttgctctgttgaaaatggtggaatgttgggaagcagaaagggagtcaatcttccaggaactatcgttgatttgccagctgtttccgagaaggactgtaaggatttgcagtttggtgtggaacaaggtgttgatatcatctttgcttcattcatccgaaacgctgaaggaattcgtacgattcgtaaagttctcggagagaaaggaaagaagattaagattattgcaaagattgagaatcaagaaggagttgataatgctgatgaaattatctctgaatctgatggagttatggttgctcgtggagatctcggtatcgaaattccagccgagaaggtgttccttgcacaaaagatgctcatctccaagtgtaatcgtgctggaaaacctgtcatttgtgcaactcagatgcttgaatcgatggttcacaagccacgtccaaccagagctgaaggatcagatgttgccaatgctgtgcttgacggagctgattgtgtgatgctttctggagagactgctaaaggagaatatccagttgatgcactcaagatcatgcattatatatgcaaagaagccgaagcagcagtttatcatcgtcgtctcttcgatgaacttcttcaaaacacacaaaaaccaactgacatgtctcatactattgctatcgctgccacatctgcagctgcatcgtgccatgcttcagcaattcttctcattaccaccactggacgctcggcaatccaatgctctcgctacaagccagccgtcccaattctgacaatctcgagagacgttgctgtgtgccgtcagcttcatctttacagaggagttttcccagttcattatccagctgaacgtgctgccgattggccaactgatgttgataacagaatcaaccatgctatcgccatcggaaaggatcgtggattcattcacaagggtgacttcttggttgttgtcactggatggagacagggagccggagctaccaacactcttcgtatcatcaccgccgaataa

SEQ ID NO: 115 - protein, 562 aa, Caenorhabditis elegans
MASSQVQDVELAEAGDTINEVKASSASGRGRLARRMTIEEEHAGDYFKQEQKLAAVPATTHMEHLCRLDIREAPHLVRQTGIICTIGPACASVEMLQKLILNGMNIARLNFSHGSHEYHAGTIANVREAADSFSDKRVIGIALDTKGPEIRTGLLAGGASAEIELARGASIRLTTDPHFSESGTAVNLFVDYKNIAKVLSVGSRVYIDDGLISLIVEELQTDAVICSVENGGMLGSRKGVNLPGTIVDLPAVSEKDCKDLQFGVEQGVDIIFASFIRNAEGIRTIRKVLGEKGKKIKIIAKIENQEGVDNADEIISESDGVMVARGDLGIEIPAEKVFLAQKMLISKCNRAGKPVICATQMLESMVHKPRPTRAEGSDVANAVLDGADCVMLSGETAKGEYPVDALKIMHYICKEAEAAVYHRRLFDELLQNTQKPTDMSHTIAIAATSAAASCHASAILLITTTGRSAIQCSRYKPAVPILTISRDVAVCRQLHLYRGVFPVHYPAERAADWPTDVDNRINHAIAIGKDRGFIHKGDFLVVVTGWRQGAGATNTLRIITAE

SEQ ID NO: 116 - DNA, 1803 bp, Caenorhabditis elegans
  CDS (1)..(1803)
atgtatcgcttttggtccttaatctccggtgataaggttatctcgaagacttcgatgaaaagtattgaaaacgctaagcatattgcacacgttgagcaggttccattgtctccaatgctgtcaaaattaattggtgaaccacctgctcttgatgaaaacaacaatgaaaaaattggaggatcttgtagcgatgaaaatagaccaaaaactcacgtttgctcggttccgggtttcatgcaaaaaccttataaaactaggcaagagcagaagctcgctgctgttccagccactacccatatggagcatttgtgtcgtttggacattcgtgaggctccacatctcgttcgtcagaccggaattatttgcacaattggaccagcttgtgccagtgttgaaatgcttcaaaaattgattctcaatggaatgaacattgctcgtctcaacttttcccatggatctcatgagtaccatgccggaaccatcgccaacgttcgtgaagctgccgattcattctctgacaagcgtgtcattggaattgctttggacacgaagggacctgaaatccgtactggacttcttgccggcggtgcttctgctgaaattgagcttgcacgaggagcatcaatccgtttgactactgatccacacttttctgaatcaggaactgctgtcaatctttttgttgattacaagaacattgccaaagttctttcggttggatcccgtgtctacattgatgacggacttatctcattgattgtcgaagaattgcaaactgacgctgtcatttgctctgttgaaaatggtggaatgttgggaagcagaaagggagtcaatcttccaggaactatcgttgatttgccagctgtttccgagaaggactgtaaggatttgcagtttggtgtggaacaaggtgttgatatcatctttgcttcattcatccgaaacgctgaaggaattcgtacgattcgtaaagttctcggagagaaaggaaagaagattaagattattgcaaagattgagaatcaagaaggagttgataatgctgatgaaattatctctgaatctgatggagttatggttgctcgtggagatctcggtatcgaaattccagccgagaaggtgttccttgcacaaaagatgctcatctccaagtgtaatcgtgctggaaaacctgtcatttgtgcaactcagatgcttgaatcgatggttcacaagccacgtccaaccagagctgaaggatcagatgttgccaatgctgtgcttgacggagctgattgtgtgatgctttctggagagactgctaaaggagaatatccagttgatgcactcaagatcatgcattatatatgcaaagaagccgaagcagcagtttatcatcgtcgtctcttcgatgaacttcttcaaaacacacaaaaaccaactgacatgtctcatactattgctatcgctgccacatctgcagctgcatcgtgccatgcttcagcaattcttctcattaccaccactggacgctcggcaatccaatgctctcgctacaagccagccgtcccaattctgacaatctcgagagacgttgctgtgtgccgtcagcttcatctttacagaggagttttcccagttcattatccagctgaacgtgctgccgattggccaactgatgttgataacagaatcaaccatgctatcgccatcggaaaggatcgtggattcattcacaagggtgacttcttggttgttgtcactggatggagacagggagccggagctaccaacactcttcgtatcatcaccgccgaataa

SEQ ID NO: 117 - protein, 600 aa, Caenorhabditis elegans
MYRFWSLISGDKVISKTSMKSIENAKHIAHVEQVPLSPMLSKLIGEPPALDENNNEKIGGSCSDENRPKTHVCSVPGFMQKPYKTRQEQKLAAVPATTHMEHLCRLDIREAPHLVRQTGIICTIGPACASVEMLQKLILNGMNIARLNFSHGSHEYHAGTIANVREAADSFSDKRVIGIALDTKGPEIRTGLLAGGASAEIELARGASIRLTTDPHFSESGTAVNLFVDYKNIAKVLSVGSRVYIDDGLISLIVEELQTDAVICSVENGGMLGSRKGVNLPGTIVDLPAVSEKDCKDLQFGVEQGVDIIFASFIRNAEGIRTIRKVLGEKGKKIKIIAKIENQEGVDNADEIISESDGVMVARGDLGIEIPAEKVFLAQKMLISKCNRAGKPVICATQMLESMVHKPRPTRAEGSDVANAVLDGADCVMLSGETAKGEYPVDALKIMHYICKEAEAAVYHRRLFDELLQNTQKPTDMSHTIAIAATSAAASCHASAILLITTTGRSAIQCSRYKPAVPILTISRDVAVCRQLHLYRGVFPVHYPAERAADWPTDVDNRINHAIAIGKDRGFIHKGDFLVVVTGWRQGAGATNTLRIITAE

SEQ ID NO: 118 - DNA, 1548 bp, Caenorhabditis elegans
  CDS (1)..(1548)
atgtatcaggacgatcatatcggttcagagcattcatctgctactactaatatttctcatttatgcggacttcggatctcggagagacctcaaaaaacaagaaaaactggtgttatttgcactatcggaccagcgtgtagtgatgtagagacactgagaaaaatgataaacactggaatgaatattgccagattgaatttctcacatggaactcacgaggcacatgctgcaacaatcaagacaatccgtgaagctgctgaaaatgctccattcccggtcgcaattgctcttgacaccaaaggacctgaaattcgtaccggaatgtttgccaataatatgaaagaagttcaattggaaaatgggaaaagtgttcgagtttccacagatccatctatggaatttgctgcaacatcttctcatatttatgctgactacagaaatcttccaaaagttgttcaacctggttcaagaatctatattgatgacggattgatttctttaatcgtcgaaagttgtgaagaaacagcagttatatgtacaattgaaaatggaggagctcttggaacacggaaaggtgttaatcttcctggaactattgttgatcttcctgcagtcacatcaaaagatatcgaagatttattatttggagttgagcaaggtgttgatattatttttgcatcattcatcagaaatgccgacggaattcataaaattcgacaagttcttggagaaaaaggaaagcatatttacataattgcaaaaatcgaatcagaagatggagtcactaattgcgatgaaatcatcgaagcatccgatggagtaatggttgcaagaggagatcttggaattgaaattcctgcggagaaagtattcctcgcccagaaaatgctcattgccaaatgtaatctggcgggaaaacctgtgatatgtgcaacccagatgctcgagagcatgatcaccaaacctcgtccgactagagcagaatgcagtgacgtggcaaacgctgtcttggatggagttgactgtgtgatgttgagtggagaaactgcaaaaggagattatccagttgaagcattggcgattatgcataatatctgcaaagaagcagaatctgcattcttccatatgaaacattttgaagagcttattcttcataccaagaaaccaactggaatgactcatacaactgcaattgcagctgtttctgcaacaatcacatgccgtgctgtcgctattattctcatcacaacaacgggaaaaaccgcccgtctatgttcccgataccgtccaccagttccaattattactgtttctcgtgatgaacgaatctctcgtcaacttcatcttcacagaggaatctttcctgtttactatccaaagggacgtattgatgaatgggatgttgatgttgaggaacgtgtgcaatacggagtaaatcttggtaagacacgtggattcattcatcttggagatccacttattgtgatcactggatggaagcaaggagctggattcacaaacaccatgagaattgtagttgccacctaa

SEQ ID NO: 119 - protein, 515 aa, Caenorhabditis elegans
MYQDDHIGSEHSSATTNISHLCGLRISERPQKTRKTGVICTIGPACSDVETLRKMINTGMNIARLNFSHGTHEAHAATIKTIREAAENAPFPVAIALDTKGPEIRTGMFANNMKEVQLENGKSVRVSTDPSMEFAATSSHIYADYRNLPKVVQPGSRIYIDDGLISLIVESCEETAVICTIENGGALGTRKGVNLPGTIVDLPAVTSKDIEDLLFGVEQGVDIIFASFIRNADGIHKIRQVLGEKGKHIYIIAKIESEDGVTNCDEIIEASDGVMVARGDLGIEIPAEKVFLAQKMLIAKCNLAGKPVICATQMLESMITKPRPTRAECSDVANAVLDGVDCVMLSGETAKGDYPVEALAIMHNICKEAESAFFHMKHFEELILHTKKPTGMTHTTAIAAVSATITCRAVAIILITTTGKTARLCSRYRPPVPIITVSRDERISRQLHLHRGIFPVYYPKGRIDEWDVDVEERVQYGVNLGKTRGFIHLGDPLIVITGWKQGAGFTNTMRIVVAT

SEQ ID NO: 120 - DNA, 1404 bp, Clostridium perfringens str. 13
  CDS (1)..(1404): transl_table=11
atgagaagaacaaaattagtatgcactatcggaccagctagtgaaaacgaagaaatcttaacaaaaataatcgaagcaggtatgaacgcttcaagacacaatttctcacatggtgaccatgaagaacataaaggaagaatggttaaagtaagagaaatatcaaaaaaattaggtaaagaagtagctatattattagatactaaaggacctgaaataagaactggaaaattcgagccaagcaaagttgaattaactgctggaactgaatttactatatatgctggagcagaagacgtaataggagacactactaagtgttcagttacatatgctggattagctaaagacgttaaagctggagatactatcttaatagacgacggtttagttggattagaagttgtatctgtagaaggaaacgctgttaaatgtgtagtaagaaacactggattagttggaactcacaaaggagttaacgttcctggagtatcaataaaattaccagctatgactgataaagatagagctgacttaatattcggttgtgaaatgggcgttaacatggttgctgcttcattcataagaaaagcagaagacgttaaagctataagagaagtattagttgctaacggtggagctgatatacaaatattctcaaaaatcgaaaaccaagaaggtgttgataacatagatgctatcatcgaagcttcagacggtatcatggtagctagaggagaccttggtgttgaaataccaatggaagacgttccttcagttcaaaaaatgatcatcgaaaaatgtaacaatgctggaaaaccagttataactgctactcaaatgttagactcaatgatgagaaacccaagaccaacaagagctgaggtttcagacgtaactaacgctatcttagatggtactgatgctatcatgttaagtggtgagtcagctaacggaagctggccagtagaagctgttgaaactatggttaaaatagctactaaatcagaagaaatgttaagctacgaattagcttcatcaaaagctaaaaaacatataccagctgtaccaggagttatctcaagagctgcttgtaatgctgcacacgagttaaaatcagctgctatagtttcattaactcaatcaggagctactgctaagagaatatctcaatgcagaccagatgcaccaatcgttactgtaactccaaacgaaagagttgctaagaaagttgctttatgcttcggtgtttacccagttgttgctgaaaatgctacaatggaaaacgctgttgaaatagctaaaaatgctggattcgttaaagctaatgacactgctgtagttgttgcaggtgtaccagctaacgaaggaaacactaacatagtaaaagttgaagttgtaaaataa

SEQ ID NO: 121 - protein, 467 aa, Clostridium perfringens str. 13
MRRTKLVCTIGPASENEEILTKIIEAGMNASRHNFSHGDHEEHKGRMVKVREISKKLGKEVAILLDTKGPEIRTGKFEPSKVELTAGTEFTIYAGAEDVIGDTTKCSVTYAGLAKDVKAGDTILIDDGLVGLEVVSVEGNAVKCVVRNTGLVGTHKGVNVPGVSIKLPAMTDKDRADLIFGCEMGVNMVAASFIRKAEDVKAIREVLVANGGADIQIFSKIENQEGVDNIDAIIEASDGIMVARGDLGVEIPMEDVPSVQKMIIEKCNNAGKPVITATQMLDSMMRNPRPTRAEVSDVTNAILDGTDAIMLSGESANGSWPVEAVETMVKIATKSEEMLSYELASSKAKKHIPAVPGVISRAACNAAHELKSAAIVSLTQSGATAKRISQCRPDAPIVTVTPNERVAKKVALCFGVYPVVAENATMENAVEIAKNAGFVKANDTAVVVAGVPANEGNTNIVKVEVVK

SEQ ID NO: 122 - DNA, 1425 bp, Clostridium perfringens str. 13
  CDS (1)..(1425): transl_table=11
atgcaaaaaacaaaaatgatatttacaattggtccttcaagtgattcagaagaaattttaagagagttcataagaattggtatgaatgcagctagattaaacttctcacatggagaccatgcaagtcataaagaaaaaatagaacttattaagagacttagaaaagaagaaaaatcagctacagctatcttattagacattaagggtcctaaaataagaacatataattttaaaaatggcgaagctgaattaaaaaatggtgatgaattcacattctcttgcggagatgaaatattaggtgataacactaaatgttcaatctcttataaagaactatatgaagacataaaacctggtggatcaatacttgttgatgatggacttttagaatttaaagtaaaggaagtccgtggaactgatataatatgtgaagttattgaaggaggtactataaaagaccataaaggtgtaaatgtacctaatgtaccaatcaaactccctgcagtaactgaaaaggatagatctgacttaatatttggttgcgagatggaagtagactttgtagcagcttctttcataagaaaaccagaggatgtacttgaagttagagaaattctagactctcatggtggaaaagatataaaaataatatcaaaaatagaaagccaagaaggtgtagataacataaaagaaataattaaagttactgatggtgtaatggttgctagaggtgatatgggagtagaaattcctatagaaaatgtacctataattcaaaaaaatataattaagaaatgtaatcaagcagggaaaatagttataacggcaactcaaatgttagattctatgataagaaatccaagacctactagagctgaagcttctgacgtatgtaatgccatatttgatggtacagatgccataatgcttagtggagaaagtgcttctggtagcttccctatagaggcagcaatgacaatgtctagaatagcaaaaaaagcagaagctaacttagactataattatcttttaagaagattaaaagatccaaatccaaatcccgatgcctttgcagatgccataagttattcagcatcaaaaacagctagcaaattccctacaaaagctatagtagcagccactcagactggttcaactgctaagatattatcaaaatataaacctagctgtccaataatagctattactccatatgaaaaagttagaagaagcttagctttaaactttggaataatttctaagaaatgtgcttattttaatagtacagatgaaattatagaggaagctagaaaagtagctaaagaatttgaaatagctgaaactggagataatataatggtagctgctggattcccaacatcaataactggtggaacaaacatgctaaaaattgaaaaaatataa

SEQ ID NO: 123 - protein, 474 aa, Clostridium perfringens str. 13
MQKTKMIFTIGPSSDSEEILREFIRIGMNAARLNFSHGDHASHKEKIELIKRLRKEEKSATAILLDIKGPKIRTYNFKNGEAELKNGDEFTFSCGDEILGDNTKCSISYKELYEDIKPGGSILVDDGLLEFKVKEVRGTDIICEVIEGGTIKDHKGVNVPNVPIKLPAVTEKDRSDLIFGCEMEVDFVAASFIRKPEDVLEVREILDSHGGKDIKIISKIESQEGVDNIKEIIKVTDGVMVARGDMGVEIPIENVPIIQKNIIKKCNQAGKIVITATQMLDSMIRNPRPTRAEASDVCNAIFDGTDAIMLSGESASGSFPIEAAMTMSRIAKKAEANLDYNYLLRRLKDPNPNPDAFADAISYSASKTASKFPTKAIVAATQTGSTAKILSKYKPSCPIIAITPYEKVRRSLALNFGIISKKCAYFNSTDEIIEEARKVAKEFEIAETGDNIMVAAGFPTSITGGTNMLKIEKI

SEQ ID NO: 124 - DNA, 1716 bp, Arabidopsis thaliana
  CDS (1)..(1716)
atggctgcttatggtcaaatctcctcgggaatgactgtagatcctcaggttctctcttcctccagaaacattggagtttccctatcacctctccggagaacactaatcggcgccggagttaggtctactagtatctctctccgtcaatgttctctctccgttagatcgattaaaatctccgaagatagccgcaaacctaaagcttatgcagagaacggtgcttttgatgtgggagttttggattcttcatcatatagattggctgattcaagaacaagtagtaatgattcaaggaggaagactaagattgtgtgtacgattggaccgtcttcgagttctagggaaatgatttggaaactcgcggaagctggaatgaatgtggctcgtttgaatatgtctcatggtgatcatgcttctcatcagataactattgatttagttaaggagtataattctttgtttgttgacaaagctattgctattatgttggatacaaagggtcctgaggttcgaagcggggatgtaccgcagccgatatttcttgaagagggtcaagagtttaactttactatcaagagaggtgtttcgcttaaagacactgttagtgtaaattatgatgattttgtgaacgatgttgaagttggggatatacttttggtggatggtggaatgatgtcgttagctgttaaatcaaagacgagtgatttggtgaagtgtgtggttattgatggtggagagcttcaatctagacgtcacttgaatgttcgaggaaagagtgcgactcttccatccattacagacaaagattgggaagacataaaatttggagtggacaaccaagtcgatttctacgccgtctcctttgttaaggatgctaaagttgtccatgagttgaagaactatctcaaaacctgcagtgcagacatatcggtgattgtgaaaattgaaagtgcagactctataaagaatcttccttctatcatatctgcttgtgatggggcaatggttgctcgtggagatcttggagctgaacttcccattgaagaggtcccgttgttacaggaagaaataatcagaaggtgtagaagcattcataaaccagtgattgttgccacaaacatgctagagagtatgattaatcatccaacgcctacaagagctgaagtctctgacattgcaattgcagtacgtgaaggcgcagatgctatcatgctttctggtgaaaccgcacatggaaagtttccgctgaaagctgttaacgtaatgcatactgtggcgttgagaaccgaggcaagtctacctgtcagaacctcggcatcccgtaccactgcttacaagggtcacatgggccaaatgtttgcttttcatgcttctataatggcaaatacactgagctcaccgctaattgtatttacgagaaccggatccatggcagtgcttctaagccactaccgcccatctgcaacaattttcgccttcacaaaccagagaagaataatgcaaaggcttgctctttatcaaggtgtcatgcctatatatatggagttctcggatgatgcagaagatacatatgcccggtctctcaaactcttacaggacgagaatatgctcaaggaaggacaacatgtaactcttgtccaaagtggctcgcaacccatttggcgtgaagaatcaacacatctcatacaagtccgtaagataaagataggtggatga

SEQ ID NO: 125 - protein, 571 aa, Arabidopsis thaliana
MAAYGQISSGMTVDPQVLSSSRNIGVSLSPLRRTLIGAGVRSTSISLRQCSLSVRSIKISEDSRKPKAYAENGAFDVGVLDSSSYRLADSRTSSNDSRRKTKIVCTIGPSSSSREMIWKLAEAGMNVARLNMSHGDHASHQITIDLVKEYNSLFVDKAIAIMLDTKGPEVRSGDVPQPIFLEEGQEFNFTIKRGVSLKDTVSVNYDDFVNDVEVGDILLVDGGMMSLAVKSKTSDLVKCVVIDGGELQSRRHLNVRGKSATLPSITDKDWEDIKFGVDNQVDFYAVSFVKDAKVVHELKNYLKTCSADISVIVKIESADSIKNLPSIISACDGAMVARGDLGAELPIEEVPLLQEEIIRRCRSIHKPVIVATNMLESMINHPTPTRAEVSDIAIAVREGADAIMLSGETAHGKFPLKAVNVMHTVALRTEASLPVRTSASRTTAYKGHMGQMFAFHASIMANTLSSPLIVFTRTGSMAVLLSHYRPSATIFAFTNQRRIMQRLALYQGVMPIYMEFSDDAEDTYARSLKLLQDENMLKEGQHVTLVQSGSQPIWREESTHLIQVRKIKIGG

SEQ ID NO: 126 - DNA, 1584 bp, Arabidopsis thaliana
  CDS (1)..(1584)
atgcattcaagtcatctccttctcgaggaaccgatcaggatgacttcaatcctcgaaccttctaaatcaagtttcttcccggctttgactaagattgttgggactctaggtccgaaatctcgatccgtcgaggtgattgctggttgtctcaaagctggaatgtccgtggctcgattcgatttctcttggtgcgatgctgattatcaccaggagacgctggagaatctgaagatagctgtgaagagcactaagaagctttgtgctgttatgctagacactgtaggacctgagttgcaagttattaacaagactgagaaagctatttctcttaaagctgatggccttgtaactttgactccgagtcaagatcaagaagcctcctctgaagtccttcccattaattttgatgggttagcgaaggcggttaagaaaggagacactatctttgttggacaatacctcttcactggtagtgaaacaacttcagtttggcttgaggttgaagaagttaaaggagatgatgtcatttgtatttcaaggaatgctgctactctgggtggtccgttattcacattgcacgtctctcaagttcacattgatatgccaaccctaactgagaaggataaggaggttataagtacatggggagttcagaataagatcgactttctctcattatcttattgtcgacatgcagaagatgttcgccaggcccgtgagttgcttaacagttgtggtgacctctctcaaacacaaatatttgcgaagattgagaatgaagagggactaacccactttgacgaaattctacaagaagcagatggcattattctttctcgtgggaatttgggtatcgatctacctccggaaaaggtgtttttgttccaaaaggctgctctttacaagtgtaacatggctggaaagcctgccgttcttactcgtgttgtagacagtatgacagacaatctgcggccaactcgtgcagaggcaactgatgttgctaatgctgttttagatggaagtgatgcaattcttcttggtgctgagactcttcgtggattgtaccctgttgaaaccatatcaactgttggtagaatctgttgtgaggcagagaaagttttcaaccaagatttgttctttaagaagactgtcaagtatgttggagaaccaatgactcacttggaatctattgcttcttctgctgtacgggcagcaatcaaggttaaggcatccgtaattatatgcttcacctcgtctggcagagcagcaaggttgattgccaaataccgtccaactatgcccgttctctctgttgtcattccccgacttacgacaaatcagctgaagtggagctttagcggagcctttgaggcaaggcagtcacttattgtcagaggtcttttccccatgcttgctgatcctcgtcaccctgcggaatcaacaagtgcaacaaatgagtcggttcttaaagtggctctagaccatgggaagcaagccggagtgatcaagtcacatgacagagttgtggtctgtcagaaagtgggagatgcgtccgtggtcaaaatcatcgagctagaggattag

SEQ ID NO: 127 - protein, 527 aa, Arabidopsis thaliana
MHSSHLLLEEPIRMTSILEPSKSSFFPALTKIVGTLGPKSRSVEVIAGCLKAGMSVARFDFSWCDADYHQETLENLKIAVKSTKKLCAVMLDTVGPELQVINKTEKAISLKADGLVTLTPSQDQEASSEVLPINFDGLAKAVKKGDTIFVGQYLFTGSETTSVWLEVEEVKGDDVICISRNAATLGGPLFTLHVSQVHIDMPTLTEKDKEVISTWGVQNKIDFLSLSYCRHAEDVRQARELLNSCGDLSQTQIFAKIENEEGLTHFDEILQEADGIILSRGNLGIDLPPEKVFLFQKAALYKCNMAGKPAVLTRVVDSMTDNLRPTRAEATDVANAVLDGSDAILLGAETLRGLYPVETISTVGRICCEAEKVFNQDLFFKKTVKYVGEPMTHLESIASSAVRAAIKVKASVIICFTSSGRAARLIAKYRPTMPVLSVVIPRLTTNQLKWSFSGAFEARQSLIVRGLFPMLADPRHPAESTSATNESVLKVALDHGKQAGVIKSHDRVVVCQKVGDASVVKIIELED

SEQ ID NO: 128 - DNA, 1584 bp, Arabidopsis thaliana
  CDS (1)..(1584)
atgcattccagtcatcttcttctcgaggagccgatcaggatggcttcaatcctcgagccttccaaatctagtttcttcccggcattgactaagatcgtcggaactctaggtcctaaatcccgatccgtcgaggctctctccggctgtctcaaagccggcatgtctgtggctcgatttgatttctcgtggggagatgctgattatcaccaggagacacttgataatttgaaagttgctgtgaggagcactaagaagctttgtgctgttatgcttgatactgttggacctgagctacaagttattaacaaatctgagaaagctattactttgaaagctgatggccttgtaactttgacaccgaatcaagatcaagaagcttcttctgaagttcttcccattaatttcaatggacttgccaaggcagtgaagaaaggagacaccatcttcgttgggcaatacctattcactggtagtgaaacaacttcagtttggctcgaggttgatgaagttaaaggagatgatgtcatttgcctttcaaggaatgctgctactctggctggttctttgttcactttacactcctctcaagttcacattgatctcccaacgcttacagagaaggataaggaggttataagcacatggggagttcaaaataaaatcgattttctctcattgtcttattgtcgtcatgctgaggatgttcgccagacccgtgaaatgcttaaaaagttgggcgacctctctcaaacacaaatatttgctaagattgagaacgtagagggactaacccacttcgatgagattctacaagaagctgatggcattattctttctcgtgggaatttgggtatagatttacccccggaaaaggtgtttttgtttcaaaaggctgctctttacaagtgcaacatggctggaaagccagctgttcttacccgtgttgttgacagtatgactgacaacttgcgaccaactcgtgctgaggccacggatgttgctaatgctgttttagatggaagtgatgcaattcttcttggtgctgagacccttcgtggattgtaccctgttgagacaatatcaactgttggtaggatctgtgctgaggcagaaaaggttttcaatcaagatttgtactttaagaagactgtcaagtatgttggagaaccaatgactcacttggaatcgattgcttcttcagctgtacgggcagccattaaggttaaggcatccgtaattatatgcttcacctcttctggaagagcagccagattgattgccaaatacaggccaacgatgccggttatttctgttgtcattccccgggttaagacaaatcaactgaaatggagctttagtggagcttttgaggcgaggcagtcacttattgtcagaggcctcttccctatgcttgctgaccctcgtcaccctgcggaatctacaagtgcgacaaacgagtcagtcctgaaggttgctctagaccatgggaagcatgctggagtaatcaagtcgcatgacagagtagtggtgtgtcagaaagttggtgatgcatctgtggttaagatcattgagcttgaggattaa

SEQ ID NO: 129 - protein, 527 aa, Arabidopsis thaliana
MHSSHLLLEEPIRMASILEPSKSSFFPALTKIVGTLGPKSRSVEALSGCLKAGMSVARFDFSWGDADYHQETLDNLKVAVRSTKKLCAVMLDTVGPELQVINKSEKAITLKADGLVTLTPNQDQEASSEVLPINFNGLAKAVKKGDTIFVGQYLFTGSETTSVWLEVDEVKGDDVICLSRNAATLAGSLFTLHSSQVHIDLPTLTEKDKEVISTWGVQNKIDFLSLSYCRHAEDVRQTREMLKKLGDLSQTQIFAKIENVEGLTHFDEILQEADGIILSRGNLGIDLPPEKVFLFQKAALYKCNMAGKPAVLTRVVDSMTDNLRPTRAEATDVANAVLDGSDAILLGAETLRGLYPVETISTVGRICAEAEKVFNQDLYFKKTVKYVGEPMTHLESIASSAVRAAIKVKASVIICFTSSGRAARLIAKYRPTMPVISVVIPRVKTNQLKWSFSGAFEARQSLIVRGLFPMLADPRHPAESTSATNESVLKVALDHGKHAGVIKSHDRVVVCQKVGDASVVKIIELED

SEQ ID NO: 130 - DNA, 1530 bp, Schizosaccharomyces pombe
  CDS (1)..(1530)
atgtcctcttctgctgtctctcctaagcaatgggtcgccggcctcaacagcgagcttgatatccccgctgtcaaccgtcgtacctccatcatttgcaccattggtcccaagtccaacaacgttgagaccttgtgcaagctccgtgatgctggtatgaacattgttcgtatgaacttctctcacggttcctacgaataccaccaatccgtcattgacaatgcccgtaaggcctctgccaccaaccctctcttccccttggccattgccttggatactaagggacctgagattcgtactggtctcaccgttggcggtactgactaccccatctcctctggtcacgagatgatcttcaccaccgacgatgcttatgccgagaagtgtaacgacaaggtcatgtacattgactacaagaacatcaccaaggtcattcaacctggccgtatcatctacgttgatgatggtatcctttccttcactgtcatcgagaaggttgatgacaagaatttgaaggtccgtgtcaacaacaacggtaagatctcttccaagaagggtgtcaacttgcctaagactgatgtcgatttgcccgctttgtccgagaaggacaaggccgatctccgcttcggtgtcaagaacggtgtcgacatgatctttgcttccttcatccgtcgtgctgaggacgttatccacatccgtgaagttttgggtgaggagggtaagaacatcaagatcatctgcaagatcgagaaccaacaaggtgttaacaactttgactctatccttgacgttaccgacggtatcatggttgcccgtggtgacttgggtattgaaatccctgcctctcaagttttcgtcgcccaaaagatgatgattgccaagtgcaacatcgctggtaagcccgttgcttgtgccactcaaatgcttgagtccatgacctacaaccctcgtcctactcgtgccgaggtttccgatgttggtaacgccgttctcgatggtgctgacttggtcatgctttccggtgagactaccaagggttcttaccccgttgaagccgttacctacatggctgagactgcccgtgttgctgaggcttccatcccttacggcagcctttaccaagagatgttcggcctcgtccgtcgtcctcttgagtgtgctaccgagaccactgctgtcgctgccatcggtgcctccattgagagtgatgccaaggccatcgttgtcttgtccaccagcggtaacactgctcgtctctgctccaagtaccgtccttctatccccattgttatggttactcgttgccctcaaagagctcgtcaatctcacctcaaccgtggtgtctaccccgtcatctacgagaaggagcctctttctgactggcaaaaggatgttgacgctcgtgttgcctacggttgccaacaagcttacaagatgaacatcctcaagaagggtgacaagatcattgtccttcaaggtgccgttggtggtaagggtcacacctccatcttccgtcttaccgttgccgagtaa

SEQ ID NO: 131 - protein, 509 aa, Schizosaccharomyces pombe
MSSSAVSPKQWVAGLNSELDIPAVNRRTSIICTIGPKSNNVETLCKLRDAGMNIVRMNFSHGSYEYHQSVIDNARKASATNPLFPLAIALDTKGPEIRTGLTVGGTDYPISSGHEMIFTTDDAYAEKCNDKVMYIDYKNITKVIQPGRIIYVDDGILSFTVIEKVDDKNLKVRVNNNGKISSKKGVNLPKTDVDLPALSEKDKADLRFGVKNGVDMIFASFIRRAEDVIHIREVLGEEGKNIKIICKIENQQGVNNFDSILDVTDGIMVARGDLGIEIPASQVFVAQKMMIAKCNIAGKPVACATQMLESMTYNPRPTRAEVSDVGNAVLDGADLVMLSGETTKGSYPVEAVTYMAETARVAEASIPYGSLYQEMFGLVRRPLECATETTAVAAIGASIESDAKAIVVLSTSGNTARLCSKYRPSIPIVMVTRCPQRARQSHLNRGVYPVIYEKEPLSDWQKDVDARVAYGCQQAYKMNILKKGDKIIVLQGAVGGKGHTSIFRLTVAE

SEQ ID NO: 132 - DNA, 1428 bp, Fusobacterium nucleatum subsp. nucleatum ATCC 25586
  CDS (1)..(1428): transl_table=11
gtgaggagtttgaaaaaaacaaaaatagtttgtactattggtcctgtgactgaatcagtagaaactttaaaagaattactaaataggggaatgaatgtaatgagattgaatttctctcatggtgattatgaagaacatggaatgagaatgaagaattttagacaagcaatgtctgaaactggaattagaggaggaatacttcttgatactaagggtccagaaataagaacaatgactttaaaagatggaaaagatgtaagtattaaggctggacaaaaatttactttcacaacagatcaatcggttgttggagataatgaaagagtagcagtaacttatgaaaattttgcaaaagatttaaaagttggaaatatggttcttgttgatgatggattattagaactagatgttgtggaaataaaaggaaatgaagttatatgtatagccagaaataatggagatctaggacaaaagaaaggaataaatttacctaatgtttctgttaatttaccagcattatctgagaaagatatagaagatctaaaatttggttgtcaaaataatgttgattttgtggcagcatcatttataagaaaagctgatgatgtaagacaagtaagaaaagttcttagagaaaatgatggagaaagaatacaaataatttctaagatagaaagccaggaagggcttgataattttgatgaaattttagcagaatctgatggtataatggtagcaagaggagacttaggtgtagaaatccctgttgaagaagttccttgtgcgcaaaaaatgatgataagaaaatgtaatagagtaggaaaaactgttattacagcaactcaaatgctagattcaatgattaaaaatccaagacctacaagagcagaagcaaatgatgttgccaatgctatattagatggtacagatgcagtaatgctttcaggtgaaactgcaaagggaaaatatccattagcagctgttgaagttatgaataaaatagctaaaaaagttgatgctacaataccaccattttacatagaaggtgttataaataaaaatgatataacttctgctgttgcagaaggaagtgctgacataagcgaaaggttaaatgcaaaacttatagttgttggtacagaatctggaagagctgcaagagacatgagaagatatttccctagagcacatattttagcaataactaataatgaaaaaactgcaaatcaattagttttatcaagagggataatttcatatgtagatgcttcaccaaaaactttagaagaattctttgttgtagcagaatctgttgcaaaaaaattaaatttagttaaaaataatgatataattatagcaacttgtggagaaagtgtatttatacaaggaacaactaactcaataaaagtaatacaagtaaaagcatag

SEQ ID NO: 133 - protein, 475 aa, Fusobacterium nucleatum subsp. nucleatum ATCC 25586
MRSLKKTKIVCTIGPVTESVETLKELLNRGMNVMRLNFSHGDYEEHGMRMKNFRQAMSETGIRGGILLDTKGPEIRTMTLKDGKDVSIKAGQKFTFTTDQSVVGDNERVAVTYENFAKDLKVGNMVLVDDGLLELDVVEIKGNEVICIARNNGDLGQKKGINLPNVSVNLPALSEKDIEDLKFGCQNNVDFVAASFIRKADDVRQVRKVLRENDGERIQIISKIESQEGLDNFDEILAESDGIMVARGDLGVEIPVEEVPCAQKMMIRKCNRVGKTVITATQMLDSMIKNPRPTRAEANDVANAILDGTDAVMLSGETAKGKYPLAAVEVMNKIAKKVDATIPPFYIEGVINKNDITSAVAEGSADISERLNAKLIVVGTESGRAARDMRRYFPRAHILAITNNEKTANQLVLSRGIISYVDASPKTLEEFFVVAESVAKKLNLVKNNDIIIATCGESVFIQGTTNSIKVIQVKA

SEQ ID NO: 134 - DNA, 1470 bp, Methanosarcina acetivorans C2A
  CDS (1)..(1470): transl_table=11
atgaatataaacgtgaatataaacggccgtgaaaatatgcaaatccctgaccataaaacaaagatcgtctgcaccataggccctgcttccttctccgaggaagtcctcaggaaactggtgcttgcgggaatgaacgttgcaaggattaacttttcccacggagacttcgagagccacggaaaagttatccggagggtccgaaaggttgcagaagagcttgacaggacagttgctatccttgccgacctcccaggcccgaaaattcgcgtaggcaagctcaaaaaagagccgcttatgctccataaagggaaccgaataacccttaccactgacgagacttctggaagcgaggaccgcatcccggtcaactacaaacagctccctgagagcgtctccccgggaagccttatctacctgagtgacggatttatccagctcctctgcctggaaatctcgggaaaagatgtagtctgcgaagttatggtcggaggacaactctactcccataaagggctgaacctgccaggggcaaaaatttacctggactctgtgacggaacatgacttcaaaatccttgagtttgccctgaacgaagaagttgacgcagtcagcatctcttttgtggaaaaagccgaagatatccgaaaagtccggaattttgcttcaaccatgggaaaacctgtatacgttgtctcaaaaatcgaacggagccaggcggtccagaatatagaagagatccttgaggaaaccgatgccctgatggttgccagaggagacctgggagttgagattcctatccaagaagtaccttcggtccagaaagaactcatccggagtgcaaagctcctgagcatccccgtaattactgcaacccacatgctggcctccatgaccgacaacatcaggcctacaagggcggaggctacagacgttgccaacgccatccttgacgggacggacgcggtcatgctctcggaagaaaccgcagttgggaactatcccgtggaaactgtggagatgatggcaaaaattgcaaaaacaacagaaaactggcgctcccgaacgaagtggggacttgacacaatgctcaagggaattacggcacagaaaatgtcagtggacgaggtaatcgctctccaggtacacgaagccctgcaaaagcttcctgtagccgttgtactcaccccaacccgaagcggagcaaccccgcgcaggctttcccgcttcaagcctgaaccctggatcctggctttcacccgcttcccgaaaacctgtagctcccttgccttgtcctatggggtttatccgataatagtaaaagaagtctctgaaaactgggaaacggagaccacggaaaaggcaaaggaactgggatttgcaaaaagcggagagctcgtagttttcacccagggacctgcttccggaaaaccaggaggcacaaacatgctcaagatcctgactctggactga

SEQ ID NO: 135 - protein, 489 aa, Methanosarcina acetivorans C2A
MNINVNINGRENMQIPDHKTKIVCTIGPASFSEEVLRKLVLAGMNVARINFSHGDFESHGKVIRRVRKVAEELDRTVAILADLPGPKIRVGKLKKEPLMLHKGNRITLTTDETSGSEDRIPVNYKQLPESVSPGSLIYLSDGFIQLLCLEISGKDVVCEVMVGGQLYSHKGLNLPGAKIYLDSVTEHDFKILEFALNEEVDAVSISFVEKAEDIRKVRNFASTMGKPVYVVSKIERSQAVQNIEEILEETDALMVARGDLGVEIPIQEVPSVQKELIRSAKLLSIPVITATHMLASMTDNIRPTRAEATDVANAILDGTDAVMLSEETAVGNYPVETVEMMAKIAKTTENWRSRTKWGLDTMLKGITAQKMSVDEVIALQVHEALQKLPVAVVLTPTRSGATPRRLSRFKPEPWILAFTRFPKTCSSLALSYGVYPIIVKEVSENWETETTEKAKELGFAKSGELVVFTQGPASGKPGGTNMLKILTLD

SEQ ID NO: 136 - DNA, 1752 bp, Thermoanaerobacter tengcongensis MB4
  CDS (1)..(1752): transl_table=11
atgaggagaacaaaaatagtctgtacaattggacctgctagtgaggactacaatatactgagaaagttaatagaaaaaggaatgaatgtagcaaggcttaatttttcccatggagattttgaagagcacggagcgaggattgacaacataaaaaagataagggaagaattaggtcttcctgtagctattttgctggacacaaaaggacccgagattagaacgggaaagtttaaaaacggcggagtagagttaaaggaaggccagacttttacattaactacaagggatgtaataggagatgaaacggtagtcagtgtttcctacaaaggtttgcctcaagatgtttcaagaggtacccaaattttgattgatgacggattgatctcactaagggttgtggatgtcaaaggggaagacataatctgtgtagttgaaaattcgggatttcttggagaccacaaaggagtaaatgttcctggagtgaaattgaatctcccggctttgacacaaaaagacatagaagatatagagtttggcataaagaaaggtattgacatgatagctgcttcttttgtcaggaaagcggcagatgtgcttgctataaggaggcttcttgaggacaataaagcagaccacattcagataattgctaaaatagaaaaccgcgaaggagtagaaaatatagacgaaataataagggtatctgacgggataatggtggccagaggagatttgggcgttgagatacctctggaggaaataccgatagtgcagaagatgataataaagaagtgcaatgaagctggaaagccagttattactgcaacccaaatgctggattccatgatgagaaatccgcgtcctactcgtgctgaagttacggatgttgctaatgctattttggatggaacggatgccataatgctgtcaggtgagacggcccagggcaaatatcctgtcgaagcttttgagacaatggccaggattgcggaaaagacagaggtttacgtccagtacagagatatagtaggtgtaggtacagagagaaatgtttccattactaatgcgataagccatgctacctgcacgactgcgagagatataggcgcttcagctatcataacctgtacaaaatcaggttatacggctaggatggtttcaaggtataggccttcctctcctatcatagctactactcctagcgagcaggtggcaagaaagctttccatcgtgtggggagtatatcctttagtgacaaaagaagtgtcaaccacagacgaaatgatagatgttgcaatagaaagtgcgttaaaagctgggcttataaggaatggagatattgtggtgatttctgcgggaatacctgttgccatgactggcaccacaaacatgctcaaagttcacatagttggagatgtgattttaagaggtattggtataggttcaaaatctactactggcactgtgtgcataattcatgacattggcaaggacagagacaagtttagagaaggagatataattgttacaaccaagacagagagagattttatgcctcttattgaaaaagcttctgccataataacagaagaaggcgggctcacctcccacgctgctattgttgggcttaacttggggatccctgtgattgtagggtgtgaaggagctacttcaaaacttcaggatgggatgacagtcactgttgacaccacgagaggactggtgtataaaggaattgtaaacataaaatga

SEQ ID NO: 137 - protein, 583 aa, Thermoanaerobacter tengcongensis MB4
MRRTKIVCTIGPASEDYNILRKLIEKGMNVARLNFSHGDFEEHGARIDNIKKIREELGLPVAILLDTKGPEIRTGKFKNGGVELKEGQTFTLTTRDVIGDETVVSVSYKGLPQDVSRGTQILIDDGLISLRVVDVKGEDIICVVENSGFLGDHKGVNVPGVKLNLPALTQKDIEDIEFGIKKGIDMIAASFVRKAADVLAIRRLLEDNKADHIQIIAKIENREGVENIDEIIRVSDGIMVARGDLGVEIPLEEIPIVQKMIIKKCNEAGKPVITATQMLDSMMRNPRPTRAEVTDVANAILDGTDAIMLSGETAQGKYPVEAFETMARIAEKTEVYVQYRDIVGVGTERNVSITNAISHATCTTARDIGASAIITCTKSGYTARMVSRYRPSSPIIATTPSEQVARKLSIVWGVYPLVTKEVSTTDEMIDVAIESALKAGLIRNGDIVVISAGIPVAMTGTTNMLKVHIVGDVILRGIGIGSKSTTGTVCIIHDIGKDRDKFREGDIIVTTKTERDFMPLIEKASAIITEEGGLTSHAAIVGLNLGIPVIVGCEGATSKLQDGMTVTVDTTRGLVYKGIVNIK

SEQ ID NO: 138 - DNA, 1431 bp, Streptomyces coelicolor A3(2)
  CDS (1)..(1431): transl_table=11
atgcgccgttcgaaaatcgtctgtactctcggccccgcggtcgactcccacgagcagctcgtcacgctgatcgaagccggcatgaacgtggcccgcttcaacttcagccatggcacccacgccgagcaccagggtcgttacgaccgggtccgggccgccgccaaggagaccggccgggccatcggcgtcctcgccgacctccagggcccgaagatccgcctggagaccttcgcggagggccccgtcgagctggtgcgcggtgacgagttcaccatcaccgccgaggacgtcccgggcgacaggacgatctgcggcacgacctacaagggcctgcccggtgacgtcaccaagggcgaccaggtgctcatcaacgacggcaacgtcgagctgaaggtcaccgaggtcgagggcccccgggtgaagacgatcgtcatcgagggcggcgtcatctccgaccacaagggcatcaacctgccgggcgcggcggtcaacgtccccgcgctgagcgagaaggacgtcgaggacctccggttcgcgctgcgcatgggctgcgacctggtcgccctctccttcgtccgggacgccaaggacgtcgccgacgtgcaccgcgtcatggacgaggagggccgccgggtcccggtgatcgccaaggtcgagaagccccaggcggtcgacaacatggaggacgtcgtgatggcgttcgacggcgtgatggtcgcccgtggcgacctggccgtcgagtacccgctcgagaaggtccccatggtgcagaagcgcctgatcgagctgtgccggcgcaacgccaagccggtgatcgtggcgacccagatgatggagtcgatgatcacgaactcccggccgacccgcgccgaggcctccgacgtggccaacgcgatcctggacggcgccgacgcggtcatgctgtccgccgagtcgagcgtgggcgcctacccgatcgagaccgtcaagacgatgtcgaagatcgtcaccgccgccgagcaggagctgctctccaagggcctccagccgctggtgccgggcaagaagccgcgcacgcagggcggttcggtggcccgtgcggccgccgagatcgccgacttcctgggcggcaagggcctggtcgccttcacccagtccggcgacaccgcccgccggctctcccgctatcgcgcggcccagccgatcctcgccttcaccaccgacgagtccacccgcaaccagctggcgctcagctggggagtggagccgcacgtggtgccgttcgtgaacaccacggacgagatggtggacctggtggaccaggagacggcccgcctcggccggttcagcgacggcgacaccgtcgtgatcaccgccggttcgccccccggcgtgtccggcaccaccaacatggtgcgggtcctccacctgggcgagacacggcgcggctga

SEQ ID NO: 139 - protein, 476 aa, Streptomyces coelicolor A3(2)
MRRSKIVCTLGPAVDSHEQLVTLIEAGMNVARFNFSHGTHAEHQGRYDRVRAAAKETGRAIGVLADLQGPKIRLETFAEGPVELVRGDEFTITAEDVPGDRTICGTTYKGLPGDVTKGDQVLINDGNVELKVTEVEGPRVKTIVIEGGVISDHKGINLPGAAVNVPALSEKDVEDLRFALRMGCDLVALSFVRDAKDVADVHRVMDEEGRRVPVIAKVEKPQAVDNMEDVVMAFDGVMVARGDLAVEYPLEKVPMVQKRLIELCRRNAKPVIVATQMMESMITNSRPTRAEASDVANAILDGADAVMLSAESSVGAYPIETVKTMSKIVTAAEQELLSKGLQPLVPGKKPRTQGGSVARAAAEIADFLGGKGLVAFTQSGDTARRLSRYRAAQPILAFTTDESTRNQLALSWGVEPHVVPFVNTTDEMVDLVDQETARLGRFSDGDTVVITAGSPPGVSGTTNMVRVLHLGETRRG

SEQ ID NO: 140 - DNA, 1434 bp, Methanosarcina mazei Go1
  CDS (1)..(1434): transl_table=11
atggaaatcccggatcataaaacaaagatcgtctgtacaataggacctgcctcttcttctgaagagatgataaggaagcttatgcttgcgggcatgaacgtggcaaggataaatttttctcacggagactttgagagccactcaagggttgtccgaattatccgtaaggttgcagatgaacttggcaggacaattgcaatccttgcagacctgcctggcccgaaaatacgcataggcaaactcgaaaaagagcctgttatgctccataaagggaacccgataacccttacaattgacgacactccgggaaacgaagagagaatccctgtcagttacaaacagcttccggaaagcgtaacccctgggagccttatctacctcagtgacgggttcatacagctcctctgcaaggaggttacaggaaaagacgttctctgtgaagtccttatcggaggagagctttattcgcacaaagggctgaaccttccaggggcaaagatctttcttgacgctgtgactgaaaaagatttcaggatcctggaatttgcccttgaagaggacattgacactttcagcatctcttttgtagaaaatgcagaagatatccgaaaagtaagaaattttgccgcttccagaggaaagcaggtaaatatagtatcaaaaatagaacgcaggcaggctgtagaaaatataggagaaatccttgacgagaccgatgcccttatggttgcaaggggagacctgggagttgaaattcctatccaggaagtcccttcggtccagaaagaacttatccagagggcaaagctccttggggttcctgtgattactgcaacccatatgctggcttccatgacagataatataagacccacgcgtgccgaagccacggatgttgcaaacgctatccttgacggcacggatgctgttatgctctcggaagaaacagcagtcggaaactaccccgtggaagctgtcgagatgatggcaaagattgcaaagaccactgaaaactggcgctcccggactaaatgggggcttgacacaatgatcaaatccataactgccagggagatgtcagtggatgaggtaatcaccttacaggtttatgaagccctgcagaaactgcctgttgcagccgtacttaccccgacaaggagcggagcgactccccgcaggatttcgcgctttaatcctgacccctggattctggctttcagccgcgttcctaagacctgcaggttcctttccctgtcttacggggtttatcctgttgccgtaaacgaatctattgaaagctgggaaaaagagacaacggaaagaacaaaagaattgggatttgcgaaaagtaaagatctcgtgatttttacccagggccctgcttccggaaaacccggaggtacgaatatgctcaagatcctgacccttgactga

SEQ ID NO: 141 - protein, 477 aa, Methanosarcina mazei Go1
MEIPDHKTKIVCTIGPASSSEEMIRKLMLAGMNVARINFSHGDFESHSRVVRIIRKVADELGRTIAILADLPGPKIRIGKLEKEPVMLHKGNPITLTIDDTPGNEERIPVSYKQLPESVTPGSLIYLSDGFIQLLCKEVTGKDVLCEVLIGGELYSHKGLNLPGAKIFLDAVTEKDFRILEFALEEDIDTFSISFVENAEDIRKVRNFAASRGKQVNIVSKIERRQAVENIGEILDETDALMVARGDLGVEIPIQEVPSVQKELIQRAKLLGVPVITATHMLASMTDNIRPTRAEATDVANAILDGTDAVMLSEETAVGNYPVEAVEMMAKIAKTTENWRSRTKWGLDTMIKSITAREMSVDEVITLQVYEALQKLPVAAVLTPTRSGATPRRISRFNPDPWILAFSRVPKTCRFLSLSYGVYPVAVNESIESWEKETTERTKELGFAKSKDLVIFTQGPASGKPGGTNMLKILTLD

SEQ ID NO: 142 - DNA, 1503 bp, Streptococcus pyogenes MGAS315
  CDS (1)..(1503): transl_table=11
atgaataaacgcgtaaaaatcgttgcaacacttggtcctgcggttgaaatccgtggtggtaaaaaatacggagaagatggctactgggctggtcaacttgatgttgaagaatcagcaaaaaaaatcgctgaattaattgaagctggtgcgaatgttttccgtttcaatttctcacatggtgaccacaaagaacaaggtgaccgtatggcaactgttcgccttgcagaagaaattgctcgtcaaaaagttggtttccttttggatactaaaggtcctgaaatgcgtacggaattgtttgcagatgatgctaaagaattcagctatgtcactggagaaaaaatccgtgtagcgactacacaaggtattcaatcaactcgcgatgttattgctttgaacgttgctggtagccttgacatctacgatgaagtagaagtaggtcatactattcttatcgatgatggtaaactcggtttgaaagtgatcgacaaagatatcgcaacacgtcaatttatcgttgaagtagaaaacgatggtattattgctaaacaaaaaggtgttaatatccctaacactaaaattcctttcccagcacttgcggaacgcgacaatgctgatatccgttttggtcttgaacaaggacttaactttattgcaatctcatttgttcgtacagccaaagacgttgaggaagttcgtgaaatctgtcgcgaaactggtaacgatcatgtgcaattatttgctaagattgaaaaccaacaaggtatcgataatcttgatgaaatcatcgaagctgctgatggtatcatgattgcacgtggcgacatgggtatcgaagtaccatttgaaatggttccagttttccaaaaaatgattatcactaaagtgaatgcagctggtaaagcagttatcacagcaacaaacatgcttgaaacaatgactgaaaaaccacgtgcgacacgttctgaagtatctgacgtcttcaatgctgttatcgatggtactgatgcaacaatgctttcaggagagtcagctaacggtaaatacccggttgaatctgttcgtacaatggcgactattgatcgtaatgcacaaactcttcttaacgaatatggtcgtttagattcatctgccttcccacgtaccaataaaacagatgttattgcttcagctgttaaagatgccactcattcaatggacatcaaacttgttgtgactattactgagacaggtaatacagctcgtgcgatttctaaattccgtccagatgcggatatcttagctgtaacatttgatgaaaaagtacaacgtgctttgatgattaactgggctgttattcctgttcttgctgaaaaacctgcatctactgatgacatgtttgaagtagcagagcgtgttgctgtggaggcaggcttagttcaatctggggataatattgttattgttgctggtgttccagttggtactggtggaacgaatactatgcgtgttcgtacagtaaaataa

SEQ ID NO: 143 - protein, 500 aa, Streptococcus pyogenes MGAS315
MNKRVKIVATLGPAVEIRGGKKYGEDGYWAGQLDVEESAKKIAELIEAGANVFRFNFSHGDHKEQGDRMATVRLAEEIARQKVGFLLDTKGPEMRTELFADDAKEFSYVTGEKIRVATTQGIQSTRDVIALNVAGSLDIYDEVEVGHTILIDDGKLGLKVIDKDIATRQFIVEVENDGIIAKQKGVNIPNTKIPFPALAERDNADIRFGLEQGLNFIAISFVRTAKDVEEVREICRETGNDHVQLFAKIENQQGIDNLDEIIEAADGIMIARGDMGIEVPFEMVPVFQKMIITKVNAAGKAVITATNMLETMTEKPRATRSEVSDVFNAVIDGTDATMLSGESANGKYPVESVRTMATIDRNAQTLLNEYGRLDSSAFPRTNKTDVIASAVKDATHSMDIKLVVTITETGNTARAISKFRPDADILAVTFDEKVQRALMINWAVIPVLAEKPASTDDMFEVAERVAVEAGLVQSGDNIVIVAGVPVGTGGTNTMRVRTVK

SEQ ID NO: 144 - DNA, 1785 bp, Thermosynechococcus elongatus BP-1
  CDS (1)..(1785): transl_table=11
atgtcgaaccagccgttgcaacgccgcaccaaaattgtcgccaccattggtccagcagtcagtcaccccgacaaattgcgcgccattattcaagcgggagcaaccaccctgcgtctaaacttttcccatggcacccatgacgatcaccagcgcagcattcgcctcattcgccaaatttcctatgaactcgggcaaccggtggggattttgcaggacttgcaaggccccaagattcgccttgggcggtttgagcatggctccatttccctcaagcggggcgatcgctttaccctcacgagtcgccctatcctgggcaatcagcacattagctcaattacctatccccccttggcccaagaggtgcccgccggtgccacgattttgctcgacgatggccgcgtggaaatgctcgtggaagaagtggataaagaggcgggggagctccattgccaagtgattgttgggggtaccctctccaatgccaagggtgtgaactttccgggggtttacctttcgattaaagccctaacagagaaagatcgcgaagatctgatgtttggcctcaatcaaggggtggattgggtggccctcagcttcgttcgcaatccccaagatgtactggagatcaaagaactgattgccaacgctgggaagcaggtgccagtcattgccaaaatcgaaaagcacgaggcgatcgagcagatggatgccattctctccctctgtgatggcgtcatggtggcacggggtgatttgggggttgaattgcccgccgaagatgtaccgattctgcaaaaacggctgatcgctgctgccaaccgcttgggcattccggtcattacggccacacaaatgctcgacagcatggtgaaaagccctcgtcctacccgggccgagatttccgatgtcgccaatgccattctcgatggcactgatgccgtgatgctctccaatgaaacggcgatgggggaataccccgtcgaggcggtcaagatgatggccaccattgccgcccgcattgacaatcaacctcaactgcggcaacctcccggggctgagtctacggcggtgcgttctattcccagtgccattagtcaagcggtgggacaggtggcggcgcagctgcatgccaaagcgatcattacccaaactaaaacaggcgcaacggcgcggaatgtttccaagtttcgtccccaaattcctattttggcggcaacaccccatatcgaagtggcccgtcgcctccagttggtctggggcgtcgaaccgctgctgacattggatcatccctcgatgcgcgaatccttccaggcggcgattaatgctgcccaggagcggggcttccttgaggagggggatctggtggtcatgacggcgggcaccctacaaggggtttctggctccacggatatgatcaaggtggaactggttacctcagtgatgggacggggttgtggcattggccatggatctgttagtggtcctgcgcgggtggtacgccaagggatgccggtgcgtacgtttaatcgtggggaaattttggtggctgagcgcaccagtgctgagttggtggaagtgattcgcaaagcggcaggcattattaccgaggaggacagcctcacaagccatgccgccgtcttggggttgcggctgggtattcctgtgattgtgggcgtcaaaaatgccactcgcctgatccgtgagggcaccattctgacgatggatgtggaacggggcgtggtttattccggtgcccgcaatggcggcgagcgatcgccagagtag

SEQ ID NO: 145 - protein, 594 aa, Thermosynechococcus elongatus BP-1
MSNQPLQRRTKIVATIGPAVSHPDKLRAIIQAGATTLRLNFSHGTHDDHQRSIRLIRQISYELGQPVGILQDLQGPKIRLGRFEHGSISLKRGDRFTLTSRPILGNQHISSITYPPLAQEVPAGATILLDDGRVEMLVEEVDKEAGELHCQVIVGGTLSNAKGVNFPGVYLSIKALTEKDREDLMFGLNQGVDWVALSFVRNPQDVLEIKELIANAGKQVPVIAKIEKHEAIEQMDAILSLCDGVMVARGDLGVELPAEDVPILQKRLIAAANRLGIPVITATQMLDSMVKSPRPTRAEISDVANAILDGTDAVMLSNETAMGEYPVEAVKMMATIAARIDNQPQLRQPPGAESTAVRSIPSAISQAVGQVAAQLHAKAIITQTKTGATARNVSKFRPQIPILAATPHIEVARRLQLVWGVEPLLTLDHPSMRESFQAAINAAQERGFLEEGDLVVMTAGTLQGVSGSTDMIKVELVTSVMGRGCGIGHGSVSGPARVVRQGMPVRTFNRGEILVAERTSAELVEVIRKAAGIITEEDSLTSHAAVLGLRLGIPVIVGVKNATRLIREGTILTMDVERGVVYSGARNGGERSPE

SEQ ID NO: 146 - DNA, 1761 bp, Oceanobacillus iheyensis HTE831
  CDS (1)..(1761): transl_table=11
atgagaaacacaaaaatcgtatgtacaattggtcctgcatcagaatcaattgaaaagttagagcaacttattgaagcaggaatgaacgtagctcgtctcaacttttctcatggagattatgcagagcatggcgcacggattgaaaatatccgaaaagcagctaaaaataaaaataaaacagtagcaattcttttagatactaaaggaccagagattcgtactggtagctttaaagaaggtagagcagatcttatgcagggcaaccctgtaacaatcgctatggatgaagtagaggggactgctgagaaattctctgttacataccaagggctaatcaatgatgtacatgaaggttcaaagattcttttggatgatggacttattgaattagaagtaaaatctattgataaaagtaaaggtgaaattgaaactattgcacttaactctggggaaataaagaataaaaaaggtgttaacgttcctaatgtttctgtaaatctacccggtataacagaaaaagacaccaatgatattatctttggaattgaacagggtgttgattttattgctgcatcttttgtgcgtcgagcttcggatattttagaaattaaagaagtgctagatcagcatcaggcacagtatataaaaatcatccctaaaattgagaaccaagaaggtgtcgataatatcgatagtattcttgaggtaagtgatggattaatggtagctcgtggtgatttaggagtggagatcccagctgaagatgtaccattggtacagaaaaaattaattaagcaatgtaataatgctggaaagccagtaattactgctacacaaatgttagattcgatgcagcgtaatccacgacctacacgtgcagaagcatcagacgttgctaatgcgatttttgatggcacagatgcaattatgctttctggagaaactgctgcgggaacctacccagtagaatctgtacaaacaatgagtaatattgcactaaaagctgaatctgcattagatcataaacaaatgttagaagaacgttcacaatatgtcgatatgactataacagaagcaattagtcaatccgttacgcacacagcatccaatttaaatgttgatacaattatcacaccgacagaaagcggacatacagctagaatgatttctaaataccgtccgaaagcttccattctagcagttacttttaacgaagtagtaaatcgtcaactatccttagtttggggagtgcatgctgttctgggtaaaccagcgacgtctactgacgaaatgctagaaattgcagttgataaaggattaaatacaggaatctgcagtagaggaagccgtgtcattattacggctggtgtacctgttggagagagtggaacaactaacctgttaaaagttcatgtgattggtgatgtgattgctaaaggacaaggaattggaagaagaagtgcatatggacatgccgtatttgctaaaacgaataaagaagctttagaaaaagtacaagacggtgatattttagtaacctatgcaacagaaaaagaaatgatgcctgcaattgaaaaagcatcagctattattacagaagaaggtggattaacttctcatgcagctgttgtcggattaagtcttggaattccagtaattgttggggttgacaatgtatttgaaattcttcaagatggacaagatattactgtagatggtaaccgtggagatatctacgctggccatgcaggtgtattgtaa

SEQ ID NO: 147 - protein, 586 aa, Oceanobacillus iheyensis HTE831
MRNTKIVCTIGPASESIEKLEQLIEAGMNVARLNFSHGDYAEHGARIENIRKAAKNKNKTVAILLDTKGPEIRTGSFKEGRADLMQGNPVTIAMDEVEGTAEKFSVTYQGLINDVHEGSKILLDDGLIELEVKSIDKSKGEIETIALNSGEIKNKKGVNVPNVSVNLPGITEKDTNDIIFGIEQGVDFIAASFVRRASDILEIKEVLDQHQAQYIKIIPKIENQEGVDNIDSILEVSDGLMVARGDLGVEIPAEDVPLVQKKLIKQCNNAGKPVITATQMLDSMQRNPRPTRAEASDVANAIFDGTDAIMLSGETAAGTYPVESVQTMSNIALKAESALDHKQMLEERSQYVDMTITEAISQSVTHTASNLNVDTIITPTESGHTARMISKYRPKASILAVTFNEVVNRQLSLVWGVHAVLGKPATSTDEMLEIAVDKGLNTGICSRGSRVIITAGVPVGESGTTNLLKVHVIGDVIAKGQGIGRRSAYGHAVFAKTNKEALEKVQDGDILVTYATEKEMMPAIEKASAIITEEGGLTSHAAVVGLSLGIPVIVGVDNVFEILQDGQDITVDGNRGDIYAGHAGVL

SEQ ID NO: 148 - DNA, 1437 bp, Leptospira interrogans serovar Lai str. 56601
  CDS (1)..(1437): transl_table=11
ttgccttgcatgaaaattctaaacaggaaaaaaaccaaaatcgtctgcactataggtccggcttcttcttccgaagaaaccatactttctattctcaaagcgggaatggatatagctcggatgaatttttcacacggcacacatgattctcataaaagagtctacgacacgttacgcaagtgcgaacaaattttcggatttcctttagggatcatggcagacctacaaggccctaaaattcgaaccggaaaattaaaactcaactccattctacttcataaaaatcaggagattgaaatcgtcccagattctgatattttgggagatgaacacaaaatcggttgtacatatccaaatctaattagagatatacaagaagaagacaagattctaattgatgacggtaagttaattttaaaagttatttctaaaaaatcgaactccgccattttaaaagtaatcgtaggtggaatcttatggagcaacaaaggaatcaatcttccaggaactcctatctctgctcctgcactttccgaaaaagacatagaagatcttaagttcgcactctctctaggtgtagattacgcggctcttagttttgttcgtactggggcagacttagaattagcaaggtcttatttagaaggtacatatacagggctgatcgcaaagatagaaagaccggaagcaattggaaacatagaagaaatcatagaacgagcagatggcatcatgattgcaagaggagatttaggagtagaaattgatacggaaaaggttcccattctacaaaaagaacttatctataaactcaatcaagcgggtaaaccggtcattactgcaacccaaatgctggaatctatgattgaaaacccaagaccaacacgtgcagaagcgagcgacgtagcaaatgcggttatggacggaacggatgcagttatgctttctgcagaatcggctaacggccattatccggtcgaatccgttgaaatcatgtctaaaatcattcaagaaactgaaaccattgatcatatctatgagattcactggaacattaaaaaaactttcttagaatcagaaagaactgcactgggaaatgccgcaagggagattgcccacggaatccacgcaaaggcaatcgtcaattttacgagaagcggttattccgcattgattacctccgaaatgagacccaaggttccgatctactcttttactccgtttgcaaccaccgccagaaagatgaaactctatcgaggtgtggtgccatttgtaatgcctttctttacaagattggaagatatgattgcttatatgaatcaaaaactcaaagaagatgaatttctttttccaggagataaggtggtaattctttccggagccccaggaaccacagtcagaagtgtagactttttacaggtttataaaatacattga

SEQ ID NO: 149 - protein, 478 aa, Leptospira interrogans serovar Lai str. 56601
MPCMKILNRKKTKIVCTIGPASSSEETILSILKAGMDIARMNFSHGTHDSHKRVYDTLRKCEQIFGFPLGIMADLQGPKIRTGKLKLNSILLHKNQEIEIVPDSDILGDEHKIGCTYPNLIRDIQEEDKILIDDGKLILKVISKKSNSAILKVIVGGILWSNKGINLPGTPISAPALSEKDIEDLKFALSLGVDYAALSFVRTGADLELARSYLEGTYTGLIAKIERPEAIGNIEEIIERADGIMIARGDLGVEIDTEKVPILQKELIYKLNQAGKPVITATQMLESMIENPRPTRAEASDVANAVMDGTDAVMLSAESANGHYPVESVEIMSKIIQETETIDHIYEIHWNIKKTFLESERTALGNAAREIAHGIHAKAIVNFTRSGYSALITSEMRPKVPIYSFTPFATTARKMKLYRGVVPFVMPFFTRLEDMIAYMNQKLKEDEFLFPGDKVVILSGAPGTTVRSVDFLQVYKIH

SEQ ID NO: 150 - DNA, 1461 bp, Leptospira interrogans serovar Lai str. 56601
  CDS (1)..(1461): transl_table=11
atgaagagcgaatcctccgtttttagaaaaaccaaaatcatctgtacgattggtcctgcgacctcagataaaaaaatgattcaggctcttgccgaagccggaatgaacgtggcacgattaaacatgtctcacggaaaccacgattttcatagaagtatcattcgtaatattaagtccctcaataaggacgtgttgaaaaatccgattgcgattttactcgatacacaaggaccggaaattcgaactggagatcttcaagtagatcatctggatttaaaagtaggtgagacctttacctttcatatcattccgggggaagaatctgaagaacaatccgtatttgtaaactataaggatatagttaaagatttaaaagtaggcgatccggtaaccgtagataacggtttaatcaatcttgtagtagaggaaatcaatgattctgctcttaagtgtaaggtgttagacggtggaagactaggttctagaaaacacattaatcttccaggaattcgggttaatcttccctcgatcactccaaaggatcataaggatattctattcggattagaagaagatgtagattttatcgcactttcttttgttcgttctgtggaagacattaatcaattaaaacaaattatagaagagaacgatggacacgcgcagatcatcgctaagatagaagatcaagaagcggtgcgtaatatgaaagaaatcgtggaagccgcagacggtgtgatggttgcgagaggggatttgggggttgaagttccaattgaagaattgccgatcttgcaaagagctatcattaaagaatgtgctctcaaaggaaaaagggtgatcgtagcaacccatcttttagaatctatgattcataatccttcgcctacgagggcggaggtgaccgacgtcgctaacgcgatttatgaagaagcggacgcgattatgctttctggagaaaccgcggccggtaaatttccgattcgttgtgtggaaatgatggataagatcgcacaacgtgtagaaaagactggcggtgtagattacgttaaggataaaattccacaggataaaaaagagcagatggcaagggcggctgcaaaacttgcagattctttaaagtgtccggcgattatagtaattacaagaagagggaccaccgcgttgaacgtggcgggttttcatcctcattatcctttgatttatgcgtttacgaatatgacaactgttaggcgaaagctctggttgactcgaggagtgattccgcatagaatcgatttttccaaagatccggaaaagacgattcgactcgcgatcgaaactttgaagaaaacgggaaggatcgaggatggggatcaagttgtgattctgtcagacatcatcgcgggcgaagatcgtgtggaaacgattcagattcgagaagtaaaaacgtattttaatgtggaagtggaaaaactttga

SEQ ID NO: 151 - protein, 486 aa, Leptospira interrogans serovar Lai str. 56601
MKSESSVFRKTKIICTIGPATSDKKMIQALAEAGMNVARLNMSHGNHDFHRSIIRNIKSLNKDVLKNPIAILLDTQGPEIRTGDLQVDHLDLKVGETFTFHIIPGEESEEQSVFVNYKDIVKDLKVGDPVTVDNGLINLVVEEINDSALKCKVLDGGRLGSRKHINLPGIRVNLPSITPKDHKDILFGLEEDVDFIALSFVRSVEDINQLKQIIEENDGHAQIIAKIEDQEAVRNMKEIVEAADGVMVARGDLGVEVPIEELPILQRAIIKECALKGKRVIVATHLLESMIHNPSPTRAEVTDVANAIYEEADAIMLSGETAAGKFPIRCVEMMDKIAQRVEKTGGVDYVKDKIPQDKKEQMARAAAKLADSLKCPAIIVITRRGTTALNVAGFHPHYPLIYAFTNMTTVRRKLWLTRGVIPHRIDFSKDPEKTIRLAIETLKKTGRIEDGDQVVILSDIIAGEDRVETIQIREVKTYFNVEVEKL

SEQ ID NO: 152 - DNA, 1539 bp, Drosophila melanogaster
  CDS (1)..(1539)
atggccgcaggagctgatacccaactggagcacatgtgccgtctgcagttcgactcgccagtgccccatgtgcgtctgtccggaatcgtgtgcaccatcggacctgcctccagcagcgtggagatgctggagaagatgatggccaccggcatgaacatcgcgcgcatgaacttctctcacggatcgcacgagtaccatgccgccaccgtggccaatgtgcgccaggcggtgaagaactactcggccaagctgggctacgaacaccccgtggccattgccctggacaccaaggggcccgagatccgtaccggtctgatcggaggcagcggcaccgccgagattgagctgaagaagggcgagaagatcaagctgaccaccaacaaggaattcctggagaagggctctctggagattgtgtacgtggactacgagaacattgtcaatgtggtgaagcccggcaaccgggtgttcgtcgatgacggtctgatctcactgattgtccgcgaggtaggcaaggattccctcacctgcgaggtggagaacggcggctctctgggttcccgcaagggtgtgaacctgccaggcgtgcccgtcgatctgcctgccgtctccgagaaggataagagcgatctgctgttcggtgtggagcaggaagtggacatgatctttgcttcgttcatccgcaacgccgctgctttgaccgagatccgtaaggttcttggcgagaagggcaagaacatcaagatcatttccaagatcgagaaccagcagggcatgcacaacctggacgagatcatcgaggccggtgatggcattatggtggcccgtggagatctgggtattgagattcccgccgagaaggtgttcctcgcccagaaggccatgattgcccgctgcaacaaggctggcaagcctgtgatctgcgccactcagatgttggagtcaatggtgaagaagccacgtcccactcgcgctgagatctctgatgtggccaacgctgtgctcgatggtgctgattgcgtcatgttgtctggtgagaccgccaagggcgagtacccgctggagtgcgtcctgaccatggccaagacctgcaaggaggccgaggctgccctctggcaccagaacctctttaacgacttggttcgcggcgctggtaccatcgatgcctctcacgcggctgccatcgctgccgttgaggctgccaccaaggccaaggcctccgccatcgtggtgatcaccaccagcggcaagtcggccttccaggtgagcaagtaccgcccacgctgccccatcatcgcggtcacccgtttcgcgcagaccgcccgacaggcccatctctaccgtggactggtgccactcatctacaaggagcccggtcttggtgactggctgaaggacgtggacgtgcgcgtgcagttcggtctgcaggtcggaaagaagaacggcttcatcaagaccggcgattccgtcgtggtggttaccggctggaagcagggctccggcttcaccaacaccatccgcattgtcaccgtcgaataa

SEQ ID NO: 153 - protein, 512 aa, Drosophila melanogaster
MAAGADTQLEHMCRLQFDSPVPHVRLSGIVCTIGPASSSVEMLEKMMATGMNIARMNFSHGSHEYHAATVANVRQAVKNYSAKLGYEHPVAIALDTKGPEIRTGLIGGSGTAEIELKKGEKIKLTTNKEFLEKGSLEIVYVDYENIVNVVKPGNRVFVDDGLISLIVREVGKDSLTCEVENGGSLGSRKGVNLPGVPVDLPAVSEKDKSDLLFGVEQEVDMIFASFIRNAAALTEIRKVLGEKGKNIKIISKIENQQGMHNLDEIIEAGDGIMVARGDLGIEIPAEKVFLAQKAMIARCNKAGKPVICATQMLESMVKKPRPTRAEISDVANAVLDGADCVMLSGETAKGEYPLECVLTMAKTCKEAEAALWHQNLFNDLVRGAGTIDASHAAAIAAVEAATKAKASAIVVITTSGKSAFQVSKYRPRCPIIAVTRFAQTARQAHLYRGLVPLIYKEPGLGDWLKDVDVRVQFGLQVGKKNGFIKTGDSVVVVTGWKQGSGFTNTIRIVTVE

SEQ ID NO: 154 - DNA, 1413 bp, Vibrio vulnificus CMCP6
  CDS (1)..(1413): transl_table=11
atgaaaaagaccaaaatcgtatgtacgattggcccaaaaactgagtctgtagagaaactgactgaactagtcaactcaggtatgaacgtaatgcgcctgaacttttctcacggtgactacgtagagcacggcactcgtatcgcgaacttccgccaagtaatggaaaacacaggtaagcaacttgctatcttactagacactaaaggtccagaaatccgcactatcaaactagaaaacggcgacgacgttgatctagtagctggtcaagaattcactttcacgactgatacttctgttgttggtaacaaagacatcgtagcagtaacttacccaggttttgctgcggatctatctgctggtaacactatcctagttgacgatggtctaatcgagatggaagttatcgcaacgactgcgactgaagttaagtgtaaagtactgaacaacggtgctctaggcgaaaacaaaggtgttaacctaccaggcgtttctgtaaacctacctgcactatctgaaaaagacaaaaacgaccttaaatttggttgtgagcaaggcgttgacttcgttgcagcatctttcatccgtaaagcatctgacgtaaaagaaatccgtgaagttctagcagcaaacggcggcgcgaacattcagatcatttctaagattgaaaaccaagaaggtgttgataacttcgacgaaatcctagagctttctgacggtatcatggttgctcgtggtgacctaggtgtagaaatccctgcagaagaagttatcttcgcacagaagatgatgatcgaaaaatgtaaccgcgcacgtaaagtggttatcactgcaactcaaatgctagattctatgatcaagaacccacgtccaactcgtgctgaagcgggtgacgttgcgaacgcaatcatggatggtactgatgcagtcatgctttctggcgaaacagcgaaaggtaaataccctgttgaagcggtaactatcatggcgcaaatcgctaaccgtactgattctgtactaaaagcagagctaggctctcgtctagacagcccacgcctacgtatcactgaagcggtatgtaaaggtgcagtagacacagctgagaaactagcagcaccactgatcatcgttgcaactgaaggtggtaagtctgcacgctctgtacgtaagtacttcccaactgcaaacattcttgcgctaacgacgaacaagaagacagcagctcaacttgtactgactaaaggtgttacacctgttgttgttgattcaatcgacaacacggatgcgttctacgtaaccggtaaagagcttgctcttgaatctggcctaggtagcaaaggcgacatcgttgtgatggtatctggtgctcttgttgcatctggtacaacgaatactgcgtcagtacacgtactataa

SEQ ID NO: 155 - protein, 470 aa, Vibrio vulnificus CMCP6
MKKTKIVCTIGPKTESVEKLTELVNSGMNVMRLNFSHGDYVEHGTRIANFRQVMENTGKQLAILLDTKGPEIRTIKLENGDDVDLVAGQEFTFTTDTSVVGNKDIVAVTYPGFAADLSAGNTILVDDGLIEMEVIATTATEVKCKVLNNGALGENKGVNLPGVSVNLPALSEKDKNDLKFGCEQGVDFVAASFIRKASDVKEIREVLAANGGANIQIISKIENQEGVDNFDEILELSDGIMVARGDLGVEIPAEEVIFAQKMMIEKCNRARKVVITATQMLDSMIKNPRPTRAEAGDVANAIMDGTDAVMLSGETAKGKYPVEAVTIMAQIANRTDSVLKAELGSRLDSPRLRITEAVCKGAVDTAEKLAAPLIIVATEGGKSARSVRKYFPTANILALTTNKKTAAQLVLTKGVTPVVVDSIDNTDAFYVTGKELALESGLGSKGDIVVMVSGALVASGTTNTASVHVL

SEQ ID NO: 156 - DNA, 1758 bp, Staphylococcus epidermidis ATCC 12228
  CDS (1)..(1758): transl_table=11
atgagaaagactaaaattgtatgtacaataggaccagcttcagaatcagaggaaatgctcgaaaaactaatgaatgcaggaatgaacgttgcgcgtttaaatttctcacatggtagtcatgaagaacataaagcaagaattgatacaattcgtaaagttgctaaacgtttaaataaaacaattggcttgttattggatactaaagggccagaaattcgtactcacaatatgaaagatggacttattgttttagaaaaaggcaaagaagtcattgtaagcatgaatgaagttgaaggaacacctgaaaaattctctgtaacatatgaaaatctaatcaatgatgtcaatattggatcatatatactattagatgatggtttagttgaacttcaagtcaaagaaattaacaaagataaaggcgaagttaaatgtgatatcttaaatactggtgaattaaaaaataaaaaaggtgttaacttacctggtgttaaagttaatttacctggtatcactgataaagatgccgatgatatcagatttggtataaaggaaaatgtagactttatagctgcaagttttgtaagacgtccaagtgatgttttagatatccgtcaaattcttgaagaagaaaaagcagaaataacaattttccctaaaattgaaaaccaagaaggtatcgataatattgaagaaattcttgaagtatctgatggattaatggtagcacgtggtgatatgggtgttgaaattccgccagaaagcgtaccaatggttcaaaaagatttaattagaaaatgtaataaattaggaaaacctgtaattactgcgactcaaatgcttgattctatgcaacgtaatccacgtgcgacacgtgcagaagcaagtgacgtagctaatgcaatatacgatggtactgacgcggtaatgttatcaggtgaaactgcagcaggtcaatatcctgaagaagctgttaaaactatgcgtaatattgcagtttctgctgaagcagcgcaagactataaaaaattattaagtgatcgtactaaattagttgaaacttcattagtaaatgcaattggtgtttctgttgcacatactgccttaaacttaaatgtaaaagctattgtagcagcaactgaaagtggttcaacagcacgtacgatttctaaatatcgtccacattcagatatcattgctgtaacacctagcgaaaaaactgctagacaatgtgcaattgtatggggagtaaatccggtcgttaaagaaggacgtaaaacaactgatgctttactaaataatgctgtagcaacagcagtagaaactggtagagtttcaaacggagatttaattattattactgctggtgtacctactggagaaaaaggaactacaaatatgatgaaaatccacttagtaggtgatgagattgctaaaggtcaaggtgttggtagaggatctgttgtaggccatgcaattgtcgcagatagtgctagtgatttagaaggtaaagatttatctgataaagttattattacaaattctgttgatgaaacattagtaccatatgttgaaaaagctataggtctaattacagaagaaaatggtattacttcaccaagcgcaattataggtttagaaaaaggcatacctactgttgttggtgtagaacaagcaaccaaagaaattaaaaatgatatgttagtgactttagatgcgtcacaaggtaaagtgtttgaaggttatgctaacgtcctttaa

SEQ ID NO: 157 - protein, 585 aa, Staphylococcus epidermidis ATCC 12228
MRKTKIVCTIGPASESEEMLEKLMNAGMNVARLNFSHGSHEEHKARIDTIRKVAKRLNKTIGLLLDTKGPEIRTHNMKDGLIVLEKGKEVIVSMNEVEGTPEKFSVTYENLINDVNIGSYILLDDGLVELQVKEINKDKGEVKCDILNTGELKNKKGVNLPGVKVNLPGITDKDADDIRFGIKENVDFIAASFVRRPSDVLDIRQILEEEKAEITIFPKIENQEGIDNIEEILEVSDGLMVARGDMGVEIPPESVPMVQKDLIRKCNKLGKPVITATQMLDSMQRNPRATRAEASDVANAIYDGTDAVMLSGETAAGQYPEEAVKTMRNIAVSAEAAQDYKKLLSDRTKLVETSLVNAIGVSVAHTALNLNVKAIVAATESGSTARTISKYRPHSDIIAVTPSEKTARQCAIVWGVNPVVKEGRKTTDALLNNAVATAVETGRVSNGDLIIITAGVPTGEKGTTNMMKIHLVGDEIAKGQGVGRGSVVGHAIVADSASDLEGKDLSDKVIITNSVDETLVPYVEKAIGLITEENGITSPSAIIGLEKGIPTVVGVEQATKEIKNDMLVTLDASQGKVFEGYANVL

SEQ ID NO: 158 - DNA, 1755 bp, Clostridium tetani E88
  CDS (1)..(1755): transl_table=11
atgcaaaaaactaaaatggtgtttaccataggaccagctagtgatagcgaagaagtattaagtgagttaataaaagcaggaatgagtgcatcaaggcataacttttcacatgggacccatgaagaacataaaataaggattgatttaataagaaaattaagtgacaaatttaataagaatattgctgtaatattagacacaaaaggacctgaaataagaacaggagattttaaagataaaactgtacaattaaaagaaggaaataaattcactatatactgtggggaagaaattttaggagatgaaacaaagtgttctataacttataatgatttgcataatgatgtaaaaacaggagattccatactaatagatgatggacttgtaggattagaagttgaagaagtagagggaagtaaagtacattgtgtagttaaaaatagtggtgctgtaagtaaccataagggtgtaaatgtacctggagtagatgtttcattaccttcattaacagaaaaagataaaagtgatcttgaatttggatgtaaagtaggagtagattttattgcagcatcttttattagaaaaggttcagacgtattggaaataagaaaggttctagaagaaaacggcggtacagatatacaaatattttctaaaatagaaaatcaacaaggggtagaaaatatagatgaaataataaagttttctgatggaataatggtagctagaggagatatgggtgtagaattacaaatggaacaagtacctataattcaaaaaatgattatagagaaatgtaacaaagctggcaaacctgttatcacagctactcaaatgttagactctatgattagaaatccaagaccaacaagagcagaagtttcagatgtagccaatgctatatttgatggaactgatgcggtaatgttaagtggtgaaacagcaggaggaaaatatcctatagaagctgctaaagctatggctaagattgctagaactgcagaagaaacaatggattatgatgaaatatttaacagaaaaagagaagcgcgtgtattaagtgtggctaatgcgataagcatagcaacctgtacaacagcttcagagttaaatgcatctgctatattaacagctactcaaacaggatatacagctagagcagtttccaaatatagaccagcatgtcctattatagcgattacaccaagtaagaatgtagcaagaaagttagcattgagttggggtgtgttcccaatacttactactaaatttacatccacagatgctttaatagaaaactctgttgatatagcattgacagcagaatatataagaaaaggagatttggttgtaatagcagctggaatacctgtaagttattcaggaacaactaacatgctaaaggttcatgtagttggagatatccttgttcagggaagaggtgctggaaatagtgcaggttatggtatagctaaagttgtaaatagtacagaagaagcagaaagggttatagaaagtggagatatattagttgtaaaagatgcagatatagattatgtttctatactaaatagagtatcaggagttataactgaaagaggaggattgacttctcacttagcaatagaatgtataaccaatgaaataccatttatatgtggggcaggtggggcaacagatgtattaaaaagtggatatttcataaccatggatgtaaaaagaggaatagtatataacggtaggattactatataa

SEQ ID NO: 159 - protein, 584 aa, Clostridium tetani E88
MQKTKMVFTIGPASDSEEVLSELIKAGMSASRHNFSHGTHEEHKIRIDLIRKLSDKFNKNIAVILDTKGPEIRTGDFKDKTVQLKEGNKFTIYCGEEILGDETKCSITYNDLHNDVKTGDSILIDDGLVGLEVEEVEGSKVHCVVKNSGAVSNHKGVNVPGVDVSLPSLTEKDKSDLEFGCKVGVDFIAASFIRKGSDVLEIRKVLEENGGTDIQIFSKIENQQGVENIDEIIKFSDGIMVARGDMGVELQMEQVPIIQKMIIEKCNKAGKPVITATQMLDSMIRNPRPTRAEVSDVANAIFDGTDAVMLSGETAGGKYPIEAAKAMAKIARTAEETMDYDEIFNRKREARVLSVANAISIATCTTASELNASAILTATQTGYTARAVSKYRPACPIIAITPSKNVARKLALSWGVFPILTTKFTSTDALIENSVDIALTAEYIRKGDLVVIAAGIPVSYSGTTNMLKVHVVGDILVQGRGAGNSAGYGIAKVVNSTEEAERVIESGDILVVKDADIDYVSILNRVSGVITERGGLTSHLAIECITNEIPFICGAGGATDVLKSGYFITMDVKRGIVYNGRITI

SEQ ID NO: 160 - DNA, 1761 bp, Lactobacillus plantarum WCFS1
  CDS (1)..(1761): transl_table=11
atgaaaaaaaccaagattgtttcaacacttggtcctgccagcaccgatactgacactattgttaaattaatcgaagccggcgcaaatattttccgctttaacttttcacatggtgatcatgaagaacatttagatcgcttaaacaaagttcacgaagcagaaaagattacgggtaagaccgttggtatcatgcttgatactaagggtgctgaaattcggacgaccgttcaagctaacggaaaatctgaatacaagatcggtgacaaggttcgtatcaccatggatgattcattagatacgacccatgataagattgccgttacttacaagaacctctatgatgatgttcatgtaggtggccatgtcctctttgatgatggtttattagatatgaagatcgacgaaaaggacgaagctaaccgcgaattggttacaactgttcaaaacgccggcgttttaggctcacgtaagggtgttaacgctcctggcgtttcaatcaacttacctgggatcactgaaaaagactcaagtgatattcgctttggtttggatcatgaaatcaactacatcgctgcttcattcgttcgtaagccacaagatgtcttagacattcgtgaattacttgaagaaaagcacatggaacacgttcaaatcttccctaagatcgaatcacaagaaggtatcgacaacgccgatgaaattcttaaggtttgtgatggtttgatggttgctcgtggtgacatgggtgttgaaattcctgctgaaaatgtgccattggtacaaaagagtttaatcaagaagtgtaatgctttaggtatgcctgttatcacggctactcaaatgttagactcaatgcaagaaaacccacgtcctactcgtgccgaagcttctgacgttgccaacgctgtctttgatggtactgacgcaacgatgctttctggtgaaagtgctaacggtctttaccctgttgaatctgttgccatgatggctaagattgacgaaaaggctgaaaacactttggctgaaaacggtacgttacaattaaaccgtttcgacaagactagtgttactgaaacaatcggtattgcgattgctcgggcagctaagaacttgaacattaagacgattgttgctgcgactgaatctggctacactgctaagatgatttcgaagtaccgtccaaatgctgatatcttagcaatcacttttgacgaacggactcaacgtggcttaatggttaactggggtgttcaaccaatcgtggctgaaaaaccagaaaccactgatgacatgtttgatttagctgcttctaaggctgttgaacttggctttgccaaggaaggcgacttaatcttgattactgccggtgtgccagttggcgaacgcggtacgactaacatcatgaagatccaattaattggttctaagttagctgatggtcaaggtgtcggtgatgaaacggttatcggtaaagccgtaatcgcaacgtctgctcaagaagctatcgacaaggccgttgaaggtggcgtcttagttactaagacgactgacaaagactacttaccagcaatcgaaaagtctagtgctttagttgttgaaaacggtggtttaacttcacacgctgctgttgttggtatctcaatgggaattcctgttatcgttggtgttaaggacgctactagtgttattgctgatggtcaattgatcacagttgattcacgtcgtggccttgtataccgcggtgcttcaaacgccctttaa

SEQ ID NO: 161 - protein, 586 aa, Lactobacillus plantarum WCFS1
MKKTKIVSTLGPASTDTDTIVKLIEAGANIFRFNFSHGDHEEHLDRLNKVHEAEKITGKTVGIMLDTKGAEIRTTVQANGKSEYKIGDKVRITMDDSLDTTHDKIAVTYKNLYDDVHVGGHVLFDDGLLDMKIDEKDEANRELVTTVQNAGVLGSRKGVNAPGVSINLPGITEKDSSDIRFGLDHEINYIAASFVRKPQDVLDIRELLEEKHMEHVQIFPKIESQEGIDNADEILKVCDGLMVARGDMGVEIPAENVPLVQKSLIKKCNALGMPVITATQMLDSMQENPRPTRAEASDVANAVFDGTDATMLSGESANGLYPVESVAMMAKIDEKAENTLAENGTLQLNRFDKTSVTETIGIAIARAAKNLNIKTIVAATESGYTAKMISKYRPNADILAITFDERTQRGLMVNWGVQPIVAEKPETTDDMFDLAASKAVELGFAKEGDLILITAGVPVGERGTTNIMKIQLIGSKLADGQGVGDETVIGKAVIATSAQEAIDKAVEGGVLVTKTTDKDYLPAIEKSSALVVENGGLTSHAAVVGISMGIPVIVGVKDATSVIADGQLITVDSRRGLVYRGASNAL

SEQ ID NO: 162 - DNA, 1413 bp, Vibrio parahaemolyticus RIMD 2210633
  CDS (1)..(1413): transl_table=11
atgaaaaagaccaaaatcgtttgtacgattggccctaaaactgaatctgtagagaagctaactgaactagtaaacgcaggcatgaacgtaatgcgtcttaacttctctcacggtgactacgaagaacacggcactcgtatcgcgaacttccgcaaagtaatggaagctactggcaaacaactagcaatccttctagatactaaaggtccagaaatccgcactatcaaactagaaggcggtaacgacgttgatctagtagctggtcaagaattcactttcacaactgacacttcagttgtaggtaacaaagacaaagttgcagtaacttacgctggcttcgcagctgacctaaacgttggtaacactatcctagtagacgacggtctaatcgagatggaagttatcgcaacaactgacactgaagttaaatgtaaagttcttaacaacggtgctctaggcgaaaacaaaggtgttaaccttcctggcgtttctgtaaacctacctgctctatctgaaaaagataagaacgaccttaaattcggttgtgagcaaggcgttgatttcgtagctgcatctttcatccgtaaagcttctgacgttcaagaaatccgtgaagttctagctgcaaacggcggcgagaacatccacatcatctctaagatcgaaaaccaagaaggtgttgataacttcgatgagatcctagaactttctgacggcatcatggttgctcgtggcgacctaggtgttgaaatcccagctgaagaagtaatcttcgctcagaaaatgatgatcgagaagtgtaaccgtgcacgtaagatggttatcactgcaactcaaatgcttgattctatgatcaacaacccacgtcctactcgtgcggaagcaggcgacgttgcaaacgcagtaatggacggcacagacgcagtaatgctttctggcgaaacagcaaaaggtaaataccctgttgaagcggtaactatcatggctcaaatcgctaagcgtactgactctgtacttaaagctgaactaggttctcgtctagacagcccacgtctacgcatcactgaagcagtatgtaaaggcgcagtagacacagctgaaaaactggctgctccactgatcgttgttgcaactgaaggcggtaagtctgcacgttcagtacgtaagtacttcccaactgcaaacatcctagcgctaacaactaacaagaaaactgcagcacaactagttctaactaagggtgttactccagttgttgttgacgctatcgaaagcactgacgcattctacgtagcaggtaaagaacttgctctagaatctggtctaggtaacaaaggcgatatcgtagtaatggtttctggtgctctagtcgcttcaggtactacgaacacagcttctgtacacgtactataa

SEQ ID NO: 163 - protein, 470 aa, Vibrio parahaemolyticus RIMD 2210633
MKKTKIVCTIGPKTESVEKLTELVNAGMNVMRLNFSHGDYEEHGTRIANFRKVMEATGKQLAILLDTKGPEIRTIKLEGGNDVDLVAGQEFTFTTDTSVVGNKDKVAVTYAGFAADLNVGNTILVDDGLIEMEVIATTDTEVKCKVLNNGALGENKGVNLPGVSVNLPALSEKDKNDLKFGCEQGVDFVAASFIRKASDVQEIREVLAANGGENIHIISKIENQEGVDNFDEILELSDGIMVARGDLGVEIPAEEVIFAQKMMIEKCNRARKMVITATQMLDSMINNPRPTRAEAGDVANAVMDGTDAVMLSGETAKGKYPVEAVTIMAQIAKRTDSVLKAELGSRLDSPRLRITEAVCKGAVDTAEKLAAPLIVVATEGGKSARSVRKYFPTANILALTTNKKTAAQLVLTKGVTPVVVDAIESTDAFYVAGKELALESGLGNKGDIVVMVSGALVASGTTNTASVHVL

SEQ ID NO: 164 - DNA, 1758 bp, Bacillus cereus ATCC 14579
  CDS (1)..(1758): transl_table=11
atgcgtaaaactaaaattgtatgtactataggtcctgctagtgaaagtattgaaaaattagagcaattaatcgaagcaggtatgaacgttgctcgtttaaacttctctcatggtagccatgaagagcacggagctcgtattaaaaacattcgtgaagcttcaaagaaaactggtaaaacagttggtatcttacttgatacaaaaggtccagaaatccgtactcacgacttcgtagacggacaagctgagcttgtaacaggtgcagaagtagttctttctactgagcaagtattaggtactgcagagaagttctctgtatcttatgctggtctttatgacgatgtagacccaggttctcgtattctaatcgatgacggtcttatcgaactagaagtaatcgaaaaagctgatggaaacatccgtacaaaagttcttaacagcggaactgtaaaaaataaaaaaggtgttaacgtaccaaacgtaagcattaagcttcctggtatcactgaaaaagacgtaaaagatatcatcttcggtatcgagcaaaaagttgatttcattgcagcttcattcgtacgtaaagcgtctgacgtattagaaatccgtgaattattagaagagcataacgctcaatacatccaaatcgtaccaaaaatcgagaaccaagaaggtatcgacaacatcgattcaatcttagaagtttctgacggtttaatggtagctcgtggtgacatgggtgtagaaattccaccagaagaagtaccgttagtacaaaaacgtctaattaaaaaatgtaacgtgttaggtaaaccagttattactgcaacacaaatgttagattctatgcaacgtaacccacgtccaactcgtgcggaagcaagtgacgtagctaacgcaatcttcgatggtacagatgcaatcatgctttcaggtgaaacagctgctggacaatacccagtagaagcagtaacaatgatggctaacattgcggtacgtgttgaaaaatcattacaatatgaagatatgttcaaaaaacgtattaaagagttcactccaacaattacagatgcaattagccaatctgttgcacatacagcacttgctcttgatgtagctgcaatcgtagctccaacagaaagtggatatactgcgaaaatgatctctaaataccgtccaaaatctccaatcgtagctgtaacatctgacgagcaagtaggacgtcgtcttgcacttgtttggggtgtacaagcatttatggctgagaagcgcgcagcttcaactgacgaaatgttagatacagcaattcaaacaggtatggatgcaggtctaatcggacttggagatactgtagtgattactgctggtgttccagttgctgaaactggtacaacaaacttaatgaaaatccacgttgttggtgaagaaattgctaaaggacaaggaatcggtcgtaaagctgcaaaaggtaaagtagttgtagcaaaaacagctgctgaagctgtagcgaacgtaaacgaaggtgatatccttgttacaacaagcactgataaagatatgattcctgcaatcgaaaaagctgcagctttagttgtagaagaaggtggcttaacaagccatgcagctgttgtaggtgtatcaatcggtattcctgttatcgttggtgtaaacggcgtaacagcaactttaaaaaatggccaagaagtaacagttgatgcagcacgcggaattgtttataatggacatgcggaagtgctataa

SEQ ID NO: 165 - protein, 585 aa, Bacillus cereus ATCC 14579
MRKTKIVCTIGPASESIEKLEQLIEAGMNVARLNFSHGSHEEHGARIKNIREASKKTGKTVGILLDTKGPEIRTHDFVDGQAELVTGAEVVLSTEQVLGTAEKFSVSYAGLYDDVDPGSRILIDDGLIELEVIEKADGNIRTKVLNSGTVKNKKGVNVPNVSIKLPGITEKDVKDIIFGIEQKVDFIAASFVRKASDVLEIRELLEEHNAQYIQIVPKIENQEGIDNIDSILEVSDGLMVARGDMGVEIPPEEVPLVQKRLIKKCNVLGKPVITATQMLDSMQRNPRPTRAEASDVANAIFDGTDAIMLSGETAAGQYPVEAVTMMANIAVRVEKSLQYEDMFKKRIKEFTPTITDAISQSVAHTALALDVAAIVAPTESGYTAKMISKYRPKSPIVAVTSDEQVGRRLALVWGVQAFMAEKRAASTDEMLDTAIQTGMDAGLIGLGDTVVITAGVPVAETGTTNLMKIHVVGEEIAKGQGIGRKAAKGKVVVAKTAAEAVANVNEGDILVTTSTDKDMIPAIEKAAALVVEEGGLTSHAAVVGVSIGIPVIVGVNGVTATLKNGQEVTVDAARGIVYNGHAEVL

SEQ ID NO: 166 - DNA, 1413 bp, Shigella flexneri 2a str. 2457T
  CDS (1)..(1413): transl_table=11
atgaaaaagaccaaaattgtttgcaccatcggaccgaaaaccgaatctgaagagatgttagctaaaatgctggacgctggcatgaacgttatgcgtctgaacttctctcatggtgactatgcagaacacggtcagcgcattcagaatctgcgcaacgtgatgagcaaaactggtaaaaccgccgctatcctgcttgataccaaaggtccggaaatccgcaccatgaaactggaaggcggtaacgatgtttctctgaaagctggtcagacctttactttcaccactgataaatctgttatcggcaacagcgaaatggttgcggtaacgtatgaaggtttcactactgacctgtctgttggcaacaccgtactggttgacgatggtctgatcggtatggaagttaccgccattgaaggtaacaaagttatctgtaaagtgctgaacaacggtgacctgggcgaaaacaaaggtgtgaacctgcctggcgtttccattgctctgccagcactggctgaaaaagacaaacaggacctgatctttggttgcgaaaaaggcgtagactttgttgctgcttcctttattcgtaagcgttctgacgttatcgaaatccgtgagcacctgaaagcgcacggcggcgaaaacatccacatcatctccaaaatcgaaaaccaggaaggcctcaacaacttcgacgaaatcctcgaagcctctgacggcatcatggttgcgcgtggcgacctgggtgtagaaatcccggtagaagaagttatcttcgcccagaagatgatgatcgaaaaatgtatccgtgcacgtaaagtcgttatcactgcgacccagatgctggattccatgatcaaaaacccacgcccgactcgcgcagaagccggtgacgttgcaaacgccatcctcgacggtactgacgcagtgatgctgtctggtgaatccgcaaaaggtaaatacccgctggaagcggtttctatcatggcgaccatctgcgaacgtaccgaccgcgtgatgaacagccgtctcgagttcaacaatgacaaccgtaaactgcgcatcaccgaagcggtatgccgtggtgccgttgaaactgctgaaaaactggatgctccgctgatcgtggttgctacccagggcggtaaatctgctcgcgcagtacgtaaatacttcccggatgccaccatcctggcactgaccaccaacgaaaaaacggctcatcagttggtactgagcaaaggcgttgtgccgcagctggttaaagagatcacttctactgatgatttctaccgtctgggtaaagaactggctctgcagagcggtctggcacacaaaggtgacgtcgtagttatggtttctggtgcactggtaccgagcggcactactaacaccgcatctgttcacgtcctgtaa

SEQ ID NO: 167 - protein, 470 aa, Shigella flexneri 2a str. 2457T
MKKTKIVCTIGPKTESEEMLAKMLDAGMNVMRLNFSHGDYAEHGQRIQNLRNVMSKTGKTAAILLDTKGPEIRTMKLEGGNDVSLKAGQTFTFTTDKSVIGNSEMVAVTYEGFTTDLSVGNTVLVDDGLIGMEVTAIEGNKVICKVLNNGDLGENKGVNLPGVSIALPALAEKDKQDLIFGCEKGVDFVAASFIRKRSDVIEIREHLKAHGGENIHIISKIENQEGLNNFDEILEASDGIMVARGDLGVEIPVEEVIFAQKMMIEKCIRARKVVITATQMLDSMIKNPRPTRAEAGDVANAILDGTDAVMLSGESAKGKYPLEAVSIMATICERTDRVMNSRLEFNNDNRKLRITEAVCRGAVETAEKLDAPLIVVATQGGKSARAVRKYFPDATILALTTNEKTAHQLVLSKGVVPQLVKEITSTDDFYRLGKELALQSGLAHKGDVVVMVSGALVPSGTTNTASVHVL

SEQ ID NO: 168 - DNA, 1785 bp, Prochlorococcus marinus subsp. marinus str. CCMP1375
  CDS (1)..(1785): transl_table=11
atgacaacgatagatctaaaacgtaggacaaagatcgttgcgacaataggccctgcaacagaaagtccagagaaaatcacagagcttattaaagcaggtgctacaacctttagactgaatttctcgcatggagatcatgaagaacatgcaaaacggataaaaaccatcagatctgttgcatcagatttaggagtaaacataggcattcttcaggatttacaaggtcctaaaatcagattaggaagatttaaagagggtccagtcaacctaaaaacaggagatgtatttgccctaacttcagaaaacaaagactgcaatcaggaaatagctaatgtcacctatgaaaaccttgtcaatgaggtggaaaaaggaaaaagaatattattagatgatggaagagtcgaaatgattgtagagaatgtagacaagaaaaacaaatcacttatttgcaaagtcacagttggtggaattctttcaaacaacaaaggggttaatttccctgacgtacaactatcaattaatgctttaactgaaaaagataaaatagacctttcatttggtctaaaacaaggagttgactgggtagctctaagttttgttaggaatccagcggatattcaagaaatcaaggaattaatcagacggcatggttataccactccaatagttgcaaaaatagagaaatttgaagcaatagaccaaatagattcaatactcagcctttgtgatggggtgatggttgcaagaggcgatttgggtgttgaaatggatgcagaagaagtacctttgctgcagaaagaattaattaaaaaggccaatagccttgggataccaattattacagctacccagatgttggattcgatggcctcgagtcctagaccaactagggcagaagttagcgatgtagctaatgcaatacttgatggtacagatgcagtaatgctttctaacgaaacagcagtgggagattatccaatagaagctgtcgaaaccatggcaaaaatagcaagaagaatcgagagggattacccacaaagagctttagaaagccaccttccaagtacaattcctaatgcaattagtgccgcagtaagtactattgcaagacaattaaacgcagcagcaatacttcccctaactaaaagtggtgcaactgctcataatgtgagtaagtttcgtcctgctaccccaattcttgccataacaagtgaaattagcgtcgcaagaagacttcaattggtatggggtgtatctcccttgttgatagatgctcaaaaaagcacaagcaaaacctttggaatagcaatggagcaggcaatggacatgaaattattaaagcccggagatcaagtagtagaaacagcaggaaccctaacaggcataagtggttcaacagatttaattaaagtaggaattgtcagcaagatagtagcgagcggaaaaacaaaaccaatcgttaaagaaggaacaataagtggcaaacttagagttataaataaagcaaccgatctgtcagatttaaaatcaggcgaaatactagtacttgcagaaaatgtacaatataatttggacactaaaactcatatatcagcaatgatatttgaaggcgaatattcattaatcaatacaaataatcaaattgaagataataatataattcctgctatatataatgtagaaggagcatgtactaaatttaaaaatggcgagattgtcacactagatcttaaagatggaaatataataaagggtcttgctcaggacctgaaaacatataattaa

SEQ ID NO: 169 - protein, 594 aa, Prochlorococcus marinus subsp. marinus str. CCMP1375
MTTIDLKRRTKIVATIGPATESPEKITELIKAGATTFRLNFSHGDHEEHAKRIKTIRSVASDLGVNIGILQDLQGPKIRLGRFKEGPVNLKTGDVFALTSENKDCNQEIANVTYENLVNEVEKGKRILLDDGRVEMIVENVDKKNKSLICKVTVGGILSNNKGVNFPDVQLSINALTEKDKIDLSFGLKQGVDWVALSFVRNPADIQEIKELIRRHGYTTPIVAKIEKFEAIDQIDSILSLCDGVMVARGDLGVEMDAEEVPLLQKELIKKANSLGIPIITATQMLDSMASSPRPTRAEVSDVANAILDGTDAVMLSNETAVGDYPIEAVETMAKIARRIERDYPQRALESHLPSTIPNAISAAVSTIARQLNAAAILPLTKSGATAHNVSKFRPATPILAITSEISVARRLQLVWGVSPLLIDAQKSTSKTFGIAMEQAMDMKLLKPGDQVVETAGTLTGISGSTDLIKVGIVSKIVASGKTKPIVKEGTISGKLRVINKATDLSDLKSGEILVLAENVQYNLDTKTHISAMIFEGEYSLINTNNQIEDNNIIPAIYNVEGACTKFKNGEIVTLDLKDGNIIKGLAQDLKTYN

SEQ ID NO: 170 - DNA, 1818 bp, Prochlorococcus marinus str. MIT 9313
  CDS (1)..(1818): transl_table=11
atggtagtttccgcgatgtttcaggtcccgttgatggcccagattgatctgacacgacggaccaaaattgttgccaccataggtccggcaaccgagagcgccgaacgaatccgagaactcgttgaggtaggtgctaccaccttccggctgaatttctcacacggcgaccatgacgagcacgccaagcgcatctccaccatccgtcaggtttctgatgaattgggaatgcacatcggcattcttcaagacttgcaaggccccaaaattcgcctgggtcgttttgataaggggcctatcactctggccaatggcgattccttcgcactgacctccaaacaagttcaatgcaatcagtcagtggcaaccgtcacttacgacaagcttgcagacgaagtcacgaccggcagccgaatcttgcttgatgacggtcgagtggagatgaaagtcttaaaaatcgatcaaagcgaacaaaccttgcactgcatcgtcacggtgggaggggtgctctcaaataacaagggagtgaatttccctgatgtacagctttcggttcgcgcccttacagagaaagatcgccaagatctcgcctttggcctccagcaaggggtggactgggtcgcactgagctttgtgcgaaacccttcggacatgaaagagatccgcaaactcatccgcgatcatgggcacagcaccccagtgatcgcgaagatcgagaaatttgaggcgattgatcaaatcgattcaatccttcctctctgtgatggagtcatggttgcaaggggggacttaggcgttgagatgccagccgaagaagtgcctctactgcaaaaggatttgattcgcaaggccaacagccttggaattccaatcatcacagccacccagatgctcgactcgatggcctcaagcccgaggcccaccagagcagaagtcagtgatgtagcaaatgcgatccttgatggtactgatgcagtgatgctctcgaacgaaaccgctgtaggagactatccagtggaggcggttcaaacgatggccaccattgccagacggattgaacgggactatccacagcgtccaatcgaaacttatctagccagcaccatttccaacgcgattagttcagccgtaagcagcatcgccagtcatctcaacgcggcagcaatcgtgccactaactgaaagtggtgcaactgctcacaacgtcagtaaattccgcccagcagcgccaattttggccgtaaccaacaaattggctgtagcaagaaaacttcaattggcatggggtgttaccccactgcttgtcccaacccaaaaaagtaccactgcaaccttcagtgatgcaattgctgttgcccaggaattgggtcttctcaaagaaggagatctaacaattcaaactgcaggaacccttgctggcgtgagcgggtccacagatcttgtcaaagtaggaattgtcagtgcagtacttggccaagggatcggtattggcaatggaaccgttagcggcaaggtcagatttgctttctccccaaacgactcaacaaaaattgaaccaggcgagattctggtcattcatgaaacaagcgatgactatctcgatgcaatcagaaagtctgcaggagtgattacagaacaagaaggagaggaataccacgcagaaatgatctcaaaacgactagggattccgttcatcattgggatagcacatgccacgagaaacctgcttgaaggagaggtggtaacaatgcagctcagtaatggcaaagttcatcgcggcacaggcggcaagctgccaatgaagctcgactcaatggactga

SEQ ID NO: 171 - protein, 605 aa, Prochlorococcus marinus str. MIT 9313
MVVSAMFQVPLMAQIDLTRRTKIVATIGPATESAERIRELVEVGATTFRLNFSHGDHDEHAKRISTIRQVSDELGMHIGILQDLQGPKIRLGRFDKGPITLANGDSFALTSKQVQCNQSVATVTYDKLADEVTTGSRILLDDGRVEMKVLKIDQSEQTLHCIVTVGGVLSNNKGVNFPDVQLSVRALTEKDRQDLAFGLQQGVDWVALSFVRNPSDMKEIRKLIRDHGHSTPVIAKIEKFEAIDQIDSILPLCDGVMVARGDLGVEMPAEEVPLLQKDLIRKANSLGIPIITATQMLDSMASSPRPTRAEVSDVANAILDGTDAVMLSNETAVGDYPVEAVQTMATIARRIERDYPQRPIETYLASTISNAISSAVSSIASHLNAAAIVPLTESGATAHNVSKFRPAAPILAVTNKLAVARKLQLAWGVTPLLVPTQKSTTATFSDAIAVAQELGLLKEGDLTIQTAGTLAGVSGSTDLVKVGIVSAVLGQGIGIGNGTVSGKVRFAFSPNDSTKIEPGEILVIHETSDDYLDAIRKSAGVITEQEGEEYHAEMISKRLGIPFIIGIAHATRNLLEGEVVTMQLSNGKVHRGTGGKLPMKLDSMD

SEQ ID NO: 172 - DNA, 1533 bp, Oryza sativa (japonica cultivar-group); identical to SEQ ID NO: 30
  CDS (10)..(1533)

SEQ ID NO: 173 - protein, 507 aa, Oryza sativa (japonica cultivar-group)
MEEQQEGAAGVMRRRPKTKIVCTLGPASRSVEMIGRLLRAGMCVARFNFSHGSHEYHQETLDNLRAAMESTGILCAVMLDTKGPEIRTGFLKDGKPVQLKKGQEITVSTDYSIKGDDNMISMSYKKLAVDLKPGSVILCADGTITLTVLHCDKEQGLVRCRCENTAMLGERKNVNLPGVIVDLPTLTEKDKEDILKWGVPNKIDMIALSFVRKGSDLVEVRKVLGKHAKSIMLMSKVENQEGVANFDDILAQSDAFMVARGDLGMEIPIEKIFYAQKVMIFKCNIQGKPVVTATQMLESMIKSPRPTRAEATDVANAVLDGTDCVMLSGETAAGAYPELAVRTMAKICLQAESCVDHAAVFKSITASAPIPMSPLESLASSAVRTANSAKAALILVLTRGGTTARLVAKYRPSMPILSVVVPELKQTDSFDWTCSDEAPARHSLIVRGVIPMLSAATAKAFDNEATEEALGFAISNAKAMGLCNSGESVVALHRIGTASVIKLLTAN

SEQ ID NO: 174 - DNA, 1872 bp, Oryza sativa (japonica cultivar-group)
  CDS (1)..(1872)
atggcgcaggtggtggctgcggcagggacggcggcggcggtggcggcggtggggaggccgctgggtggcggcggatctggggccgacgcgctccgcccggcggcgaggctgtcgttcgcgccgcgctggtgcggtgggagcgcgggggcagcaagggcgcgccgcgagtccgccgtcacgtccgtgattagccgcgccccgcgtctcgacgccgaggtgctgccggtgtcggccgacgacgacgcggacgaagaagaaaacttccagcatctcaaggccattcagcaacttgcaacatcagccaatggtgtgtggtctaaaccaaatgtgagacgcaagacaaagatcgtgtgcaccattggtccttcaactaacacaaaggagatgatatggaaacttgctgaggctggcatgaatgtggctcggcttaatatgtcacatggagaccatgcatcacaccagaaagttattgacttagtaaaggaatataatgctcaaacaaaggataacgtgattgctattatgcttgacacgaagggaccagaagttaggagtggagatttgcctcaaccaataatgttggaaactggccaggagttcactttcacaattaagagaggagttgggactgagacatgtgttagcgttaactatgatgactttgttaatgatgtagaagtgggtgacatgctcctcgtagatggtggaatgatgtcgttgttggtcaagtccaaaactgaagattcggtaaaatgtgaagttattgatggaggtgaactgaaatccaggcgtcacctgaatgttcgtggaaagagcgcaaccttgccatcaataactgacaaggattgggatgatattaagtttggtgtggagaatcaagttgactactatgccgtttcttttgtcaaagatgctcaagttgtgcatgaattgaaggattatctcagaagctccaatgccgatatacatgtaattgtaaagattgaaagtgcagattccattccaaacctacactcaatcatcacagcatcggatggggctatggttgccagaggtgacttgggagctgaactccctattgaggaggtaccgctgctgcaggaagaaattattagaatgtgcaggagcatgggaaaagctgttattgttgccactaatatgctagaaagtatgattgttcatccaactccaacccgagcagaagtttcagacattgctatagctgttcgagaaggttctgatggcattatgctttctggggaaactgcacacggaaagtttcctttgaaagctgttaaggtcatgcatactgttgccctgagaactgaagccactatgtctggtggggaaacaccggctaaccttggtcaggtgttcaagaatcacatgagtgaaatgtttgcataccattcaacaatgatgtccaacactcttggaacatcaattgtggttttcaccaggacaggatttatggctatcctacttagtcattaccgcccttctggcaccatttttgcctttacggaccaggagagagttagacaacgattggctttgtaccaaggtgtatgtccagtccagatggaattttctgatgatgctgagaagacatttggtgacgctttgtcatacttgctgaaacatggtatggtgaaggaaggcgaggaggttgcacttgttcaaagtggcaggcaacctatctggcggtcgcagtccacccataatattcagcaaaaccttaggcctgatgataataccacgctggcattactggcatcatttaactgtgagcttagtgagttgtgtgcaagacatgagagagccattgttgtgattctatattcgttgctaaatatgttaccttgcatgtaa

SEQ ID NO: 175 - protein, 623 aa, Oryza sativa (japonica cultivar-group)
MAQVVAAAGTAAAVAAVGRPLGGGGSGADALRPAARLSFAPRWCGGSAGAARARRESAVTSVISRAPRLDAEVLPVSADDDADEEENFQHLKAIQQLATSANGVWSKPNVRRKTKIVCTIGPSTNTKEMIWKLAEAGMNVARLNMSHGDHASHQKVIDLVKEYNAQTKDNVIAIMLDTKGPEVRSGDLPQPIMLETGQEFTFTIKRGVGTETCVSVNYDDFVNDVEVGDMLLVDGGMMSLLVKSKTEDSVKCEVIDGGELKSRRHLNVRGKSATLPSITDKDWDDIKFGVENQVDYYAVSFVKDAQVVHELKDYLRSSNADIHVIVKIESADSIPNLHSIITASDGAMVARGDLGAELPIEEVPLLQEEIIRMCRSMGKAVIVATNMLESMIVHPTPTRAEVSDIAIAVREGSDGIMLSGETAHGKFPLKAVKVMHTVALRTEATMSGGETPANLGQVFKNHMSEMFAYHSTMMSNTLGTSIVVFTRTGFMAILLSHYRPSGTIFAFTDQERVRQRLALYQGVCPVQMEFSDDAEKTFGDALSYLLKHGMVKEGEEVALVQSGRQPIWRSQSTHNIQQNLRPDDNTTLALLASFNCELSELCARHERAIVVILYSLLNMLPCM

SEQ ID NO: 176 - DNA, 1422 bp, Gloeobacter violaceus PCC 7421
  CDS (1)..(1422): transl_table=11
atgcagcctttagaccgtcgaacgaaagtcgtcgcgacgatcggtcctgcgagcagttcgccggaagtgcttcggcagctggtgaaggcaggaatcaacgtcgcgcgcttgaatttttcccacggcagctacgaagaccacgcgcgcatggtcaagctgctgcgggaggtctccgaggaactcgacaccccgattacgctattgcaggatttgcaggggccgaagatccgcgtgggccagatgcccgagggcgggctggctttaggggagggcgacgagctgacgctgttgccggtggcggaatttgcgggcgaacccggcacggtatccatcgactacccgtatcttgtggaggaggcgacgccgggtacccaggtgctcctggacgacggcttgctcgaatttgccgtggttgaggtgaagggcaacgccgtgcgctgccgggtggtgcgcgggggggtgctcaaaagccgcaagggggtcaacctgcccagtctggatttgcgcctgccctcgatgaccgaaaaggacaagcaagatctcgaatttggactggagcagggggtcgattgggtgtctttgagcttcgtgcgccggggcgaggacattcgcgtgctcaaaggactgctcgctgaacacggggccgccgatgtgccggtgatcgccaagattgagaaaccccaggcgatcgccaatctggaggagattctcgatgaagtgcagggaatcatggtggccaggggcgatctgggcgttgagatgagcccggagaaggtgccgctgctgcaaaagcggatcattcggctttgtaaccggcggggcattccggtgatcaccgccacccagatgctcgacagcatgatccgcaatccccggccgacccgcgctgaggcgagtgatgtcgccaacgccatcctggacggcagcgacgcggtgatgctctcgggcgaatcggcggtgggcgattttccggtgcagtcggtggagatgctcgtgcgcatcgccaaagaagtcgagcgggagtttaccttcgacaacaatccgcccgccaaatccgatgaaatccacgccctgtgcgaatcgctgggcaccatcgacaagatcttggccctgcactgtattgccacttttactaccaccggcttcagcgcttcgatcgcggccgcggagcggccgaaggcgccggtggtcgccttcacccccgacttgaaggtgtatcaccggttgaatctggtctggggcgtgaagcccttgctgttggagcacccggcggcggaactcgaaaaactgatcgagcagatggaaagctgccttgtcgaacgcaacctcgccgcccccggcgaccggatgctggtgctgggaggtagccccgtccagagggcgggcggcacgaattttctgaagatccatacgctgcactaa

SEQ ID NO: 177 - protein, 473 aa, Gloeobacter violaceus PCC 7421
MQPLDRRTKVVATIGPASSSPEVLRQLVKAGINVARLNFSHGSYEDHARMVKLLREVSEELDTPITLLQDLQGPKIRVGQMPEGGLALGEGDELTLLPVAEFAGEPGTVSIDYPYLVEEATPGTQVLLDDGLLEFAVVEVKGNAVRCRVVRGGVLKSRKGVNLPSLDLRLPSMTEKDKQDLEFGLEQGVDWVSLSFVRRGEDIRVLKGLLAEHGAADVPVIAKIEKPQAIANLEEILDEVQGIMVARGDLGVEMSPEKVPLLQKRIIRLCNRRGIPVITATQMLDSMIRNPRPTRAEASDVANAILDGSDAVMLSGESAVGDFPVQSVEMLVRIAKEVEREFTFDNNPPAKSDEIHALCESLGTIDKILALHCIATFTTTGFSASIAAAERPKAPVVAFTPDLKVYHRLNLVWGVKPLLLEHPAAELEKLIEQMESCLVERNLAAPGDRMLVLGGSPVQRAGGTNFLKIHTLH

SEQ ID NO: 178 - DNA, 1818 bp, Gloeobacter violaceus PCC 7421
  CDS (1)..(1818): transl_table=11
atgcgcgtgggtgccgatgtgttcgttctagatgccaatgcccaacagacaactgccgcgccgagcgagcgggcgcgttttcgccgcaccaagattgtcgccaccatcggtcccgccgtcgacgacccgcaggccctgcgcaagctcatccaggccggggcgacgaccctcagactcaatttttcccacggcaaccacgaggagcaccgccgccgcatcggcctcatccgccagatttcctttgaactcaatcagccggtggccatcctgcaggatctgcaaggtcccaagatccggttgggcaagttcgccgacggaccaatcgtcctcaagcacggcgacccgtttattctgaccagccacgacgtgcccgccaaccagcacatcagtccgatcacctactcgcgacttatccaggaagtgcccaccggcgccacgatcttgctggatgacgggcgggtggaactggtagtcgaacgggtggacctcgaagcccaatacctgcactgccggacggtgggggggggcaagctctccaacagcaaaggcgtcaactttccgggtgtcaccctctcggtgccggcgatgaccgaaaaggaccgcgaggatttgctcttcggtctcaatcagggcgtcgattgggtggccctcagtttcgtgcgcaccccgagcgatttgctcgaactgaaggaactgattgcccaatcgggcaagcgggtgccggtgatcgccaagatcgaaaaattcgaggccttcgagaacctcgatgcggtgattgccgcctgcgacgggctgatggtggcccgtggcgatctgggcgtcgagatgcccgccgaggaagtgcccttgctccaaaagcggctgatcgcttcggccaatcgggccggcaagcctgtgatcaccgccacccagatgctcgattcgatggtgagcaacagccgcccgacccgcgccgaagtttccgatgtggccaacgccatcctggacggcaccgacgcggtgatgctctccaacgagaccgccgtgggcgagcacccgatcttggcggtcgagacgatggcgcgcatcgccgatcgcatcgagcgctcgatgccccagcgcacctgggtagacacgggccgctcgatcccgaacgccatctcccaggcagtgggaagcgtcgcccagcaattgggtgcccaggcgattctcaccctcaccaagtccggcgccaccgcccgcaacgtcagcaagtaccggccgagggtgccgattatcgcgattaccccgagcgtgtcggtggcgcgcgaactgcagatggtctggggggtctacccgctgatggtcctggatctgccttcgacccgccagacctttcaagcggcgatcagcgccgcccaggacgaaaacctcgtcctggaaggcgacctggtggtgatgaccgccggcaccatccaggggctctccggttcgacggacctgatcaaagtcgaggtggtgacggcgattctcggccggggattgggcctgggtcagaacgccgtgagtggacgcgcccgcatcgtccgccacagcgacgaagcggcggccttgagtcccggggacatcctgattgccccgcgcaccgacgccaattttatcgaagcgatcaagctcgcgggcggcatcgtcaccgaggagagcggcctcacctcccacgcagcgattatcgggctgcgcctcggactgccggtactgctcggggtgaaagactgcaccacccgcatcccggacggggtggtgctcaccctcgatccgcaaaaaggggtcatcttctccggggcggcctccgccgtctag

SEQ ID NO: 179 - protein, 605 aa, Gloeobacter violaceus PCC 7421
MRVGADVFVLDANAQQTTAAPSERARFRRTKIVATIGPAVDDPQALRKLIQAGATTLRLNFSHGNHEEHRRRIGLIRQISFELNQPVAILQDLQGPKIRLGKFADGPIVLKHGDPFILTSHDVPANQHISPITYSRLIQEVPTGATILLDDGRVELVVERVDLEAQYLHCRTVGGGKLSNSKGVNFPGVTLSVPAMTEKDREDLLFGLNQGVDWVALSFVRTPSDLLELKELIAQSGKRVPVIAKIEKFEAFENLDAVIAACDGLMVARGDLGVEMPAEEVPLLQKRLIASANRAGKPVITATQMLDSMVSNSRPTRAEVSDVANAILDGTDAVMLSNETAVGEHPILAVETMARIADRIERSMPQRTWVDTGRSIPNAISQAVGSVAQQLGAQAILTLTKSGATARNVSKYRPRVPIIAITPSVSVARELQMVWGVYPLMVLDLPSTRQTFQAAISAAQDENLVLEGDLVVMTAGTIQGLSGSTDLIKVEVVTAILGRGLGLGQNAVSGRARIVRHSDEAAALSPGDILIAPRTDANFIEAIKLAGGIVTEESGLTSHAAIIGLRLGLPVLLGVKDCTTRIPDGVVLTLDPQKGVIFSGAASAV

SEQ ID NO: 180 - DNA, 1410 bp, Photorhabdus luminescens subsp. laumondii TTO1
  CDS (1)..(1410): transl_table=11
atgaaaaaaaccaaaattgtttgtactatcggaccaaaaacagaatccgaagaaaaactggccgaactgttgaatgccggcatgaatgttatgcgcctcaacttttcacacggagactatgaagagcacggccagcgtattcaaaatatccattcagttatgactaagacaggtaaacaagccgctattttgctggatactaaaggccctgaaattcgaactatgaagctggaaggcggtaacgatgtctctctaaccgcaggtcagaccttcacttttaccactgacacttccgttatcggtaataaagaccgtgttgctgtcacttaccgcggtttccccgcggatctggctcccggtaataccgtgctagttgatgacggcttgatcggcatgacagttaaagaagtcactaagtcagaggttatttgccaagttttgaataacggtgatttgggggaaaataaaggtgttaatctgccgggtatttccatcagcctgcctgccctggctgaaaaagataagcaagatttgatctttggttgccaacaaggtgttgatttcgtcgccgcttcttttatccgcaagcgctccgatgttctggaaatccgtgaacatctgaaagcgcacggcggtgaaaacattcaaatcatctctaagattgaaaatcaggaaggtctgaacaattttgatgaaattctggaagcttctgacgggatcatggttgctcgtggtgatcttggcgttgaaattccggttgaagaagtgatcttcgcccagaagatgatgattcaaaaatgtaatatcgctcgcaaagttgttatcactgcaactcaaatgctcgattctatgattaaaaacccgcgccctacccgtgcggaagccggtgacgtcgctaacgctattttggatggtactgatgcagttatgctttctggcgaaagtgcaaaaggcaaatatccaatagaagcagtgactatcatggcaacgatttgtgaacgtacagaccgcgttatgccaagccgtatcgaagccgtccattgccgtaacctgcgcgtgaccgaagcggtgtgtcgtggtgccgttgaaacagcagaaaaactggaagcccctctgattgtggtcgcaacctatggcggtaaatctgccaaatccattcgtaagtatttccctgacgcgcccattctggcattaacgactaatgaagtgactgcccgccaattactgcttgttaagggtgtttttacccaaattgttaaagaaatcgcctctaccgacgatttctaccgcattggtaaagaagcggcgctagcaagtggcctagcgaagaaaggtgaaatcgtggttatggtatctggtgccctggttccaagcggcacaaccaacacgtcgtctgttcacgtcctttaa

SEQ ID NO: 181 - protein, 469 aa, Photorhabdus luminescens subsp. laumondii TTO1
MKKTKIVCTIGPKTESEEKLAELLNAGMNVMRLNFSHGDYEEHGQRIQNIHSVMTKTGKQAAILLDTKGPEIRTMKLEGGNDVSLTAGQTFTFTTDTSVIGNKDRVAVTYRGFPADLAPGNTVLVDDGLIGMTVKEVTKSEVICQVLNNGDLGENKGVNLPGISISLPALAEKDKQDLIFGCQQGVDFVAASFIRKRSDVLEIREHLKAHGGENIQIISKIENQEGLNNFDEILEASDGIMVARGDLGVEIPVEEVIFAQKMMIQKCNIARKVVITATQMLDSMIKNPRPTRAEAGDVANAILDGTDAVMLSGESAKGKYPIEAVTIMATICERTDRVMPSRIEAVHCRNLRVTEAVCRGAVETAEKLEAPLIVVATYGGKSAKSIRKYFPDAPILALTTNEVTARQLLLVKGVFTQIVKEIASTDDFYRIGKEAALASGLAKKGEIVVMVSGALVPSGTTNTSSVHVL

SEQ ID NO: 182 - DNA, 1443 bp, Geobacter sulfurreducens PCA
  CDS (1)..(1443): transl_table=11
atggatacactgtcacgcaaaaccaagatcatcgccactctggggcccgtcagctcctcgcccgacatgatccggcagctgatggacgcaggagtcgatgtcttccggctcaacttttcccacggctccaacgaccagcggcgggaggtaatcgccgccatccggcgtctttccgccgaacggggcaaggagataggcattctggccgatctccaggggcccaagatcaggaccggcaggatggagaacggtgccattccgctggtgcggggcgactcgctcgacattaccaccgatgaggtcctggggcgccccggtctcatttccaccatctaccagtctctcccccacgacgtgaagcccggctcacgcatcctgctggacgacggccttatcgagttgcgggtccagtccgtgtccggcgccacggtccgttgcaccgtggtccaggggggcatgctcaaggatctgaaagggatcaacctccccggcgtcaaggtttctgcgccgtcgctgtcggagaaggacctccgcgatctggatttctgcctggaggtgggggtcgactacattgccctgtcctttgtccgcactgccgccgacgtggaggggctgaagcggatcctcttcgaacgggacgtccaggtgccggtggtggccaagatcgagaagcccgaggccctgcgcaacttcaaaagcatcctcaaggttgccgatgcggtcatggtggcccggggcgatctgggggtggaaatcagcccggaaaaggtccccctgttccagaaaaagatcatccgggcctgcaacgaggccggcaaaccggtgatcaccgccacccagatgcttgaatccatgattagccatccgcgccccacccgggccgagacctcggacgtggccaacgccatcctcgacggaaccgatgcggtcatgctctcgggtgagaccgcctcggggcagtttcccctggaagcggtgcgtaccatggacaaggtggccctcgacgttgagcgcttcgctcaggtggaggacggctcggggccacgccgccacagcgtcagcatcgccgaggcggtggccgaggccgcctgccacgctgccgtcattctgaaggcgaaggccgtggcctgcatgacccagtcggggagcacggctgcccgcatctcacgctaccggcctccgctgccgatcctcgccttcaccggttcggtggacaccatgcgacggctgtcgctctactggggagtcaaggcataccccatcggcaccatggccggcaccgacgagcagatagtggccgtggagtcgacgctcctgtccggtggctaccgcaagggcgacgtggtggtcatcaccatgggtgtgccggtggaggcccgggggtccaccaacctcatgaaggtccacaagctgggaaccggccagttcttcgagatattttga

SEQ ID NO: 183 - protein, 480 aa, Geobacter sulfurreducens PCA
MDTLSRKTKIIATLGPVSSSPDMIRQLMDAGVDVFRLNFSHGSNDQRREVIAAIRRLSAERGKEIGILADLQGPKIRTGRMENGAIPLVRGDSLDITTDEVLGRPGLISTIYQSLPHDVKPGSRILLDDGLIELRVQSVSGATVRCTVVQGGMLKDLKGINLPGVKVSAPSLSEKDLRDLDFCLEVGVDYIALSFVRTAADVEGLKRILFERDVQVPVVAKIEKPEALRNFKSILKVADAVMVARGDLGVEISPEKVPLFQKKIIRACNEAGKPVITATQMLESMISHPRPTRAETSDVANAILDGTDAVMLSGETASGQFPLEAVRTMDKVALDVERFAQVEDGSGPRRHSVSIAEAVAEAACHAAVILKAKAVACMTQSGSTAARISRYRPPLPILAFTGSVDTMRRLSLYWGVKAYPIGTMAGTDEQIVAVESTLLSGGYRKGDVVVITMGVPVEARGSTNLMKVHKLGTGQFFEIF

SEQ ID NO: 184 - DNA, 1770 bp, Lactobacillus johnsonii NCC 533
  CDS (1)..(1770): transl_table=11
atgaagaaaactaaaattgttagtactttagggccagcctcaaacgatgttgagactattactaaattagctgaagcaggtgcaaacgtattccgtttcaacttctcacacggtgaccacgaagaacaccgtgcacgtatgaacatggttcgtgaggttgaaaagaagactggtaaacttcttggcattgctcttgatactaagggtgccgaaattagaactactgaacaagaaggcggcaagttcactattaacactggtgacactatccgtatttctatggacgacactaagaagggtaacaaggacatgatccacgttacctacgatggtctttacgacgatactcacgttggtggtcacgtattaatcgatgatggtttagttgaccttttgattaaggacaaagatgacgctaagagagaattagtttgtgaagctcaaaacactggtgtaatcggttctaagaagggtgttaacgctcctggcgttgaaatccgcctcccaggtattactgaaaaagatactaacgatattaagttcggtttgaaggaaggtatcaacttcatctttgcttcattcgttcgtaaagcacaagatgttcttgacattcgtcaattgcttgaagaagcacattgtgaatacgtaaagatcttccctaagattgaatcacaagaaggtattgacaacatcgacgaaatcttaaaggtttctgatggtttaatggttgctcgtggtgacatgggtgttgaaattccatttatcaatgttccatttgtacaaaaagaattgatcaagagatgtaacgctttaggtaagccagttattactgctactcaaatgcttgactcaatgcaagaaaacccacgtcctactcgtgccgaagttactgacgttgccaacgctgttcttgatggtactgacgcaactatgctttcaggtgaatctgcaaacggtctttacccagttaaagctgttaaggctatggctgaaatcgacatgcgtactgaaaagcaacttgctaagcgtaacaagttagctcttcaaagattcgaagaatacaagggttcaaacgttactgaagctatcggtgaatcagttgttagaactgctgaagaattgggcgttaagactattattgctgcaactgaatctggttacactgcacgtatgatttctaagtaccgtccaaacgcagacattattgctatgactttcaacgacaagattcaacactcattaggtgttgtttggggtgtaaagccaatgttgactgaaaagcctaagtctactgaagaaatgtttgaaaaggcagctgaacttgctaaagaaactggtcttgcaaaagacggtgacttagtaattatcgttgctggtgttcctttgggcgaaactggtactactaacttgatgaagttacaattaatcggtacccaacttgttaaaggtttaggtgttggtgaacaatcagttattggtaaagctgtagttgcaacttctgctgaagaagctaacagcaaagttcaagatggtgacatcttagttgctaagactactgataaggattacttaccagcaatcaagaaggcttcaggtatggtagttgaagcttctggtttaactagccatgcagctgttgttggtctttcacttggtatcccagttatcgttggtgctactgatgcagtagaaaagatcaaggatggttctaagattactgttgatgctcgtcgcggtgctgtttaccaaggcgaagcaactaacctttaa

SEQ ID NO: 185 - protein, 589 aa, Lactobacillus johnsonii NCC 533
MKKTKIVSTLGPASNDVETITKLAEAGANVFRFNFSHGDHEEHRARMNMVREVEKKTGKLLGIALDTKGAEIRTTEQEGGKFTINTGDTIRISMDDTKKGNKDMIHVTYDGLYDDTHVGGHVLIDDGLVDLLIKDKDDAKRELVCEAQNTGVIGSKKGVNAPGVEIRLPGITEKDTNDIKFGLKEGINFIFASFVRKAQDVLDIRQLLEEAHCEYVKIFPKIESQEGIDNIDEILKVSDGLMVARGDMGVEIPFINVPFVQKELIKRCNALGKPVITATQMLDSMQENPRPTRAEVTDVANAVLDGTDATMLSGESANGLYPVKAVKAMAEIDMRTEKQLAKRNKLALQRFEEYKGSNVTEAIGESVVRTAEELGVKTIIAATESGYTARMISKYRPNADIIAMTFNDKIQHSLGVVWGVKPMLTEKPKSTEEMFEKAAELAKETGLAKDGDLVIIVAGVPLGETGTTNLMKLQLIGTQLVKGLGVGEQSVIGKAVVATSAEEANSKVQDGDILVAKTTDKDYLPAIKKASGMVVEASGLTSHAAVVGLSLGIPVIVGATDAVEKIKDGSKITVDARRGAVYQGEATNL

SEQ ID NO: 186 - DNA, 1416 bp, Treponema denticola ATCC 35405
  CDS (1)..(1416): transl_table=11
atgaaaaaaacaaaaatagtatgcacaatagggcccgcttccgactcggaaagggtcttggcagaaatgtttaaagccggtttaaatgtctgccgccttaatttttcgcatggaagccatgaagaacacaaggttaaaatagatcgaataaaaaaaataagagaagagttaaaaatgcctattgcacttttactggatactaagggacccgaaatccgtttgggcctttttgaaaagcctgtagaaattgtacaaggtcaggaatttataattacaaccagagatgtaatcggaacaaatcaaatatgcagcatctcatataagaatattgccgccgaaattaaacctaaaagcagaatccttataaatgacggattattggagttacaggttatcgatattttaaacgatacggacatagaatgtgtcgcagtaaattccggaaccctaagcagccgaaaaggtgtaaacattccgggcttgagggtaaaccttccttacatgagtgaaaaggatatctccgatatcgaattcggaattgaaaatgatgtggattttattgccgcctcctttacacaaagagccgacgatattatccaaataagaaaacttttggaaaaacacaaaagtacaatcgccgttatagcaaaaatagaaaatcaagaaggcttggacaacatagatgaaattttagcggaagccgacggaataatggtagcccggggagatatgggtgtagaaatagagcccgaaaaaatccctcatcttcaaaagcagctgataaaaaaagcaaaccttgcaggaaagccggttatcaccgcaactcagatgctcgaatctatgacccacaacctgcgtcccaccagagccgaagttaccgacgttgcaaacgctattctcgacggaacatcagctgtaatgctttctggagaaaccgcagcaggcgaataccctgtcgaaaccgtggccatgatgacctcaattgcgaactctatagaagaaacattagattatgaaaaactatttgctgaaaatgcttctcttcatgagaccacaatcacaaatgcaattgcaagagccacctgctccactgccctagccctcgatgcaaatgcaatcataacggcatccgcttcgggaataacgcccagagctctttcaaaatttaaaccaagggtaccgattattgcaataacggaatcgcctcaggttatgagaaagatggccctcgactgggacgtatatccggttttagccgatcctataaaatcgaccgataacatgttcgatgtgtgttcgcaaattgcaaaggatacaggccatgtaaaaaaaggagacatagcaatccttacggccgggattcctataggcaaagcaggatctacaaaccttctaaaggtagaaataatagaataa

SEQ ID NO: 187 - protein, 471 aa, Treponema denticola ATCC 35405
MKKTKIVCTIGPASDSERVLAEMFKAGLNVCRLNFSHGSHEEHKVKIDRIKKIREELKMPIALLLDTKGPEIRLGLFEKPVEIVQGQEFIITTRDVIGTNQICSISYKNIAAEIKPKSRILINDGLLELQVIDILNDTDIECVAVNSGTLSSRKGVNIPGLRVNLPYMSEKDISDIEFGIENDVDFIAASFTQRADDIIQIRKLLEKHKSTIAVIAKIENQEGLDNIDEILAEADGIMVARGDMGVEIEPEKIPHLQKQLIKKANLAGKPVITATQMLESMTHNLRPTRAEVTDVANAILDGTSAVMLSGETAAGEYPVETVAMMTSIANSIEETLDYEKLFAENASLHETTITNAIARATCSTALALDANAIITASASGITPRALSKFKPRVPIIAITESPQVMRKMALDWDVYPVLADPIKSTDNMFDVCSQIAKDTGHVKKGDIAILTAGIPIGKAGSTNLLKVEIIE

SEQ ID NO: 188 - DNA, 1758 bp, Bacillus cereus ATCC 10987
  CDS (1)..(1758): transl_table=11
atgcgtaaaactaaaattgtatgtactataggtcctgctagtgaaagtattgaaaaattagagcaattaatcgaagcaggtatgaacgttgctcgtttaaacttctctcatggtagccatgaagaacacggcgctcgtattaaaaacattcgtgaagcttcaaagaaaactggtaaaacagttggtatcttacttgatacaaaaggtccagaaatccgtactcacgacttcgtagacggacaagctgagcttgtaacaggtgcagaagttgttatttctactgagcaagtattaggtactgcagagaagttctctgtatcttatgctggtctttatgacgatgtaaacccaggttctcgcattctaatcgatgatggtcttatcgagctagaagtaatcgaaaaagctgacggaaacatccgtacaaaagttcttaacagcggaactgtaaaaaataaaaaaggtgttaacgtaccaaacgtaagcattaagcttcctggtatcactgaaaaagacgtaaaagatatcatcttcggtatcgagcaaaaagttgatttcatcgcagcttcattcgtacgtaaagcagctgacgtattagaaatccgtgaattactagaagagcataacgctcaatacatccaaatcgtaccaaaaatcgaaaaccaagagggtatcgacaatatcgattcaatcttagaagtttctgacggtttaatggtagctcgtggtgacatgggtgtagaaattccaccagaagaagtaccattagtacaaaaacgtctaatcaaaaaatgtaacgtgttaggtaaaccagttattactgcaacacaaatgttagattctatgcaacgtaacccacgtccaactcgtgcggaagcaagtgacgtagctaacgcaatcttcgatggtacagacgcaatcatgctttcaggtgaaacagctgctggacaatacccagtagaagcagtaacaatgatggctaacattgcagtacgtgttgaaaaatcattacaatatgaagatatgttcaaaaaacgtattaaagagttcactccaacaattacagatgcaattagccaatctgttgcgcatacagcacttgctcttgatgtagctgcaatcgtagctccaacagaaagtggatatactgcgaaaatgatctctaaataccgtccaaaatctccaatcgtagctgtaacatctgacgagcaagtaggacgtcgtcttgcgcttgtttggggtgtacaagcatttatggctgagaagcgcgcagcttctactgacgaaatgttagatacagcgattcaaacaggtatggatgcaggtctaatcggacttggagacactgtagtaatcactgctggtgttccagttgctgaaactggtacaacaaacttaatgaaaatccacgttgttggtgaagaagttgctaaaggacaaggaatcggtcgtaaagctgcaaaaggtaaagtagttgtagcgaaaacagctgctgaagctgtagcgaacgtaaacgaaggtgatatccttgttacaacaagcactgataaagatatgatccctgcaatcgaaaaagctgctgctctagttgtagaagaaggcggtctaacaagccatgcggctgttgtaggtgtatcaatcggtattcctgttatcgttggtgtaaacggcgtaacagcaactttaaaaaatggccaagaagtaacagttgatgcagcacgcggaattgtttataatggacatgcggaagtgctataa

SEQ ID NO: 189 - protein, 585 aa, Bacillus cereus ATCC 10987
MRKTKIVCTIGPASESIEKLEQLIEAGMNVARLNFSHGSHEEHGARIKNIREASKKTGKTVGILLDTKGPEIRTHDFVDGQAELVTGAEVVISTEQVLGTAEKFSVSYAGLYDDVNPGSRILIDDGLIELEVIEKADGNIRTKVLNSGTVKNKKGVNVPNVSIKLPGITEKDVKDIIFGIEQKVDFIAASFVRKAADVLEIRELLEEHNAQYIQIVPKIENQEGIDNIDSILEVSDGLMVARGDMGVEIPPEEVPLVQKRLIKKCNVLGKPVITATQMLDSMQRNPRPTRAEASDVANAIFDGTDAIMLSGETAAGQYPVEAVTMMANIAVRVEKSLQYEDMFKKRIKEFTPTITDAISQSVAHTALALDVAAIVAPTESGYTAKMISKYRPKSPIVAVTSDEQVGRRLALVWGVQAFMAEKRAASTDEMLDTAIQTGMDAGLIGLGDTVVITAGVPVAETGTTNLMKIHVVGEEVAKGQGIGRKAAKGKVVVAKTAAEAVANVNEGDILVTTSTDKDMIPAIEKAAALVVEEGGLTSHAAVVGVSIGIPVIVGVNGVTATLKNGQEVTVDAARGIVYNGHAEVL

SEQ ID NO: 190 - DNA, 1506 bp, Ashbya gossypii ATCC 10895
  CDS (1)..(1506)
atggaatctagattgggatggctaactcgtttgaactacgacactggttctgcattgagaagaacgtcgatcatcgggacgattggtcctaagaccaacaacccagagacgttggtggagcttagaaaggcgggcttgaacatcgtgagaatgaacttctcgcacggctcgtacgagtaccaccagtcggtgatcgacaacgccagaaagtcggaggagttgtaccctggtagaccattggccattgcgttggacaccaagggtcctgagatcagaactggtaccactgtcgacaacgtcgactacccaatcccacctaaccacgagatgatcttcaccaccgacgaccagtacgccaagtcctgcgacgacaaagtcatgtttgtcgactacaagaacatcacgaaggtgattgagaagggcagagtgatttacgttgacgacggtgttctatcgttcgaggtgttggaggtcgtggacgacaagaccttgaaggtcaagtctttgaacgcagggaagatctgctcccacaagggtgtgaacttgccgggtaccgatgtcgacttgccagctctgtctgagaaggacaagtctgacttgcgcttcggtgtcaagaacggtgtgcacatggtcttcgcttccttcatcagaactgctggagacatcctaactatcagagagatcttgggcgaggatggcaaggacatcaagatcatcgccaagattgagaaccagcagggtgtgaacaacttcgacgagattttgaaggtcaccgacggtgttatggtcgccagaggtgacttgggtatcgagatcccagcgcctcaggtatttgctgtgcaaaagatgttgatcgccaagtgtaacttggctggtaagccagttatctgtgccacccagatgttggagtctatgacctataacccaagaccaaccagagctgaggtttctgacgttggtaacgctgtcctggacggtgctgactgtgttatgttgtctggtgagaccgccaagggtatctacccaatcaacgctgttaagaccatggctgagactgctttgattgctgagcaggccattccatacgttccaacttacgatgacctcagaaacttgactccaaagccaactccaacctccgagaccatcgctgctgctgctgtcgcggctactttcgagcagaaggccaaggccattgtcgtgctatccacctccggtgacaccaccagattggtctccaagtacaagccaaacgttccaatcgttatggtgaccagaaacccaagagcggccagatactgccacttgcacagaggtgtcttcccattcgtctacgaacaggaggcagctgatgagtggaccgatgacgtcgaggccagattgaacttcggtgtggagaagtccaaggagcttggtatcctgagcgagggtgacactattgtcactattcagggtttcgcgtctggtgttggccactctaacaccttgagggtgttgaccgtctaa

SEQ ID NO: 191 - protein, 501 aa, Ashbya gossypii ATCC 10895
MESRLGWLTRLNYDTGSALRRTSIIGTIGPKTNNPETLVELRKAGLNIVRMNFSHGSYEYHQSVIDNARKSEELYPGRPLAIALDTKGPEIRTGTTVDNVDYPIPPNHEMIFTTDDQYAKSCDDKVMFVDYKNITKVIEKGRVIYVDDGVLSFEVLEVVDDKTLKVKSLNAGKICSHKGVNLPGTDVDLPALSEKDKSDLRFGVKNGVHMVFASFIRTAGDILTIREILGEDGKDIKIIAKIENQQGVNNFDEILKVTDGVMVARGDLGIEIPAPQVFAVQKMLIAKCNLAGKPVICATQMLESMTYNPRPTRAEVSDVGNAVLDGADCVMLSGETAKGIYPINAVKTMAETALIAEQAIPYVPTYDDLRNLTPKPTPTSETIAAAAVAATFEQKAKAIVVLSTSGDTTRLVSKYKPNVPIVMVTRNPRAARYCHLHRGVFPFVYEQEAADEWTDDVEARLNFGVEKSKELGILSEGDTIVTIQGFASGVGHSNTLRVLTV

SEQ ID NO: 192 - DNA, 1581 bp, Aspergillus terreus NIH2624
  CDS (1)..(1581)
atggccgccagtacctctctcgaccatctgagcaaccgtatgaagctggagtggcactccaagctcaacacggagatggtcccggcgaagaacttccgccgtacctccatcattggcaccattggccccaagaccaactcggtggagaagatcaacgctctccgctcaagcggtctgaacgtcgttcgcatgaacttctcccacggttcctacgagtaccatcagtccgtgatcgacaatgcccgcgaggccgctcgcgtccagaccggacgtcccctggccatcgctcttgacaccaaaggacctgagatccgtaccggaaacaccaccgacgacaaggacattcccatcaaggagggccatgagctcaacatcacgactgatgagaagtacgccacctgcagcgacgaccagaacatgtacctcgactacaagaacatcaccaaggtcattgcccctggcaagctgatctatgtcgacgatggtatcctttccttccaggtcctggaagtcgtagacgataagaccctccgcgtcaagtgcctgaacaacggtaacatctcttcccgcaagggtgtgaaccttcccggcaccgacgtcgaccttcccgctctgtccgagaaggatatctccgatctcagattcggtgtcaagaacaacgtcgacatgatcttcgcgtccttcatccgtcgtggtagcgacatccgccacatccgtgaggtcctcggtgaggaaggaaaggagatccagatcattgccaagatcgagaaccagcagggtgtcaacaacttcgacgagatccttgaggagaccgacggtgtcatggttgcccgtggtgatcttggtatcgagatccctgcccccaaggtcttcatcgcccagaagatgatgatcgccaagtgtaacatcaagggtaagcccgtcatctgtgccactcagatgctcgagtccatgacgtacaaccctcgtcccactcgtgctgaggtgtcggatgtcgccaacgccgttctggatggtgccgactgtgtcatgttgtctggtgagaccgccaagggttcttacccctgcgaggccgtcaagatgatgcacgagacctgtctgctggctgaggtcgccatccctcacttccaggtgttcgacgagctgcgcaaccttgctcctcgtcccaccgccactgtcgagtccatcgccatggctgccgtcagcgccagtctggaactcaatgccggtgccatcgtggtcctgaccaccagcggaaacactgcccgcctcatctccaagtaccgccccgtctgccccgtcctcatggtttctcgtaaccccagagccactcggtactctcacctgtaccgcggtgtctggcccttcctcttccccgagtccaagcctgacttcaacgtcaagatctggcaggaggacgttgaccgtcgcctcaagtggggtatcaaccacggtctcaagctcggcatcatcaacaagggtgaccccattgtctgcgtgcagggctggcgcggcggtatgggccacaccaacaccgtccgtgtggtccccgctgaggagaaccttggtctggctgagtaa

SEQ ID NO: 193 - protein, 526 aa, Aspergillus terreus NIH2624
MAASTSLDHLSNRMKLEWHSKLNTEMVPAKNFRRTSIIGTIGPKTNSVEKINALRSSGLNVVRMNFSHGSYEYHQSVIDNAREAARVQTGRPLAIALDTKGPEIRTGNTTDDKDIPIKEGHELNITTDEKYATCSDDQNMYLDYKNITKVIAPGKLIYVDDGILSFQVLEVVDDKTLRVKCLNNGNISSRKGVNLPGTDVDLPALSEKDISDLRFGVKNNVDMIFASFIRRGSDIRHIREVLGEEGKEIQIIAKIENQQGVNNFDEILEETDGVMVARGDLGIEIPAPKVFIAQKMMIAKCNIKGKPVICATQMLESMTYNPRPTRAEVSDVANAVLDGADCVMLSGETAKGSYPCEAVKMMHETCLLAEVAIPHFQVFDELRNLAPRPTATVESIAMAAVSASLELNAGAIVVLTTSGNTARLISKYRPVCPVLMVSRNPRATRYSHLYRGVWPFLFPESKPDFNVKIWQEDVDRRLKWGINHGLKLGIINKGDPIVCVQGWRGGMGHTNTVRVVPAEENLGLAE

SEQ ID NO: 194 - DNA, 1608 bp, Coccidioides immitis RS
  CDS (1)..(1608)
atgtcgcgcaacgaccgcaacacttcatcatacatggcgagttccttgagccacctgtccaacaggatgaagctggaatggacttccaagctcagcaccgagtaccagccagcaaaaaactatcgcaggacctccataatctgcaccatcggtcccaagacaaactccgttgaaaccatcaacatcctgcgcaaagccgggctcaatgttgtgcgcatgaacttttctcatggaactcacgagtaccaccaatcggtcattgacaacgcaaaagaagctgagagaatccaaccaggccgcccccttgctattgcactcgatactaaaggacctgaaatccgcaccggacttactccagataataaagatattccaatttctgctgggacagagttgaacatcaccacacatgatgacttcgcagccaagagcgacaacaagaacttatacgtggactacaaaaatatcactaaggtaattgaaaagggcaagcttatcttcgtcgacgatggagttctctcgtttgaagtcctgggtattgtggacgatcagacactccgcgttaagtgtctcaacaatggaactatctcttccaagaagggagtcaaccttcccggcactgatgtcgacctcccggctctttcagagaaggatatcgatgatattaaattcggtgttaaaaatagggtcgacatgatctttgcttcatttatccgtcgtggcgatgatatcaagcgtattcgagaggtcttgggagacgagggccatgaaatccagattatagcaaagatagagaaccaacaaggtgtcaataactttgacgagatcttggatcaggctgacggcgttatggtcgcgcgaggagatttgggtattgagattccggcaccaaaggtgttcattgctcaaaagatgatgatagccaagtgcaacatcaagggaaagcccgtgatctgcgcgacgcagatgctggagtccatgacgtacaatcctcgtccaacacgcgccgaagtatccgacgtcgccaatgcagttcttgatggtgctgactgtgtgatgttgtctggtgaaaccgccaagggcaactatcccaaggaagcagttgctatgatgcacgaaacatgcctgcaagccgaagttgctatcccctacttcagcgtcttcgatgagttgcggaacctctgccccaggccagcagatacagttgagtccatcgctatggctgccgtgtccgctagcctcgagctcaatgcgggcgccatccttgttctgaccacaagcggcctcactgcacgtctcctctcaaaatatcgaccggtctgcccaattatcatggtcacccgtaatgaagctgcggctcggtactcccacctttatcgtggcgtgtacccgttcttcttcccagagaagaagcctgattttaacatcaggatctggcaggaggatgtcgaccgccgtctcaagtggggcattgcccaggccctcacactggaagtcatctctaagggcgactccgtggtctgcgtccagggatggcgtggaggccaaggacataccaacaccatccgtgtcgttccagctgaacccaacctgggcctcgccgagtaa

SEQ ID NO: 195 - protein, 535 aa, Coccidioides immitis RS
MSRNDRNTSSYMASSLSHLSNRMKLEWTSKLSTEYQPAKNYRRTSIICTIGPKTNSVETINILRKAGLNVVRMNFSHGTHEYHQSVIDNAKEAERIQPGRPLAIALDTKGPEIRTGLTPDNKDIPISAGTELNITTHDDFAAKSDNKNLYVDYKNITKVIEKGKLIFVDDGVLSFEVLGIVDDQTLRVKCLNNGTISSKKGVNLPGTDVDLPALSEKDIDDIKFGVKNRVDMIFASFIRRGDDIKRIREVLGDEGHEIQIIAKIENQQGVNNFDEILDQADGVMVARGDLGIEIPAPKVFIAQKMMIAKCNIKGKPVICATQMLESMTYNPRPTRAEVSDVANAVLDGADCVMLSGETAKGNYPKEAVAMMHETCLQAEVAIPYFSVFDELRNLCPRPADTVESIAMAAVSASLELNAGAILVLTTSGLTARLLSKYRPVCPIIMVTRNEAAARYSHLYRGVYPFFFPEKKPDFNIRIWQEDVDRRLKWGIAQALTLEVISKGDSVVCVQGWRGGQGHTNTIRVVPAEPNLGLAE

SEQ ID NO: 196 - DNA, 1584 bp, Neosartorya fischeri NRRL 181
  CDS (1)..(1584)
atggccgccagcagttctcttgaccacctgagcaaccgtatgaagctggaatggcacgccaagctgaacacggatatggttcctgcgaagaacttccgtcgcacctccatcatttgcaccatcggccccaagacaaactccgtcgagaagatcaatgctctccgcagagctggtctcaacgtcgttcgcatgaacttctctcacggctcgtatgagtaccaccaatctgtcatcgacaatgcccgggaggccgaaagagtccagaccggacgtcctgttgccattgctcttgacaccaaaggacctgaaattcgtaccggaaacaccgtcggcgacaaggacattcctatccaagccggtcacgaactcaacatcaccactgacgagaagtatgctaccgcctgcgacgacaagaacatgtacctcgactacaagaacatcaccaaggtcatcgaacccggcaagctgatctatgtggacgacggtattctctcgtttgaggtgctcgagattgttgacgatcagacccttcgtgtcaagtgcctgaacaatggcaacatctcttccagaaagggtgtcaacctgcctggcactgacgtcgaccttcccgctctctctgaaaaggatattagcgatctcaagttcggtgtcaagaacagggttgacatggtcttcgcctcgtttatccgtcgcggaagcgacattcgtcacattcgtgaagtccttggcgagcagggcaaggagatccaaattatcgccaagatcgagaaccagcagggtgtcaacaacttcgatgagattctcgaggagactgacggtgtcatggtcgcccgtggtgacttgggtatcgagatccctgcccccaaggtcttcctggcccagaagatgatgatcgccaagtgtaacatgaagggcaagcccgtcatctgtgccactcagatgctcgagtccatgacatacaacccccgccccacccgtgcggaggtgtcggacgttgccaacgctgttctcgacggcgctgactgcgtcatgttgtccggagagactgccaagggcaattaccccaccgaggctgtcaagatgatgtcggagacctgcttgcttgcagaggtcgctattcctcacttccaggtctttgacgaattgcgtaaccttgctcctcgccccactgacaccgttgagtctatcgccatggctgccgtcagcgccagtcttgagctcaatgctggtgccattgttgtcttgaccactagcggtaaaactgctcgtcttctttccaagtatcgccctgtctgccctatcatcatggtcactcgcaacccgatggccgcccggtactcccatctgtatcgtggtgtttggcccttcaccttccctgagaagaagcccgacttcaatgtcaagatctggcaggaggatgttgaccgccgcctcaagtggggtatttctcacgctctcaagctcggcctcatcaacaagggcgacaacatcgtctgtgtccagggctggcgcggtggcatgggacacaccaacactgtccgtgtggtccctgctgaggagaaccttggccttgctgaagagtaa

SEQ ID NO: 197 - protein, 527 aa, Neosartorya fischeri NRRL 181
MAASSSLDHLSNRMKLEWHAKLNTDMVPAKNFRRTSIICTIGPKTNSVEKINALRRAGLNVVRMNFSHGSYEYHQSVIDNAREAERVQTGRPVAIALDTKGPEIRTGNTVGDKDIPIQAGHELNITTDEKYATACDDKNMYLDYKNITKVIEPGKLIYVDDGILSFEVLEIVDDQTLRVKCLNNGNISSRKGVNLPGTDVDLPALSEKDISDLKFGVKNRVDMVFASFIRRGSDIRHIREVLGEQGKEIQIIAKIENQQGVNNFDEILEETDGVMVARGDLGIEIPAPKVFLAQKMMIAKCNMKGKPVICATQMLESMTYNPRPTRAEVSDVANAVLDGADCVMLSGETAKGNYPTEAVKMMSETCLLAEVAIPHFQVFDELRNLAPRPTDTVESIAMAAVSASLELNAGAIVVLTTSGKTARLLSKYRPVCPIIMVTRNPMAARYSHLYRGVWPFTFPEKKPDFNVKIWQEDVDRRLKWGISHALKLGLINKGDNIVCVQGWRGGMGHTNTVRVVPAEENLGLAEE

SEQ ID NO: 198 - DNA, 1581 bp, Aspergillus clavatus NRRL 1
  CDS (1)..(1581)
atggctgccagctcttctctcgaccatctgagcaaccgtatgaagctggaatggcacgccaagctcaacacggaaatggttcctgcgaagaacttccgtcgcacttccatcatttgcaccatcggtcctaagactaactccgtcgagaagattaacgctctccgcaaagtcggccttaatgttgttcgcatgaacttctcccatggctcatatgagtatcatcaatccgtcattgacaatgcccgcgaggccgagaaggtccaatctggacgccctctcgcgattgctctcgatactaaaggacctgagatccgtaccggaaacactgttggcgacaaggacatcccaatcaaggccggtcatgagctcaacatcaccactgacgagaagtatgccactgcctgcgacgaccagaacatgtacctcgactataagaacatcaccaaggtgatcgaagccggcaagctgatctatgtcgacgatggtattctctccttccaggtcctcgaggttgtagacgacaagaccctgcgtgtcaagtgcttgaacaacggcaacatctcttcccgcaagggtgtcaacctgcctggtaccgacgttgaccttcccgctctgtctgagaaggacatcagcgatctgaagttcggtgtcaagaacaaggtcgacatgatctttgcctcgttcatccgtcgcggaagcgacattgagcacatccgtaaggtgctaggtgaggagggtaaggagatccagatcattgccaagatcgagaaccagcagggtgtcaacaacttcgatgagattcttgaagccactgatggtgtcatggtcgcccgtggtgacttgggtatcgagattcccgctcccaaggtcttcctggcccagaagatgatgatcgccaagtgtaacatgaagggcaagcccgtcatctgtgccacccagatgctcgagtccatgacatacaacccccgtcccactcgtgctgaggtttctgatgtcgccaacgctgttctcgacggcgccgactgtgtcatgttgtctggtgagaccgccaagggtaactaccctaccgaggctgtcacgatgatgtccgagacctgtctgcttgccgaggttgctaccccccacttccaggtgttcgatgagctccgtaaccttgttccccgccctacttgcaccgctgagtccatcgccatggctgccgtcagcgccagtctggagctcaatgctggtgccattgttgtcctcaccaccagcggtaaaactgctcgccttctgtccaagtaccgccccgtttgccccattctcatggtcactcgtaaccccatggctgcccggtattcccacctgtaccgtggtgtctggcccttcaccttccctgagacgaagcccgacttcaacgtcaagatctggcaggaggatgtcgaccgtcgcctcaagtggggtatctctcacggcctcaagctcggcctcattaacaagggcgacaacatcgtctgtgttcagggatggcgcggcggtatgggccacaccaacaccgtccgtattgtccccgctgaggagaaccttggcctcgctgagtaa

SEQ ID NO: 199 - protein, 526 aa, Aspergillus clavatus NRRL 1
MAASSSLDHLSNRMKLEWHAKLNTEMVPAKNFRRTSIICTIGPKTNSVEKINALRKVGLNVVRMNFSHGSYEYHQSVIDNAREAEKVQSGRPLAIALDTKGPEIRTGNTVGDKDIPIKAGHELNITTDEKYATACDDQNMYLDYKNITKVIEAGKLIYVDDGILSFQVLEVVDDKTLRVKCLNNGNISSRKGVNLPGTDVDLPALSEKDISDLKFGVKNKVDMIFASFIRRGSDIEHIRKVLGEEGKEIQIIAKIENQQGVNNFDEILEATDGVMVARGDLGIEIPAPKVFLAQKMMIAKCNMKGKPVICATQMLESMTYNPRPTRAEVSDVANAVLDGADCVMLSGETAKGNYPTEAVTMMSETCLLAEVATPHFQVFDELRNLVPRPTCTAESIAMAAVSASLELNAGAIVVLTTSGKTARLLSKYRPVCPILMVTRNPMAARYSHLYRGVWPFTFPETKPDFNVKIWQEDVDRRLKWGISHGLKLGLINKGDNIVCVQGWRGGMGHTNTVRIVPAEENLGLAE

SEQ ID NO: 200 - DNA, 1515 bp, Pichia stipitis CBS 6054
  CDS (1)..(1515): transl_table=12
atgtcgtcttcttctctcgcctggttgtcccaattgaacaccaccgacacccccgacaaggtgctccgtcgttcctccatcatcggaaccattggcccaaagaccaactctgtcgaagtcttggtcaagttgagaaaggccggtcttaacatcgtgagaatgaacttctcccacggctcgtacgagtaccaccagtcggtcatcgacaacgctaagaagtccgaagaagtgtatgttggccgtccactcgctattgccttggacaccaagggcccagaaattagaaccggtactaccgtggataatgtcgactatccaattccacctaaccacgaaatgatcttcaccaccgacgacgcctacaagaccaagtctgacgacaagatcatgtacatcgactacgccaacatcacaaaggtcattgaagtcggcagaatcatctacgttgatgatggtgttctttccttcgaagtgttggaaatcgttgacgaaaagaccttgaaggtcaagtccatcaacgctggtaaggtctgctcgcacaagggtgtcaacttgccaggtactgacgtcgacttgccagctttgtctgaaaaggacaaggccgacatccgttttggtgtcaagaacggtgtacacatgatctttgcttcgttcatcagaaccggggacgatatcaaggaaatcagaagagtacttggtgaagacggtaagcaaattcaaatcattgctaagatcgaaaaccaacagggtgtcaacaacttcgacgacatcttggctgaaaccgacggtgtcatggttgctagaggtgacttgggtattgaaattccagctcctcaagtttttgttgtgcaaaagcagttgattgctaagtgtaacttggctgctaagccagtcatctgtgccacccagatgttggagtctatgacttacaacccaagaccaaccagagccgaagtctccgatgtcggtaacgccatcttggatggtgctgactgtgtcatgttgtctggagaaaccgctaagggtgactacccattcgaagctgtttccatgatgcacaacactgccatcattgctgaaaaggctatctcttaccagtcgttgcacaacgaactcagagtcttggccaaaaagccaactcctacttccgaaacctgtgctgtagctgccgtttctgctgcctacgaacaggacgctaaggctatcgttgtcttgtccacttctggtttgagtgccagactcgtgtccaagtacaagccaaacgtgccaatcatgatggttaccagaaacgaaacatccgccagatactcccacttgtacagaggtgtgtatcctttcatctacaccaaggaaaaggttgctaactggcaagaagacgtcgaaaacagattgagatgggctgtttccgaagccattgagttgggtatcatccacaagggtgactctattgtcactgtgcagggttggactagaggttcaggtcactccaacactgtcagaatcgttcaagcttag

SEQ ID NO: 201 - protein, 504 aa, Pichia stipitis CBS 6054
MSSSSLAWLSQLNTTDTPDKVLRRSSIIGTIGPKTNSVEVLVKLRKAGLNIVRMNFSHGSYEYHQSVIDNAKKSEEVYVGRPLAIALDTKGPEIRTGTTVDNVDYPIPPNHEMIFTTDDAYKTKSDDKIMYIDYANITKVIEVGRIIYVDDGVLSFEVLEIVDEKTLKVKSINAGKVCSHKGVNLPGTDVDLPALSEKDKADIRFGVKNGVHMIFASFIRTGDDIKEIRRVLGEDGKQIQIIAKIENQQGVNNFDDILAETDGVMVARGDLGIEIPAPQVFVVQKQLIAKCNLAAKPVICATQMLESMTYNPRPTRAEVSDVGNAILDGADCVMLSGETAKGDYPFEAVSMMHNTAIIAEKAISYQSLHNELRVLAKKPTPTSETCAVAAVSAAYEQDAKAIVVLSTSGLSARLVSKYKPNVPIMMVTRNETSARYSHLYRGVYPFIYTKEKVANWQEDVENRLRWAVSEAIELGIIHKGDSIVTVQGWTRGSGHSNTVRIVQA

SEQ ID NO: 202 - DNA, 1584 bp, Ostreococcus lucimarinus CCE9901
  CDS (1)..(1584)
atgggactgtctcgaggggcgcgcacggggtcgtacgtcgatctgtcgaaggaagcgacgcgtccggggcagacggggatcttggataacggagacgcggcgtccgatgggacgttcaagtcgaagatcatctgcacgctcggaccggtgtcgcgaacggtggagattttggaggaaatgttgagggcggggatgtcggtcgcgcggttcaacttttcgcacggctcgcacgagtatcaccaggagacgttggataatttgcgcgcggcgtgcgcgaacacgggcattcattgcggggtgctgctcgataccaaggggccggagattcgcaccgggatgctcgcgtgcgggggaccggtgatgctcgaagcggggaaggagatcgtgctcaccacggactacgagttcaagggtagcgcggaaaagctcgcggtgtcgtatccggacttggccaaggacgtcaagcccggttcgaagattttgtgcgccgacggttccgtcaccttcaccgtgctcgagtgcgacgtcgccaagggcgaggtgcgatgccgcctcgaaaacagcgccaagctcggcgagcgcaagaacatgaacttgccgggcgtcaacgtgaacttgcccacgatcaccgagaaggatcgcctcgatttgatcgagtggggggtgaagaacaacgtcgacttcatcgccgcctcgttcgttcgcaagggaagcgacgtcgagtacattcgctccgttctcggcgacttcgcgaataaagtttccatcatctccaaggttgagaacatggagggcttagataactatgacgatattgtcgaaaagtccgacggcgtcatggtcgctcgcggcgacttgggtatggagattcgcatggaacaaatattcttggcgcaaaagcgcatgatcaagcggtgcaactacgcgggcaagcccgtagtgacggcgacgcaaatgctggagtccatgacgggtgccccgcgcccgacgcgcgcggaggccacggacgtggccaacgctattctcgacggtaccgacgccgtgatgctctccggggaaaccgccgcgggcaactacgccatcgacgcggtcaagtgcatggcgtccatctgtcgcgaagccgaagcgtacgtggacaacgtggcgagctatcaccaaatcctcgagcaacagccgattcctatgggcgtcgaagagtctttggcttcgtccgccgttcgtaccgcgcaaaaggtgcaagcctccatcattgtatgcctctctcgcaccggcacgacttctcgtttgatcgccaagtaccgcccggatgcgccaatcttatctgtgtgctacgctgaagaagccgatccggcgagtgttgcgcgccgctcgctcgtcagccgtggcattatcccggttatccaaccgccggagtggggtcaaggcaacgccatcgtcccgcaagaagtcatgcgtaacgccatcctctacgcccgtgatacgctgaagatcgtcaagcctggcgacgctgtcgtcggcgtgcaccgtctcttgggcgaagccatcttgaaggtcgtcgtctgcccagaaggtaacgccttctaa

SEQ ID NO: 203 - protein, 527 aa, Ostreococcus lucimarinus CCE9901
MGLSRGARTGSYVDLSKEATRPGQTGILDNGDAASDGTFKSKIICTLGPVSRTVEILEEMLRAGMSVARFNFSHGSHEYHQETLDNLRAACANTGIHCGVLLDTKGPEIRTGMLACGGPVMLEAGKEIVLTTDYEFKGSAEKLAVSYPDLAKDVKPGSKILCADGSVTFTVLECDVAKGEVRCRLENSAKLGERKNMNLPGVNVNLPTITEKDRLDLIEWGVKNNVDFIAASFVRKGSDVEYIRSVLGDFANKVSIISKVENMEGLDNYDDIVEKSDGVMVARGDLGMEIRMEQIFLAQKRMIKRCNYAGKPVVTATQMLESMTGAPRPTRAEATDVANAILDGTDAVMLSGETAAGNYAIDAVKCMASICREAEAYVDNVASYHQILEQQPIPMGVEESLASSAVRTAQKVQASIIVCLSRTGTTSRLIAKYRPDAPILSVCYAEEADPASVARRSLVSRGIIPVIQPPEWGQGNAIVPQEVMRNAILYARDTLKIVKPGDAVVGVHRLLGEAILKVVVCPEGNAF

SEQ ID NO: 204 - DNA, 1719 bp, Ostreococcus lucimarinus CCE9901
  CDS (1)..(1719)
atgggactgaacgcgcgaaactcgagcgtggatcccatcgtgcacgatgacgcgcgaggggacgagaaacgacggcggacggtggccttggcggggctgtcgagccagcgagcgctgagcgcgctggcgagcaaaggatcggtcggggattggcgcgcggcgcacgtgctggagaacgggggggaggcgagcgaggactatgcgtttaacgacagcgaggcggcgtttcgggcgaaagactcgcagaggattgggttcaagtcgaagatcatctgcacgctcggaccggtgtcgcgaacggtggagattttggaggaaatgttgagggcggggatgtcggtcgcgcggttcaacttttcgcacggctcgcacgagtatcaccaggagacgttggataatttgcgcgcggcgtgcgcgaacacgggcgtcgattgcggggtgctgctcgataccaaggggccggagattcgcaccgggatgctcgcgtgcgggggaccggtgatgctcgaagcggggaaggagatcgtgctcaccacggactacgagttcaagggtagcgcggaaaagctcgcggtgtcgtatccggacttggccaaggacgtcaagcccggttcgaagattttgtgcgccgacggttccgtcaccttcaccgtgctcgagtgcgacgtcgccaagggcgaggtgcgatgccgcctcgaaaacagcgccaagctcggcgagcgcaagaacatgaacttgccgggcgtcaacgtgaacttgcccacgatcaccgagaaggatcgccacgatttgatcgagtggggggtgaagaacaacgtcgacttcatcgccgcctcgttcgttcgcaagggaagcgacgtcgagtacattcgctccgttctcggcgacttcgcgaataaagtttccatcatctccaaggttgagaacatggagggcttagataactttaacgacatcgtcgaaaagtccgacggcgtcatggtcgctcgcggcgacttgggtatggagattcgcatggaacaaatattcttggcgcaaaagcgcatgatcaagcggtgcaacttggcgggtaagcccgtcgtgacggcgacgcaaatgttggaatccatgacgggtgccccgcgcccgacgcgcgcggaggccacggacgtggccaacgctattctcgacggtaccgacgccgtgatgctctccggggaaaccgccgcgggcaactacgccatagacgcggtcaagtgcatggcgtccatctgtcgcgaagccgaagcgtacgtcgatgacgtcgcgagctatttccaaattctcgagcagcaagtgatcccgctcggcatcaccgaagccttggcttcgtccgccgttcgtaccgcgcaaaaggtgaacgccgcgctcatcgttacgttgtctcgcaccggtcacacggcgcaaatgatcgccaagtatcgacccgagactcgcatcgtgaacgtttgcatcgaagagcccgatcaccaaggtcgcgctcttgacgtcgtgcaccgctcgctcatcacgcgcggcctcgtacctctcttggagaacccggcgtggcgcggcgagagcggccacccgcaagaagtcatgcgcaacgccatcgtacactgccgcgacattttaggtttagtgaaaccgggcgacgccatcgtcggcgtccatcgcatcatgggcgaggccgtgcttaaagtcatcatcgttcccgaataa

SEQ ID NO: 205 - protein, 572 aa, Ostreococcus lucimarinus CCE9901
MGLNARNSSVDPIVHDDARGDEKRRRTVALAGLSSQRALSALASKGSVGDWRAAHVLENGGEASEDYAFNDSEAAFRAKDSQRIGFKSKIICTLGPVSRTVEILEEMLRAGMSVARFNFSHGSHEYHQETLDNLRAACANTGVDCGVLLDTKGPEIRTGMLACGGPVMLEAGKEIVLTTDYEFKGSAEKLAVSYPDLAKDVKPGSKILCADGSVTFTVLECDVAKGEVRCRLENSAKLGERKNMNLPGVNVNLPTITEKDRHDLIEWGVKNNVDFIAASFVRKGSDVEYIRSVLGDFANKVSIISKVENMEGLDNFNDIVEKSDGVMVARGDLGMEIRMEQIFLAQKRMIKRCNLAGKPVVTATQMLESMTGAPRPTRAEATDVANAILDGTDAVMLSGETAAGNYAIDAVKCMASICREAEAYVDDVASYFQILEQQVIPLGITEALASSAVRTAQKVNAALIVTLSRTGHTAQMIAKYRPETRIVNVCIEEPDHQGRALDVVHRSLITRGLVPLLENPAWRGESGHPQEVMRNAIVHCRDILGLVKPGDAIVGVHRIMGEAVLKVIIVPE

SEQ ID NO: 206 - DNA, 1515 bp, Pichia guilliermondii ATCC 6260
  CDS (1)..(1515): transl_table=12
atgtcccacgctgctttaacttggcttacctgcctcaacaccactgagactccagacaaagtgctccgtcgttcctcaattatcggtaccattggtcctaagaccaactctgccgaagtgatggtcaagttgagaaaagccggtcttaacattgtgagaatgaacttctctcatggatcgcacgagtatcaccagtcggtcattgacaacgccagaaagtcggaggagttgtatcctggtagaccattggccattgccttggataccaagggtcctgagatccgtactggtaccaccgtgggagagaaggattacccaattcttccaaaccacgaaatgattatcactactgacgatgagtacgcgaagaaatgtgacgacaaaatcatgtacgtcgactacaagaacattactaaggtcatcgagactggaaagatcatatatgtagatgatggtgtgctttcgtttgaagttgctgaagttgttgactccaagaccttgaaggtcagatctgtcaatgccggttccatctcgtctcacaagggtgtcaacctccctggcaccgacgttgatcttcctgctctttctgaaaaggacaagaacgatatcagattcggtgtcaagaacggcgtccacatgatcttcgcttcgtttattcgttccggagacgatatcaaggccattcgtgaagtccttggtgaagatggaaaggatattcagatcattgccaagatcgagaaccaacaaggtgtgaacaactttgatgatatccttgccgagaccgacggtgtcatggtggccagaggtgacttgggtattgagattccagctcctcaagtgttcgtcgttcaaaagcagttgattgccaaatgtaacttggctgctaagcctgtaatttgtgctacccaaatgttggagtccatgacctacaacccaagaccaaccagagccgaagtcagtgacgtcggtaacgctatcttggatggtgctgactgtgtcatgttgtctggtgaaactgccaagggtaactacccatttgaggccgtctcgatgatgcacaacactgctatcattgctgaaaaggctattgcttaccagccattgcacaatgaaatcagagctttggccaagaaacctactcctaccaccgaaacttgtgcaattgctgctgtttccgctgcctacgagcaagatgccaaggccattgtcgtcttatctacttctggtttgacttcaagactcgtgtccaaatacaagcctaatgttccaattatgatggttaccagaaacgagagagctgctaggtattgtcacttgtacagaggtgtctaccccttcgtgtacactaagggtaaggttgaaaactggcaagaggatgtagagaacagattgagatgggctgtttcggaagccatcgatttgggtattatcaagaagggcgactcaattgttactattcaaggatggactagaggctctggtcactccaacaccgtcagagtcgttcaagcttag

SEQ ID NO: 207 - protein, 504 aa, Pichia guilliermondii ATCC 6260
MSHAALTWLTCLNTTETPDKVLRRSSIIGTIGPKTNSAEVMVKLRKAGLNIVRMNFSHGSHEYHQSVIDNARKSEELYPGRPLAIALDTKGPEIRTGTTVGEKDYPILPNHEMIITTDDEYAKKCDDKIMYVDYKNITKVIETGKIIYVDDGVLSFEVAEVVDSKTLKVRSVNAGSISSHKGVNLPGTDVDLPALSEKDKNDIRFGVKNGVHMIFASFIRSGDDIKAIREVLGEDGKDIQIIAKIENQQGVNNFDDILAETDGVMVARGDLGIEIPAPQVFVVQKQLIAKCNLAAKPVICATQMLESMTYNPRPTRAEVSDVGNAILDGADCVMLSGETAKGNYPFEAVSMMHNTAIIAEKAIAYQPLHNEIRALAKKPTPTTETCAIAAVSAAYEQDAKAIVVLSTSGLTSRLVSKYKPNVPIMMVTRNERAARYCHLYRGVYPFVYTKGKVENWQEDVENRLRWAVSEAIDLGIIKKGDSIVTIQGWTRGSGHSNTVRVVQA

SEQ ID NO: 208 - DNA, 1515 bp, Lodderomyces elongisporus NRRL YB-4239
  CDS (1)..(1515)
atgtcacactcttcattaacatggttgtccaacttgaaccttgagcagactcctcacaaatacttgagaagatcctccatcattggtactattggaccaaaaaccaacaatgttgatgtcttggtcaagttgagaaaagctggtttgaacattgtcagaatgaacttttcccacggttcttatgaataccaccaatctgtcattgacaatgctagaaaatccgaagaggtttacaaaggtagaccattggccattgccttggacaccaagggtccagaaattagaactggtaccacaattgatgaaaaagactacccaatcccaccaaaccaccaaatgatcttcaccactgatgacgcctacaaactcaaatgtaacgatgagattatgtacattgactacaaaaacattacaaaggttatctcccctggtaaaatcatctacgttgatgacggtgtcttgtcctttgaagttgaatccgtcgaagatgacaacactttgaaggttagatccatcaatggtggtaagatttcatcccacaagggtgtcaacttgccaggaactgatgtcgacttgcctccattatccgaaaaggataaggccgatatcagattcggtgttaagaacaaggtccacatgatctttgcttcatttatcagatcagcagatgacattagacacattagagaagttttgggtgaggatggaaaagaaatccaaatcattgccaagattgaaaaccaacaaggtgtcaacaactttgacgagattttggaagtcaccgatggtgttatggttgccagaggagacttgggtatcgagatcccagctcctcaagtgtttatcgtgcaaaagaaattgattgctaaatgtaacttggctgctaaaccagttgtctgtgctactcaaatgttggagtcaatgacctacaacccaagaccaacaagagctgaagtttcagatgttggtaacgccatcttagacggtgctgattgtgtgatgttgtctggtgaaacagccaaaggtgactacccattcgaagccgtgtcaatgatgcacaacacctgtcttattgcagaaaaggcaattgcatacccacaattattcaacgaattgagatcattggccgtcaagccaacctcaaccaccgaaacctgtgcaatggctgccgttgccgctgcatacgaccaagacgccaaggccattgtcgttctttcaacttcaggtcactcagcaagatacgtctccaagtacaagccagatgttccaatcttgatggtcactagaaacgaaaacagtgccaaatactcacacttgtatagaggtgtctacccattcgtgtacaagaaggacagattaccaaactggcaagaggatgtcgagagcagattgagatgggctgtctccgaagcagttgacttgggaattatcgccaagggtgactccattgtcactgtgcaaggatggaccagaggttctggacactccaacactgtgagaatcgtccaagcttaa

SEQ ID NO: 209 - protein, 504 aa, Lodderomyces elongisporus NRRL YB-4239
MSHSSLTWLSNLNLEQTPHKYLRRSSIIGTIGPKTNNVDVLVKLRKAGLNIVRMNFSHGSYEYHQSVIDNARKSEEVYKGRPLAIALDTKGPEIRTGTTIDEKDYPIPPNHQMIFTTDDAYKLKCNDEIMYIDYKNITKVISPGKIIYVDDGVLSFEVESVEDDNTLKVRSINGGKISSHKGVNLPGTDVDLPPLSEKDKADIRFGVKNKVHMIFASFIRSADDIRHIREVLGEDGKEIQIIAKIENQQGVNNFDEILEVTDGVMVARGDLGIEIPAPQVFIVQKKLIAKCNLAAKPVVCATQMLESMTYNPRPTRAEVSDVGNAILDGADCVMLSGETAKGDYPFEAVSMMHNTCLIAEKAIAYPQLFNELRSLAVKPTSTTETCAMAAVAAAYDQDAKAIVVLSTSGHSARYVSKYKPDVPILMVTRNENSAKYSHLYRGVYPFVYKKDRLPNWQEDVESRLRWAVSEAVDLGIIAKGDSIVTVQGWTRGSGHSNTVRIVQA

SEQ ID NO: 210 - DNA, 1584 bp, Sclerotinia sclerotiorum 1980
  CDS (1)..(1584)
atggccactgcaatggatcacttaagtactggaacatccaaggtttcttggttggcgaacctcaacactgagttcaagcctaccaagaactatcgccgtacctcaattatttgcaccatcggtcccaagaccaattctgttgaggctctcaacaagctccgtatcgctggtctcaatgtcgttcgcatgaacttctcccatggttcatacgaataccatcaatccgttattgacaacactcgtgaagctgagagagttcaagctggtcgtcaactcgctatcgctttagatacaaagggtccagaaattagaactggtagcacagttggtcatgctgatatccctatctctattggatcagagatcaacattacaaccgatgacaagtatgctactgcttgtgatgacaagaacatgtacctcgactacaagaatatcaccaaggttatcgagccaggacgtatcatctacgtcgatgatggtgttctcgcatttgatgttttggagattgttgatgacaagaccattcgttgccgcgcaagaaacaacggaaagatctcttccaacaagggtgtcaaccttccaaacactgatgtcgatctccctgctttatctgagaaagatcaagcagatttgagatttggtgtcaagaacaatgtcgatatggtcttcgcctcattcatccgtcgtggtgaggatatcacggccatccgtaaagttctcggtgaagatggaaagcacattcaaatcatcgctaagattgagaacagacaaggtcttaacaacttcgctgagatcttgaaggagaccgatggtgtcatggttgctcgtggtgatttgggtattgagatcccagctgctgaagttttcgctgctcaaaagaagatgattgctatgtgcaatatggccggaaagccagtcatctgtgctactcaaatgctcgagtctatgattcttaacccaagaccaacccgtgctgagatcagtgatgttggtaatgctgtcaccgatggtgctgactgtgttatgttgtctggagagactgccaagggaaactatcctaatgaggccgttaacgagatgcacgaatgttgcttgagcgccgagaactctatcgcatatgtctctcacttcgaggaactttgcaaacttgccgaacgtccagtcagcgttgttgaatcatgcgccatgtctgccgtccgtgccagtttggatatcaatgcaggcgccatcattgtcttgtccaccagtggagagagcgcacgtcttctctccaagtacagaccagtctgccctatcttcatggtaacccgaaatgccagcgcatccagatacggtcacttgtaccgtggtgtctatcctttccactttgctgaggagaagccagacttctccaaggttaactggcaagaggatgttgacagaagaatcaagtggggtatcgctgaggctatgaagcttaagatcttggcccagggtgagagcgtcgtcgttgttcaaggatggaagggtggtatgggtaacaccaacactctccgtgttatcaaggctgagccagagaaccttggtttgggacaactttaa

SEQ ID NO: 211 - protein, 527 aa, Sclerotinia sclerotiorum 1980
MATAMDHLSTGTSKVSWLANLNTEFKPTKNYRRTSIICTIGPKTNSVEALNKLRIAGLNVVRMNFSHGSYEYHQSVIDNTREAERVQAGRQLAIALDTKGPEIRTGSTVGHADIPISIGSEINITTDDKYATACDDKNMYLDYKNITKVIEPGRIIYVDDGVLAFDVLEIVDDKTIRCRARNNGKISSNKGVNLPNTDVDLPALSEKDQADLRFGVKNNVDMVFASFIRRGEDITAIRKVLGEDGKHIQIIAKIENRQGLNNFAEILKETDGVMVARGDLGIEIPAAEVFAAQKKMIAMCNMAGKPVICATQMLESMILNPRPTRAEISDVGNAVTDGADCVMLSGETAKGNYPNEAVNEMHECCLSAENSIAYVSHFEELCKLAERPVSVVESCAMSAVRASLDINAGAIIVLSTSGESARLLSKYRPVCPIFMVTRNASASRYGHLYRGVYPFHFAEEKPDFSKVNWQEDVDRRIKWGIAEAMKLKILAQGESVVVVQGWKGGMGNTNTLRVIKAEPENLGLGQL

SEQ ID NO: 212 - DNA, 1656 bp, Nasonia vitripennis
  CDS (1)..(1656)
atggtctggataaccgccgacgataagatggctggcaagccgaactttaccgcccagaacgcccagagtcatctcgaccacatgtgcgctctcgacatcgactctcacaccctcttcacccggctctccggcatcatctgcacgatcggaccggtctcccgttccgtcgagatgctggagcagatgatcgagaccggcatgaacgtcgcccgcatgaacttcagccacggctcgcacgagtaccacgcggagacgatcgccaacgtccgccaggcccagaagaatctcaccgaaaagaatggcttctgtgtaccagttgctattgcacttgacaccaagggacccgagatccgtactggcctcctcgaagggggtggctctgctgaagtcgaactgaagaagggccagaccttcaagttaacgacggacaaagcctacgcggagaaaggcaatgctgacaccgtctatgtcgactacgccaacatatctaaagttttgcaaaagggaaacagagtgtatgtcgacgatggcttgatgtcgttgatcgtcactggagtcagcgacaataccattacaacgactgtcgagaatggtggaactcttggctcgcgcaagggtgtcaatcttccgggagtcccagtcgacttgccagctgtctccgagaaggacaagtctgacttgcagttcggcgttgagcaagaggtcgacatgatttttgcgtccttcattcgtaacgctgctgctcttactgagattcgctctatccttggcgacaagggtaagaacattaaaatcatctcgaagatcgagaaccagcagggtatgaccaaccttgacgagatcattgaggcttctgacggtatcatggttgctcgtggtgatctgggtatcgagatcccacctgagaaggtgttccttgcccagaagtgcatgattagccgatgcaacaaggttggcaagcctgttatctgcgctactcagatgcttgagtctatggtgaagaaacctcgcgccaccagagccgagtcctccgatgtggctaatgctattcttgatggagccgattgcgttatgctttccggtgaaaccgccaagggagagtacccgttggaatgcgtgcgcacgatggctaatatctgcaaggaagcggaggctgtgatttggcaaaatcagctcttcgctgatctgtccaacaaggctgtgcctccgattgatgcgacgcacgcagtggctatcgcatctgtcgaagcggctgccaagtgtctcgctagtgccatcatagttatcaccacttctggtcggtctgcgcacttgatctccaagtacaggccacgctgccctattattgcggtcacgaggttccaccaggttgctcggcaagcgcatctttacagaggcattcttcctctccactacacagaggctccattatctgactggcttaaggatgttgatatccgtgtacaatatggtttaaactttggcaaaggtcgtggtttcgtacgaactggagattccgtcgtgattgttactggctggaagcagggctctggctttacgaatactttacgcattgtgtacgtagatccagaatttttagttgaacagacttgtgatatagttagtgattctgattcttacgaagatctttactag

SEQ ID NO: 213 - protein, 551 aa, Nasonia vitripennis
MVWITADDKMAGKPNFTAQNAQSHLDHMCALDIDSHTLFTRLSGIICTIGPVSRSVEMLEQMIETGMNVARMNFSHGSHEYHAETIANVRQAQKNLTEKNGFCVPVAIALDTKGPEIRTGLLEGGGSAEVELKKGQTFKLTTDKAYAEKGNADTVYVDYANISKVLQKGNRVYVDDGLMSLIVTGVSDNTITTTVENGGTLGSRKGVNLPGVPVDLPAVSEKDKSDLQFGVEQEVDMIFASFIRNAAALTEIRSILGDKGKNIKIISKIENQQGMTNLDEIIEASDGIMVARGDLGIEIPPEKVFLAQKCMISRCNKVGKPVICATQMLESMVKKPRATRAESSDVANAILDGADCVMLSGETAKGEYPLECVRTMANICKEAEAVIWQNQLFADLSNKAVPPIDATHAVAIASVEAAAKCLASAIIVITTSGRSAHLISKYRPRCPIIAVTRFHQVARQAHLYRGILPLHYTEAPLSDWLKDVDIRVQYGLNFGKGRGFVRTGDSVVIVTGWKQGSGFTNTLRIVYVDPEFLVEQTCDIVSDSDSYEDLY

SEQ ID NO: 214 - DNA, 1671 bp, Nematostella vectensis
  CDS (1)..(1671)
atgtctgcaaaaggagcacgtgaagagtatcttcatgacgtcctcaacagacacaaacaatggatatcttcacgagcaagatcaaacttggaattccggtctgaactagacatagacaagcacccactgactatcagaaattctggcgtggtctgcactattggtcccgcatccagatcagttgagattgttgcccagctcattgagaatggcatgaacattgcccgcctaaatttttcccatgggacacatgagtatcatagggaaacaatcatgaatatccgccgggcagctctccttgagtggcctcatgcagtgggcattgccctagataccaagggacctgagatcaggacaggtcttctaaaggcaggagaaatcaagttagaaaaaggccagaagctaaaggtttccactgacaaagccatgtatgaccaaggacatactgagtgcatctttgttgactatgagaacattgtgaaggttgttcaaatcggagggactgtgtatgttgatgatggccttatttcactcaaggttttggaaaagggtgataacttcttaataactgaagtcttgaatgatgcattacttggaagtaagaagggtgtcaacctgccaaattgtgctgtagatctcccagccgtctctgaacaagacaagaaggacattgcatttgctgtggaaatggaagtggatatgatctttgcatcatttatccgcaaaccagaggatattgcagaaattcgtaagttgcttgaaaagcacgccaagaacataaagattgtggccaagattgaaaatcacgagggcgttcgaaggttcaacgagatcctggaggttgctgatggcatcatggttgccaggggagaccttggaattgagatccctgcagaaaaggttttcctggcacagaagatgatgattgctcgctgtaacatgaagggggtacctgtaatctgtgccacacagatgctggagagcatggttcagaatcctcgcccaacccgtgccgagacgtctgacgtggcgaacgctattctagatggtgccgactgcgtcatgctctcaggagagactgccaaaggcctatatcccgtacaagctgttgccatgatgcaccgcatcagtcgagaggctgaagcggcaatcttccacaagcagtcatttgacgaactgcgacacaacttggagggctatgctgacacgcatatatccacagctatagccgctgtggcagcatccttcactgcaggcgctgatgctatcatttgtctgacacacactggaagaactgctgctgtagtagcgcgattccggccccgatgccctatcgtggtggtgacacgtgaccctagagtggcgcgccagatgcacttatggaggggctgtttcccgatcgtctacgaccaggaaccgcttgacaacgttctcgaggagcacgatcaaaggctggacttcgccttgggcatgggtaagaagatgggtttcctaaccatcggtagcaccttcgttttcgtgtccggatggaagagtggtgccgcccacaccaacaccctccgcatcctgactctcactcaagagaagatccacatcgcgcgcagtttgtccgagtcggcagaccctaccggcaagacccacaacgaagaacaggaagatattgatggttag

SEQ ID NO: 215 - protein, 556 aa, Nematostella vectensis
MSAKGAREEYLHDVLNRHKQWISSRARSNLEFRSELDIDKHPLTIRNSGVVCTIGPASRSVEIVAQLIENGMNIARLNFSHGTHEYHRETIMNIRRAALLEWPHAVGIALDTKGPEIRTGLLKAGEIKLEKGQKLKVSTDKAMYDQGHTECIFVDYENIVKVVQIGGTVYVDDGLISLKVLEKGDNFLITEVLNDALLGSKKGVNLPNCAVDLPAVSEQDKKDIAFAVEMEVDMIFASFIRKPEDIAEIRKLLEKHAKNIKIVAKIENHEGVRRFNEILEVADGIMVARGDLGIEIPAEKVFLAQKMMIARCNMKGVPVICATQMLESMVQNPRPTRAETSDVANAILDGADCVMLSGETAKGLYPVQAVAMMHRISREAEAAIFHKQSFDELRHNLEGYADTHISTAIAAVAASFTAGADAIICLTHTGRTAAVVARFRPRCPIVVVTRDPRVARQMHLWRGCFPIVYDQEPLDNVLEEHDQRLDFALGMGKKMGFLTIGSTFVFVSGWKSGAAHTNTLRILTLTQEKIHIARSLSESADPTGKTHNEEQEDIDG

SEQ ID NO: 216 - DNA, 1506 bp, Vanderwaltozyma polyspora DSM 70294
  CDS (1)..(1506)
atgatgcaatctagattaggtagattgactactttgtcctgtgacactaacaaccaattgagaagaactgccatcattggtaccattggtccaaagaccaacaacccagaaaccttggttgctttgagaaaggctggtttgaacgttgttagaatgaacttctctcacggttcttacgaataccaccaatctgtcattgacaacgccagaaaatctgaagaattatacccaggtagaccattggctattgctttagacaccaagggtccagaaatcagaatgggtaccccgtcaagaagttggcttcccatcccacccaaacccggaatgattttccctaccgatgacaaaattgccaaggcttgggatgacaagatcattttcgtcgactacaagaacatccccaaggttatctccaagggtaagatcatctacgtcgatgacggtgttttgtctttcgaagttttggaagtcgttgacaaccaaaccttgaaggttaagtccatgaacgctggtaagatctgttcccacaagggtgttaacttaccaggtaccgatgtcgatttaccagctttgtctgaaaaggacgctgctgatttgaaattcggtgtcaagaacggtgttcacatggtcttcgcttctttcatcagaaccgctcaagatgtcttacacatcagagaagttttaggtgaagaaggtaaggacatcaagatcatctgtaagattgaaaaccaacaaggtgttaacaacttcgatgaaatcttgaaggtcactgacggtgttatggttgctagaggtgatttaggtattgaaatcccagctccagaagtcttagctgtccaaaagaaattgattgctaagtgtaacttggccggtaagccagttatctgtgctacccaaatgttggaatctatgacttacaacccaagaccaaccagagctgaagtttctgatgtcggtaacgctatcttggatggtgctgactgtgtcatgttgtccggtgaaaccgctaaaggtaactacccaattaacgctgttaccaccatggctgaaactgctttgattgctgaattagccatcgcttacttgccaaactacgatgacttgagaaactgtactccaaagccaacttctaccactgaaactgttgctgcttccgctgtcgctgctgttttcgaacaaaaggctaaggctatcattgtcttgtctacctccggtactaccgccagattggtttctaagtacagaccagactgtccaattatcttggttaccagaaacccaagagctgctagattctctcacttgtacagaggtgtcttcccattcgtcttcgaaaaggctgaaggttctgactggactcaagatgttgacgaacgtttgaagttcggtatgcaaaaggctaaggacatgggtgtcttggctgacggtgatgctgttgttaccgttcaaggtttcaagagtggtgaaggtcactctaacaccatgagagttaccattgtttaa

SEQ ID NO: 217 - protein, 501 aa, Vanderwaltozyma polyspora DSM 70294
MMQSRLGRLTTLSCDTNNQLRRTAIIGTIGPKTNNPETLVALRKAGLNVVRMNFSHGSYEYHQSVIDNARKSEELYPGRPLAIALDTKGPEIRMGTPSRSWLPIPPKPGMIFPTDDKIAKAWDDKIIFVDYKNIPKVISKGKIIYVDDGVLSFEVLEVVDNQTLKVKSMNAGKICSHKGVNLPGTDVDLPALSEKDAADLKFGVKNGVHMVFASFIRTAQDVLHIREVLGEEGKDIKIICKIENQQGVNNFDEILKVTDGVMVARGDLGIEIPAPEVLAVQKKLIAKCNLAGKPVICATQMLESMTYNPRPTRAEVSDVGNAILDGADCVMLSGETAKGNYPINAVTTMAETALIAELAIAYLPNYDDLRNCTPKPTSTTETVAASAVAAVFEQKAKAIIVLSTSGTTARLVSKYRPDCPIILVTRNPRAARFSHLYRGVFPFVFEKAEGSDWTQDVDERLKFGMQKAKDMGVLADGDAVVTVQGFKSGEGHSNTMRVTIV

SEQ ID NO: 218 - DNA, 1560 bp, Aedes aegypti
  CDS (1)..(1560)
atggcagagggtcgcaagatgaatcccgaatcggtttcccacctggagcacatgtgctcgctggacattgactcgcagacggcgttcgtgcgtctgtccggcatcatctgtaccatcggaccggcctccgttgcaccggagatgctggagaagatgatggccaccgggatgaacattgcccggttgaacttctcgcacggttcgcacgaataccacgccaacacgatcaagaacatccgcgaggccgtcgataactactcgaagaagcagggcaagccgttcccgctggccatcgctctggacaccaagggtccggaaatccgtactgggctgatcgagggcagcggcaccggcgaggttgagctgaagaagggcgaacagatccagctgacgaccgacaaggatcatctggagaagggaagcaaggacaagatcttcgtcgactacgttaacatcgtcaaggttgtcaagaagggcgatcgggtgttcgtcgacgatggtctgatctcgctggtggttgacagtattagcggagacactctgacctgtacggttgagaacggtggtttgctgggatcgcgtaagggcgttaacctgcccggagtcccagttgatctgccggccgtctccgaaaaggacaagtccgatctgcagttcggcgttgaacagggtgttgatgtgattttcgcttccttcatccgtaatgccgcggcattgaaggaaatccgtaccattctcggagagaagggtaagaacatcaagatcatctcgaagatcgagaaccagcagggtatgcagaacttggatgccatcattgctgcctcggacggtattatggttgcccgtggtgatctgggtatcgaaatcccagcggagaaggtcttcctggcccagaagtcgatgatcgctcggtgcaaccgtgccggcaagcccgtcatctgcgccacccaaatgttggagtccatgatcaagaagccacgcccaacccgcgccgaaatttccgatgttgccaacgccatcatcgacggtgctgactgcgtaatgctgtccggtgaaactgccaagggcgagtacccattggagtgtgtgttgaccatggccaagacctgcaaggaagccgaagctgccctctggcatcgcaacctgttcaacgatctggtcaacacgacccccactccgctggacacggccagttcgattgcgatcgctgcctcggaagcggctgccaagagccgcgctgctgccgtcattgtcattacgacctcaggccgttcggctcatctcatctccaagtaccggccccgctgcccgatcattgccgttacccggttcgcgcaaaccgctcgccagtgccatctgtaccgaggcatcctgcccgtgatctatgaacaacaagccctggaagactggctgaaggatgtcgatgctcgcgtccagtacggcatggatttcggcaaggaacgcggcttcctgaagccgggcaacccagtggtcgtcgtcaccggctggaagcagggctccggcttcaccaacaccattcgcattgtgaatgtcgaataa

SEQ ID NO: 219 - protein, 519 aa, Aedes aegypti
MAEGRKMNPESVSHLEHMCSLDIDSQTAFVRLSGIICTIGPASVAPEMLEKMMATGMNIARLNFSHGSHEYHANTIKNIREAVDNYSKKQGKPFPLAIALDTKGPEIRTGLIEGSGTGEVELKKGEQIQLTTDKDHLEKGSKDKIFVDYVNIVKVVKKGDRVFVDDGLISLVVDSISGDTLTCTVENGGLLGSRKGVNLPGVPVDLPAVSEKDKSDLQFGVEQGVDVIFASFIRNAAALKEIRTILGEKGKNIKIISKIENQQGMQNLDAIIAASDGIMVARGDLGIEIPAEKVFLAQKSMIARCNRAGKPVICATQMLESMIKKPRPTRAEISDVANAIIDGADCVMLSGETAKGEYPLECVLTMAKTCKEAEAALWHRNLFNDLVNTTPTPLDTASSIAIAASEAAAKSRAAAVIVITTSGRSAHLISKYRPRCPIIAVTRFAQTARQCHLYRGILPVIYEQQALEDWLKDVDARVQYGMDFGKERGFLKPGNPVVVVTGWKQGSGFTNTIRIVNVE

SEQ ID NO: 220 - DNA, 1542 bp, Aedes aegypti
  CDS (1)..(1542)
atgaatcccgaatcggtttcccacctggagcacatgtgctcgctggacattgactcgcagacggcgttcgtgcgtctgtccggcatcatctgtaccatcggaccggcctccgttgcaccggagatgctggagaagatgatggccaccgggatgaacattgcccggttgaacttctcgcacggttcgcacgaataccacgccaacacgatcaagaacatccgcgaggccgtcgataactactcgaagaagcagggcaagccgttcccgctggccatcgctctggacaccaagggtccggaaatccgtactgggctgatcgagggcagcggcaccggcgaggttgagctgaagaagggcgaacagatccagctgacgaccgacaaggatcatctggagaagggaagcaaggacaagatcttcgtcgactacgttaacatcgtcaaggttgtcaagaagggcgatcgggtgttcgtcgacgatggtctgatctcgctggtggttgacagtattagcggagacactctgacctgtacggttgagaacggtggtttgctgggatcgcgtaagggcgttaacctgcccggagtcccagttgatctgccggccgtctccgaaaaggacaagtccgatctgcagttcggcgttgaacagggtgttgatgtgattttcgcttccttcatccgtaatgccgcggcattgaaggaaatccgtaccattctcggagagaagggtaagaacatcaagatcatctcgaagatcgagaaccagcagggtatgcagaacttggatgccatcattgctgcctcggacggtattatggttgcccgtggtgatctgggtatcgaaatcccagcggagaaggtcttcctggcccagaagtcgatgatcgctcggtgcaaccgtgccggcaagcccgtcatctgcgccacccaaatgttggagtccatgatcaagaagccacgcccaacccgcgccgaaatttccgatgttgccaacgccatcatcgacggtgctgactgcgtaatgctgtccggtgaaactgccaagggcgagtacccattggagtgtgtgttgaccatggccaagacctgcaaggaagccgaagctgccctctggcatcgcaacctgttcaacgatctggtcaacacgacccccactccgctggacacggccagttcgattgcgatcgctgcctcggaagcggctgccaagagccgcgctgctgccgtcattgtcattacgacctcaggccgttcggctcatctcatctccaagtaccggccccgctgcccgatcattgccgttacccggttcgcgcaaaccgctcgccagtgccatctgtaccgaggcatcctgcccgtgatctatgaacaacaagccctggaagactggctgaaggatgtcgatgctcgcgtccagtacggcatggatttcggcaaggaacgcggcttcctgaagccgggcaacccagtggtcgtcgtcaccggctggaagcagggctccggcttcaccaacaccattcgcattgtgaatgtcgaataa

SEQ ID NO: 221 - protein, 513 aa, Aedes aegypti
MNPESVSHLEHMCSLDIDSQTAFVRLSGIICTIGPASVAPEMLEKMMATGMNIARLNFSHGSHEYHANTIKNIREAVDNYSKKQGKPFPLAIALDTKGPEIRTGLIEGSGTGEVELKKGEQIQLTTDKDHLEKGSKDKIFVDYVNIVKVVKKGDRVFVDDGLISLVVDSISGDTLTCTVENGGLLGSRKGVNLPGVPVDLPAVSEKDKSDLQFGVEQGVDVIFASFIRNAAALKEIRTILGEKGKNIKIISKIENQQGMQNLDAIIAASDGIMVARGDLGIEIPAEKVFLAQKSMIARCNRAGKPVICATQMLESMIKKPRPTRAEISDVANAIIDGADCVMLSGETAKGEYPLECVLTMAKTCKEAEAALWHRNLFNDLVNTTPTPLDTASSIAIAASEAAAKSRAAAVIVITTSGRSAHLISKYRPRCPIIAVTRFAQTARQCHLYRGILPVIYEQQALEDWLKDVDARVQYGMDFGKERGFLKPGNPVVVVTGWKQGSGFTNTIRIVNVE

SEQ ID NO: 222 - DNA, 1548 bp, Caenorhabditis briggsae AF16
  CDS (1)..(1548)
atgtatcaagacgatcatattggttcggagcactcaactgcaacaactaatatttcgcatttgtgcggtttacgtatttctgaaagaccacaaaaaacaagaaaaactggagttatttgtaccataggtccagcatgcagcgatgtggagactctcagaaaaatgatcaatactggcatgaacatcgccagattgaacttctcccacggaagtcatgaggcccacgcagctactattaaaacaatcagaaaagctgcaaaagatgctccattcccagtcgccattgctcttgatacgaagggaccagaaattcgtaccggaatgtttgccaacaatgccaaagaagtcatcttagagaatgggaaaagtatccgagtatcgacggatccttcaatggagttttcggctactgcctttaatatctatgctgactacaagaacttaccaaaagttgtgactccaggatccagaatttatatcgatgatggacttatctcgttgattgttgatagttgtgaagagaatgcagttgtatgtactatcgaaaatggaggagccctcggaacacgaaaaggagtcaatctgccaggaactgttgttgatttgccagccgtcacttcgaaggatattgaagatttgttgtttggagttgagcaaggaattgatattattttcgcttctttcatcagaaatggcgaaggaatccagaaaattagacaagtgttgggagaaaaaggaaaacacatctacatcattgctaaaatcgaatctgaagatggtgtgatcaatgctgatgaaatcattgaagcatctgatggagtgatggttgcccgtggagatcttggaatcgaaatcccacccgagaaagttttcctagctcaaaaaatgctcattgcaaagtgcaatcttgctggaaaaccagtgatttgtgcaacccaaatgttggaaagtatgatcagtaagcctcgtccaaccagagcagaatgcagtgatgtggcaaatgcggtgctggatggagtcgattgtgtgatgttgagtggagaaactgcaaaaggagattatccagtcgaagcattggctatcatgcacaatatttgcaaagaagcagaatctgcatttttccacatgaaacactttgaggaacttattctccataccaaaaagccaactggaatgacccataccactgccatcgcagctgtttctgcaaccatcacttgcagagctgttgccattattcttatcacaacaaccggaagaaccgcccgtttgtgttctcgttatcgtcctccagttccaatcattactgtctcacgtgacgaacagatctcccgtcaacttcatcttcatagaggcattttcccagtctactatccaaaaggacgtatcgaagaatgggatgtggatgtggaagagcgtgttcaatacggagtgaatttgggaaagactcgcggattcattcatcctggtgacccgcttatcgtcatcaccggatggaaacaaggagccggattcacaaatacaatgagaatcgttactgcttcataa

SEQ ID NO: 223 - protein, 515 aa, Caenorhabditis briggsae AF16
MYQDDHIGSEHSTATTNISHLCGLRISERPQKTRKTGVICTIGPACSDVETLRKMINTGMNIARLNFSHGSHEAHAATIKTIRKAAKDAPFPVAIALDTKGPEIRTGMFANNAKEVILENGKSIRVSTDPSMEFSATAFNIYADYKNLPKVVTPGSRIYIDDGLISLIVDSCEENAVVCTIENGGALGTRKGVNLPGTVVDLPAVTSKDIEDLLFGVEQGIDIIFASFIRNGEGIQKIRQVLGEKGKHIYIIAKIESEDGVINADEIIEASDGVMVARGDLGIEIPPEKVFLAQKMLIAKCNLAGKPVICATQMLESMISKPRPTRAECSDVANAVLDGVDCVMLSGETAKGDYPVEALAIMHNICKEAESAFFHMKHFEELILHTKKPTGMTHTTAIAAVSATITCRAVAIILITTTGRTARLCSRYRPPVPIITVSRDEQISRQLHLHRGIFPVYYPKGRIEEWDVDVEERVQYGVNLGKTRGFIHPGDPLIVITGWKQGAGFTNTMRIVTAS

SEQ ID NO: 224 - DNA, 1527 bp, Chlamydomonas reinhardtii
  CDS (1)..(1527)
atggtgtccctgggccttgagacggtgctggcgggcacgccctccaacatctgcaagaccaaggtggtttgcacgctgggccctaagtcccgcagtgtggaggtgctggaggagctgctgcgcgctggaatgagcgtggcgcgcttcaacttctctcacggctcgcacgactatcaccaggagacccttgacaaccttcgccaggcgatggccaacaccaaggtcatgtgcgcggcgatgctggacaccaagggtcctgagatccgcactggcacgctgaaggacggcaagccggtgcagctgaccgcgggccaggaggtgaccattaccaccgactacgcgctgcccggtgacgagaagacgattgccatgagctacaagaagctggcccaggacgtgaagcccggctcccagatcctgtgcgcggacggcagcattgtgctggaggtggtgtccaccgaccccgccgccggcactgtgcgcgcccgctgcatgaacagcgccatgctgggcgagcgcaagaacgtgaacctgccgggtgtggttgtggacctgcccacgctgacggacaaggacgtggacgaccttatcaactgggccctgcccaacgacatcgacttcatcgccgcctcctttgtgcgcaagggctcggacatcgacaccatccgtcaggtgctgggcgagcgcggcaggtccatcaagatcatctccaaggtggagaaccaggagggcatccagaacttcgatgacatcctggccaagaccgactccgtcatggtggcgcgcggtgacctgggcatggagatccccaccgagaagatcttcctggcgcagaagatgatgatccagaagtgcaactacgccggcaagccagtcatcaccgccacgcagatgctcgagtccatgatcaagaacccgcgccccacgcgtgccgaggccacggacgtggccaacgccgtgctggacggcaccgactgcgtcatgctttcgggcgagaccgccgccggcaacttcccggtggaggccgtgaaggtgatgaccaagatctgccgcgaggctgaggcctccctggactactacgccatgttcaagaacatccttaagcaggcgcccatgcccatgagcccgctggagtcgctggcgtcgtccgccgtgcgcaccgcgcacaaggtgcacgccagcctgattgtggtgctcacgcgcgagggctccaccgcccgcctggtggccaagtaccgcccgctggtgcccgtgctcaccgtggccgtgcccgtgctcaccaccgactcgctcacctggacctgcagcggcgaggcgccggcgcgccagtgcctggtcacccgcggcctgatccccgtgctggcggagggcagcgcgcgtgccacggactcggacacgaccgatgagatcctggccgccgccatcgagcacgccaagcgcgcgcgctactgcgccaagggcgactccatcgtggccctgcaccgcatcgggaacgcgtccgtcatcaagatcgtggacatcaagtaa

SEQ ID NO: 225 - protein, 508 aa, Chlamydomonas reinhardtii
MVSLGLETVLAGTPSNICKTKVVCTLGPKSRSVEVLEELLRAGMSVARFNFSHGSHDYHQETLDNLRQAMANTKVMCAAMLDTKGPEIRTGTLKDGKPVQLTAGQEVTITTDYALPGDEKTIAMSYKKLAQDVKPGSQILCADGSIVLEVVSTDPAAGTVRARCMNSAMLGERKNVNLPGVVVDLPTLTDKDVDDLINWALPNDIDFIAASFVRKGSDIDTIRQVLGERGRSIKIISKVENQEGIQNFDDILAKTDSVMVARGDLGMEIPTEKIFLAQKMMIQKCNYAGKPVITATQMLESMIKNPRPTRAEATDVANAVLDGTDCVMLSGETAAGNFPVEAVKVMTKICREAEASLDYYAMFKNILKQAPMPMSPLESLASSAVRTAHKVHASLIVVLTREGSTARLVAKYRPLVPVLTVAVPVLTTDSLTWTCSGEAPARQCLVTRGLIPVLAEGSARATDSDTTDEILAAAIEHAKRARYCAKGDSIVALHRIGNASVIKIVDIK

SEQ ID NO: 226 - DNA, 1623 bp, Chlamydomonas reinhardtii
  CDS (1)..(1623)
atggcaacgaaccatgtcttcttcgagccgcccaagtcgcttctgtccattctggaggaggacaaggacctgagcgtgcccgcgctcaccaagctgggatgcacgctgggtccccagtcccgtactgtggaggtgctggaggacctgctgcgcgcgggcatgaccgtggcgcgcttcgacttcagctggggctccatggagtaccaccaggagaccctggataacctgcgcatcgctatgcgcaacaccaagcgcctgtgctgcaccatgctcgacactatgggcccggagatcatcgtgctaaaccgccccgaggcgcccatcagcctgaccgcgggccagacgctgacgctgacctgcaacaagtcggtggcggcctcggagacggtgctgcccatctcctaccccagcctggcgggcacaggcctggcgcccggcagccaggtgttcgtggggcagtacctgttcaccgggagcgagacctcctcagtctacctgaccgtgcaggaggtcaagggcgacgaggcggtgtgcacctgcaacaacacctgcatcctggagggcctggcactcacggtgcacatcgcgcacatgcgcaacgaggcacccatcctggccgacagcgacatgtcggccatccggcagtggggcgccgccaacaagatcgactacgtgtgtctgtccttcacgcgcaacgccgcggacatcggcgtcgtgcgcgccgtgctggacagctgcggcctggagcagacccgcgtgatggccaagattgagaacctggaggggctggtgcacgctggcgacatcgtggaggcggcggactcggtgctgctgtcgcgcggcaacctgggcatctgcctggacgccgagaagatgttcctggcccagaagaagctgctgcgcgcctgcaacctggccggcaagcccgtgatggtcacccgcgtggtggacaccatgacggacgcgcctcgccccacccgcgccgaggccacggacgtggccaacctggtgctggacggcgccgacggcatcctgctgggctcggagaccttccgcggcaagtacgcggtctccaccgtcaagaccgtgtgcgccatctgcaagcaggccgagctctgcttcgacaaccagtcctactaccgctcgctcatggagtactttggctgctacacgctgcaccccaacctgggcaagcgcgaggcgctggcatcgagtgcggtgcgcgctgcggccaagatcaacgcggcgctgatcatcgtgttcaccgtgacgggccagacggcgcggttggtggccaagtacaagcccgcctgccccatcctcacggtggtgtgccccgacatcaagtccgacgggctcaagtggacgctgctgggcgaggtgcaggcgcggcagtgcatgctgtaccgcggcgtgctgcccatcatggcggaccccgacttcagcctgccgggcggtgccatcctggattacgccatcgcctacgccaagcaggtgggcatggtgcgctccggcgacaaggtggttgtgagccagtgcccgcgcaccggctacagcgacgtgatggaggaggcgggcgtggtcaagctcatcaccgtggacgaccacgtcatcccggggtga

SEQ ID NO: 227 - protein, 540 aa, Chlamydomonas reinhardtii
MATNHVFFEPPKSLLSILEEDKDLSVPALTKLGCTLGPQSRTVEVLEDLLRAGMTVARFDFSWGSMEYHQETLDNLRIAMRNTKRLCCTMLDTMGPEIIVLNRPEAPISLTAGQTLTLTCNKSVAASETVLPISYPSLAGTGLAPGSQVFVGQYLFTGSETSSVYLTVQEVKGDEAVCTCNNTCILEGLALTVHIAHMRNEAPILADSDMSAIRQWGAANKIDYVCLSFTRNAADIGVVRAVLDSCGLEQTRVMAKIENLEGLVHAGDIVEAADSVLLSRGNLGICLDAEKMFLAQKKLLRACNLAGKPVMVTRVVDTMTDAPRPTRAEATDVANLVLDGADGILLGSETFRGKYAVSTVKTVCAICKQAELCFDNQSYYRSLMEYFGCYTLHPNLGKREALASSAVRAAAKINAALIIVFTVTGQTARLVAKYKPACPILTVVCPDIKSDGLKWTLLGEVQARQCMLYRGVLPIMADPDFSLPGGAILDYAIAYAKQVGMVRSGDKVVVSQCPRTGYSDVMEEAGVVKLITVDDHVIPG

SEQ ID NO: 228 - DNA, 1566 bp, Malassezia globosa CBS 7966
  CDS (1)..(1566)
atgtctcaaatcgagtggttcgcttcgctcaatcctatcgaacataacttcgaaaatgcttatctgcgaaagacttctatcattgctactatcggacccaagacaaactctgtggaaatgctgcacaagttgcgaaatgccggtgtgaacatcgtgcgtttgaatgcgagtcatggcgatcatgggtatttccagagcgtcattgacaactgtcgtcaagtcgagcgggaagcgccaggccgtcccttggccattgccctcgacacgaaagggcctgaaatgcgtactggtgtgatgatcgacaatcaggatgtaccgattccagctggtcatgagatgatcgtcacgacagacgagtactacgcagacaagtgtagcgctgagtatctgtacattgattatccaaacctgccagcgaaggtggtgcccgatcgtttgatctacattgacgatggcatcctttccctacgcgtgcttcgcattgagggcaataatgtctttgtgcgttctgagaaccacggcactctgtcgtcccgcaagggagtgaatctgcctctaactgaagtggacctgcctgccgtgtcagaaaaggatgtcaaagacttggtctttgccgcagagcaagaggctgatattgtgtttgcatcgttcattcgcacgagggatgatatcgtcaagatccgctcgctcctcggcaagcgtggtggccacatgcgcatcattgcaaagattgagaaccaccagggcctgcagaactttgacgaaatcatggccgaggctgatggtatcatggttgcccgtggtgacctgggcattgagatccccgcaccgcaggtgttccttgctcagaagatgatgatttctcggtgcaacattgccggcaagcctgtgatctgtgccacgcaaatgcttgaaagcatgacacaaaacattcgtccgactcgtgcggaggtctcggacgtggccaatgctgttgttgacggtgctgactgcgtcatgcttagtggtgagacggccaaaggagcctatcctgtcgagtcggtgcggtacatggctgagactgcttacatggctgagcgtagtctttcgtatcaagccattttcaaccagatgcgcagtctgctgcgcccatcgacgatgacgaatgaaacgatcgctttagtcgctgtatcggccagtcttgagcaaaaggctgacgccatcctgctcatgtcaacttctggtgaaacggctcgtctcgttagcaagtatcgcccaccgtgcccaatccttgttgtcactcgcaatatatacaccacacggacgtgtcacttgagccgtggcacatatccattccattacccattgccgcacattgaagacatgtctcgttggcaagaggatgtcgacaatcgtatcaagttcggtctttctgaggcattgaagctcggtatcatcaagaagggcggtactgtcgtggctgtacagggctggcgtggtggcagaggctatacaaactcgctccgcattctcactgtgccgactacgtcggaaggatacattctcgaaagcactacggcaaactaa

SEQ ID NO: 229 - protein, 521 aa, Malassezia globosa CBS 7966
MSQIEWFASLNPIEHNFENAYLRKTSIIATIGPKTNSVEMLHKLRNAGVNIVRLNASHGDHGYFQSVIDNCRQVEREAPGRPLAIALDTKGPEMRTGVMIDNQDVPIPAGHEMIVTTDEYYADKCSAEYLYIDYPNLPAKVVPDRLIYIDDGILSLRVLRIEGNNVFVRSENHGTLSSRKGVNLPLTEVDLPAVSEKDVKDLVFAAEQEADIVFASFIRTRDDIVKIRSLLGKRGGHMRIIAKIENHQGLQNFDEIMAEADGIMVARGDLGIEIPAPQVFLAQKMMISRCNIAGKPVICATQMLESMTQNIRPTRAEVSDVANAVVDGADCVMLSGETAKGAYPVESVRYMAETAYMAERSLSYQAIFNQMRSLLRPSTMTNETIALVAVSASLEQKADAILLMSTSGETARLVSKYRPPCPILVVTRNIYTTRTCHLSRGTYPFHYPLPHIEDMSRWQEDVDNRIKFGLSEALKLGIIKKGGTVVAVQGWRGGRGYTNSLRILTVPTTSEGYILESTTAN

SEQ ID NO: 230 - DNA, 1581 bp, Physcomitrella patens subsp. patens
  CDS (1)..(1581)
atgcaggccactcagttgttgctggaggagcccatccggctggcctccattctggaaccgtcgtcgcctacagcattctcagctctcacgaagattatcggaaccctaggcccgcaatcgcgcgatgtggagaccatcgaagcgctgctcaaggcgggcatgtccgttgcccgattcgatttctcgtgggggaacgatgcataccaccaggagacgctggagaacctgaagaaggccgtgcggaacacgcgccggctgtgcgccgtgatgctggacaccatcggtccggagctttgtgtgctgaacaaggaggagcatgtgattgagctccaggagggggcgacggtggtgctcacggcggacgagaccagaggggcttccgcggaggttttgccgttgaattacgatgggctggcgtccgcggtgacgaaaggggacaccatttttctggggcagtatctgttcacggggagcgagaccacctccgtgtggttggaggtcgtggagacccaaggcaaggacgtggtgtgcaccgtgaagaacacggcaaccttgaccgggagcttgttcacggcccatatgtcgcaggtacgcatcgagctccccaccctgagcgaggccgatttgaagaccatggctacgtggggcgtgaagaaccagatcgattttgtgtcgctctcgtacactcggcacccggacgatgtgcgcgcttgccgcgagtacttggacaagctcggggatcttcgccagacgcagatctttgcgaagatcgagaattacgaagggttggcgcactttgacgagattttggaggaggcggacggcatcattttgtcccgcggtaacctaggaatcgatctgccccccgagaaggtgtttttgttccagaaggtggcgctgcagaagtgcaatgctgcaggaaaggcttccatcgtgacgcgcgtggtggattccatggtggacagtccccgccccacccgtgccgaggcgacggacgttgccaacgccgttctggatgggacggacggcatcatgctgggtgcggagacgctgagaggcctgtatcccgtggagaccatcaccaccatccgcaagatctgtgcggaggcggagaaggtgttcaaccaggcagtgtacttcaagagaaccatcaaggccgtgagggagccgatgcagcatctggaatcgatcgcgtcatccgccgtgcgagctgcctcgaaagtgagggcgtcggtgatcgtggtgttcacttcatcagggcgctgcgcacgcctgattgccaagtaccgtcccaccatgccagtgctatgtgtggtgattcccaggctgaccaccaaccatttgaagtggagcttcacgggcgcgttccaggctcggcaatgcctggcggttcgaggactgttcccgatgttggccgaccctcgacactcgtcggactccgccagcacaacgaacgaatccattttgaaggtagcgttggatcacggcaaggccgcaggcattgtgaaggcacatgatcgaatcgtggtgtgccaaaaagttggggactcgtcggtggtaaaaatcatcgagctagattga

SEQ ID NO: 231 - protein, 526 aa, Physcomitrella patens subsp. patens
MQATQLLLEEPIRLASILEPSSPTAFSALTKIIGTLGPQSRDVETIEALLKAGMSVARFDFSWGNDAYHQETLENLKKAVRNTRRLCAVMLDTIGPELCVLNKEEHVIELQEGATVVLTADETRGASAEVLPLNYDGLASAVTKGDTIFLGQYLFTGSETTSVWLEVVETQGKDVVCTVKNTATLTGSLFTAHMSQVRIELPTLSEADLKTMATWGVKNQIDFVSLSYTRHPDDVRACREYLDKLGDLRQTQIFAKIENYEGLAHFDEILEEADGIILSRGNLGIDLPPEKVFLFQKVALQKCNAAGKASIVTRVVDSMVDSPRPTRAEATDVANAVLDGTDGIMLGAETLRGLYPVETITTIRKICAEAEKVFNQAVYFKRTIKAVREPMQHLESIASSAVRAASKVRASVIVVFTSSGRCARLIAKYRPTMPVLCVVIPRLTTNHLKWSFTGAFQARQCLAVRGLFPMLADPRHSSDSASTTNESILKVALDHGKAAGIVKAHDRIVVCQKVGDSSVVKIIELD

SEQ ID NO: 232 - DNA, 1554 bp, Physcomitrella patens subsp. patens
  CDS (1)..(1554)
atggtcactttgctcagcgacacgctgcaaacagacgacggacactccagagtttcgaaaacgaagattgtttgcactctgggccccaagtcaagagaagtgccgattctggagaagcttttgagagcgggcatgaacgttgcccgcttcaacttctcccatggtacgttcgagtatcaccaatacacactggataatcttcggcaggcgcagctgaacacggggatcatgtgcgcggtgcttcttgacacaaagggaccggagatccgaaccgggcaacacaagacggggaagcctatgaagctcatccgcggcaaggagatatggattaccacggactactctcatttgggggacgagcatatgatttgcatgagctatccgaagctggcggagcacgtatcgcctgggaccgagattttgtgttcggacggaaccatcaccttcacggtgctagaatgcgacgtggcaagaggaatggtgaggtgcaggtgtgagaacacaaccatgctcggggagaagaagaacgtgaatctgcctggtgtcgtggtggacttgccgaccattacgacgaaggatactgatgacattgtgcaatggggcattcccaacaagattgatttcatcgctgcttcattcgtgagaaaaggggaggacgtcaagaagatcagagcgcttcttggaagccacgcaaaaacgatccagatcatctccaaggtggagaatcaagaaggattggtgaacttcgacgatatccttagagaaaccgacggcattatggtagccagaggcgatctagggatggagattcccaccgagaagatcttcctggcgcagaagatgatgatctacaagtgcaactctgccggaaagcctgtgatcactgcgactcagatgctggagtccatgatcaagtaccctcgtcccactcgcgcagaagccacagacgtggcgaatgctgtgctcgatggcaccgactgcgtcatgctcagtggcgaaactgcgaatggctcttaccctgaccttgcagtggcggtgatgtcccgcatctgccaggaagccgaggcctctctcgactattcggccatcttcaaagagatcatgaagtcggtcccactgcccatgagcccgttggagagcttggcttcatctgcagtgcggtgtgcgaagaaggtccgagcgtcgctgatcatcgtcctcacgcgcggcggcaccaccgccaagctggtggccaagtaccgcccttcggtacccatcttgtccgtggcagtgccggtcttaaccaccgacagcctcacatgggagatcagcgaggaatctcctgccagacacagcttggtctgtcgcggcctcctgtcgctgctcgctgaggggtccgccaaggccaccgactcggaatccaccgacgctatcctcggcgcggctctagatcacgccttgaagcggaagctgtgcattgttggagactctgttgttgcgatccacagaatcggcgccgcgtctgttatcaagatcgtcgaggtcaaggagaaggtagtcaaggtggcggcatga

SEQ ID NO: 233 - protein, 517 aa, Physcomitrella patens subsp. patens
MVTLLSDTLQTDDGHSRVSKTKIVCTLGPKSREVPILEKLLRAGMNVARFNFSHGTFEYHQYTLDNLRQAQLNTGIMCAVLLDTKGPEIRTGQHKTGKPMKLIRGKEIWITTDYSHLGDEHMICMSYPKLAEHVSPGTEILCSDGTITFTVLECDVARGMVRCRCENTTMLGEKKNVNLPGVVVDLPTITTKDTDDIVQWGIPNKIDFIAASFVRKGEDVKKIRALLGSHAKTIQIISKVENQEGLVNFDDILRETDGIMVARGDLGMEIPTEKIFLAQKMMIYKCNSAGKPVITATQMLESMIKYPRPTRAEATDVANAVLDGTDCVMLSGETANGSYPDLAVAVMSRICQEAEASLDYSAIFKEIMKSVPLPMSPLESLASSAVRCAKKVRASLIIVLTRGGTTAKLVAKYRPSVPILSVAVPVLTTDSLTWEISEESPARHSLVCRGLLSLLAEGSAKATDSESTDAILGAALDHALKRKLCIVGDSVVAIHRIGAASVIKIVEVKEKVVKVAA

SEQ ID NO: 234 - DNA, 1581 bp, Physcomitrella patens subsp. patens
  CDS (1)..(1581)
atggccactaagtccagcatttcgcatattttaggaaacacacctgatgatggccgcctaaaaattgcgaaaaccaagattatctgcactttggggcccaagtcccgggaggtgcccgttctggagaagctgctgagagccggcatgaatgtggcccggttcaacttttctcatggaacacacgagtaccatcagtacactctcgacagtctgcgacaggcctgcattaacacgcaaacgatgtgtgcggttcttctggataccaaggggcctgaaatcagaacagggaatttggcaagtggaaaacctatccaactgaagcgcggcgaggagatcttgatcaccactgactacagtcacttgggagacgagaacatgattgccatgagctaccaaaggcttccagtagatgtgaagccgggaaacaccatcttgtgctccgatggtaccattgccttatccgttctcgagtgcgacgccgagaagggcgtggttaagtgccgatgtgagaatacagccatgctgggggagaagaaaaacgtgaacttgccgggagttattgtggatttgccgaccatcacaccaaaagatagagatgacatcttgaattggggcgtgccaaacaagatcgattttattgcagcgtccttcgtgcgcaaggggtcagacctgatacaaatcaaacagcttttaggagaggcatcaaagaacattcatataatttcgaaggttgagaaccaggaaggtctggtcaacttcgacgatatattgagagagtcggatggagtcatggtggctagaggtgacctgggtatggagattccaacagagaagatctttctggcgcagaagatgatgatctacaagtgcaactctgcaggaaagccggtggtgaccgcgacacagatgctggagtcgatgatcaagtctcctcggccgactcgtgccgaagcgacagatgtggcaaacgctgtgctggatgggacagatgctgtgatgctgagtggagagacagcaaatggcttgtaccctgagctagcagtggcagtgatgtcccagatctgccaggaggctgaggcttctttggattatgcatctattttcaaggagacaatgaagtctgttcctctgcctatgagtccgttggagagtttggcctcctctgctgtgcgaactgcgaacaaagtgtgtgcctctcttatcattgtgctgactcgcggaggtactactgcccgacttgtggcgaagtatcggccatgtgtgccaattctttcagtggcagttcccgtaatgacaacagatagtctgacctggacttgcagcgaggagtccccagctcatcacagcttagtggtcaggggtttaattcctctcttggcggaaggttcagcaagatctactgattcggaatcaacagaagttattctgaatgcggccatcaaatacgcactgaggcggaggctctgtttagtgggtgactcgatcgttgcgcttcatcgcattggtgtcggaaacgttatcaagatcatggaagtgaaggatgttaagtattacgccaggatgtcaactattcatagatag

SEQ ID NO: 235 - protein, 526 aa, Physcomitrella patens subsp. patens
MATKSSISHILGNTPDDGRLKIAKTKIICTLGPKSREVPVLEKLLRAGMNVARFNFSHGTHEYHQYTLDSLRQACINTQTMCAVLLDTKGPEIRTGNLASGKPIQLKRGEEILITTDYSHLGDENMIAMSYQRLPVDVKPGNTILCSDGTIALSVLECDAEKGVVKCRCENTAMLGEKKNVNLPGVIVDLPTITPKDRDDILNWGVPNKIDFIAASFVRKGSDLIQIKQLLGEASKNIHIISKVENQEGLVNFDDILRESDGVMVARGDLGMEIPTEKIFLAQKMMIYKCNSAGKPVVTATQMLESMIKSPRPTRAEATDVANAVLDGTDAVMLSGETANGLYPELAVAVMSQICQEAEASLDYASIFKETMKSVPLPMSPLESLASSAVRTANKVCASLIIVLTRGGTTARLVAKYRPCVPILSVAVPVMTTDSLTWTCSEESPAHHSLVVRGLIPLLAEGSARSTDSESTEVILNAAIKYALRRRLCLVGDSIVALHRIGVGNVIKIMEVKDVKYYARMSTIHR

SEQ ID NO: 236 - DNA, 1587 bp, Physcomitrella patens subsp. patens
  CDS (1)..(1587)
atgccgcattctttgttgcttttgaaagagcctttcaagcttgattcgattctggagcctgcgccgccggggccattcacgacgttgacgaaaattgttggcaccctgggacccaaatgtcgatcagtggagatgttggagagactgttgcgggccggcatgtcgatcgcacggttcgatttcacatgggggagtgacgccgaacaccaggaaaccttgaacaatcttcgaaccgccatcaaaaacactcggcggttgtgcgctatcatgctcgacacggtcggtcccgaactctccatcaacaacgcggcgaatcaagccatcgaactgaagcaaggcgatgtggtgaccctctcgccggacaagaaagaggtggcgtcgtcgaagatcctcccgatcaactatgcagatctcagttaccaggtcaagccccgggacgagatcttcgtcgggcagtatctgtacacagggagcgaaacgacgtcagtgtggttggaggtccaggacacgcatggcagcgtcgtggattgcctgatcaaaaacacggccactctcacggggacgctgttcacggcggttccggccgggatacgcatcgggctaccgacgctctccgaggctgacagatcgacgatcgaaacatggggcgtgcggaatcagatcgactttgtgtcgctctcgtacacgcgccacgcgaacgacgtgcgaaccacgcgcggcttcttaagcagactgggagatctcaagcagacgcacgtctacgcgaagatcgagaacaaggaagggttggagcatttcgacgagattctaagagaggcggacggcatcatcctctctcgggggaacctcgggattgatgtgccggcggaaaaagtgttcgtgttccagaaagccgccatcaaaaagtgcaattacgcaggcaaaccagtgatcatcacccgcgtggtggattccatggtggacagcccgcggccaacgcgagccgaggccaccgacgtcgccaacatggttctcgacggcgccgactgcatcatgctcggcgccgagacgtaccgcggcaactacccagtggaatcagtgaccacggtgcggttgatctgcggcgaagcggagaaggtcttcaaccaggcgatgcatttcaagaagatgtgcaagtttgtcggtgagcccatggcgcatctcgaatccatcgcctcgtccagtgtgaaggcggcgatcaaggtgaatgcgtcggtgatcgttgtgttcacgtcgtcggggaaagtggctcgcttggtgtccaagtaccgaccttcgatgcccgtgctggtggtggtgattccgcggctctctaccgacaaaatgcggtggactttcacgggtgccattcaagcccggcagtgcttgatctctcgggggctcttccccatgctcgcggatcctcgacatcccgccgacacctcgtccaactgcaccaatgagtccattttgaaggttgccttggagcatggaaaggcagctgggattataaacgtgaaagatcgagttgtaatatgccaaaagattggggattcatcaatagttaaaattctggaaattgaaagttaa

SEQ ID NO: 237 - protein, 528 aa, Physcomitrella patens subsp. patens
MPHSLLLLKEPFKLDSILEPAPPGPFTTLTKIVGTLGPKCRSVEMLERLLRAGMSIARFDFTWGSDAEHQETLNNLRTAIKNTRRLCAIMLDTVGPELSINNAANQAIELKQGDVVTLSPDKKEVASSKILPINYADLSYQVKPRDEIFVGQYLYTGSETTSVWLEVQDTHGSVVDCLIKNTATLTGTLFTAVPAGIRIGLPTLSEADRSTIETWGVRNQIDFVSLSYTRHANDVRTTRGFLSRLGDLKQTHVYAKIENKEGLEHFDEILREADGIILSRGNLGIDVPAEKVFVFQKAAIKKCNYAGKPVIITRVVDSMVDSPRPTRAEATDVANMVLDGADCIMLGAETYRGNYPVESVTTVRLICGEAEKVFNQAMHFKKMCKFVGEPMAHLESIASSSVKAAIKVNASVIVVFTSSGKVARLVSKYRPSMPVLVVVIPRLSTDKMRWTFTGAIQARQCLISRGLFPMLADPRHPADTSSNCTNESILKVALEHGKAAGIINVKDRVVICQKIGDSSIVKILEIES

SEQ ID NO: 238 - DNA, 1590 bp, Physcomitrella patens subsp. patens
  CDS (1)..(1590)
atggccaccaagactagcatcgagcacatcctaggaaagacagctgatgatggccgccttaaaatcgcaaagaccaagattatttgcaccttgggacccaaatcccgggaggtgcccgttctggagaagttgctcaaagccggcatgaacgtggcccggttcaacttctcccatggaacacacgagtaccaacagtacactctggacaacctgcgacaggcctgcctaaacactcaaacgatgtgtgcagttcttctggataccaagggaccggaaattagaacaggccagttggcctctggaaaacctatccaactggtgcgtgacaaggaaatctggatcaccacggactacactcacttgggagacgagaatatgattgccatgagctacaaaaagcttgcaacagatttgcagccgggaaacatcatattgtgttcggatggatccatcacgatgacggttctagagtgcgatgtggagaaggggatggtgaagtgtcgatgcgagaacacagccatgctcggggagaagaaaaacgttaacctgccgggggtcgttgtggacttgccgaccatcacagagaaggatatcgatgacatcatgacctggggtgttccgaataagattgatttcatcgcagcgtcatttgttcgcaaagggtcagatgtcctagcgataaagaagctattgggagaagcgtcgaagtcaattcatatcatatccaaggttgagaatcaggaaggtctggtgaacttcgatgacatattgaaagagacagacggagtcatggtggcaagaggggacctgggaatggagattcctacggagaagatctttctggcccagaagatgatgatctacaagtgcaattctgcagggaagccggtggtgaccgcaacacagatgctagagtcgatgatcaagtctcctcggccgacgcgtgctgaagcaacggatgtcgcaaatgcagtgcttgatgggacggattgtgtaatgctgagtggagaaacagcaaatggatcataccctgaactagcagtggcagtgatgtcccatatttgccaggaagcggaggccgcattggaccatgaatccatattcaaagagatcatgaagtccgttcctttgcccatgagccccttggagagtctggcttcctctgctgtgcgaacgtgtgcgaaagtgtgcgcctctctcatcattgtattgactcgcggaggtagcactgcccgacttgtggcaaaataccggccgtttgtgccaattctgtcagttgccgttcccgtaatgaccacagatcatttgacctggacttgcagcgaggaatctcctgctcatcacagcttggtcgtcagccgacgagctctcgtttgcaggggtctgatacctctcttggccgaaggctcagcaaaggctactgattcggaatcaacagatgatattttgaatgatgcaattggatacgcactgaaacgtaagctatgtttagttggtgactctattgtggccctccatcgcattggtgtagcatccgtgatcaagatcatggaggtcaaggaaccaacacattctttcccgatggtatag

SEQ ID NO: 239 - protein, 529 aa, Physcomitrella patens subsp. patens
MATKTSIEHILGKTADDGRLKIAKTKIICTLGPKSREVPVLEKLLKAGMNVARFNFSHGTHEYQQYTLDNLRQACLNTQTMCAVLLDTKGPEIRTGQLASGKPIQLVRDKEIWITTDYTHLGDENMIAMSYKKLATDLQPGNIILCSDGSITMTVLECDVEKGMVKCRCENTAMLGEKKNVNLPGVVVDLPTITEKDIDDIMTWGVPNKIDFIAASFVRKGSDVLAIKKLLGEASKSIHIISKVENQEGLVNFDDILKETDGVMVARGDLGMEIPTEKIFLAQKMMIYKCNSAGKPVVTATQMLESMIKSPRPTRAEATDVANAVLDGTDCVMLSGETANGSYPELAVAVMSHICQEAEAALDHESIFKEIMKSVPLPMSPLESLASSAVRTCAKVCASLIIVLTRGGSTARLVAKYRPFVPILSVAVPVMTTDHLTWTCSEESPAHHSLVVSRRALVCRGLIPLLAEGSAKATDSESTDDILNDAIGYALKRKLCLVGDSIVALHRIGVASVIKIMEVKEPTHSFPMV

SEQ ID NO: 240 - DNA, 1581 bp, Physcomitrella patens subsp. patens
  CDS (1)..(1581)
atgcaggccacgcagttgttgctggaggagccaatcaggctggcctccattctggaaccgtcgtcgcccacggcgttctctgcattgacgaagattatcggcacgctaggtccgcagtcgcgcgatgtggagactattgaggctctgctgaaggctgggatgactgtagcccggttcgatttctcctggggggatgatgcgtaccaccaggagacgctggagaatctgaagaaggctgtgaagaacacgcgccggctgtgtgccgtgatgctcgacaccgttgggccggagctttgcgtgttgaacagtgatgagggtgtgattgaacttgtggagggggctagtgtgttgctggcggcagataggactgtgaaggcctccgcgaccgttttgccattgaattacgatgggctggcgtccgcggtcaagaagggggacaccatcttcgtggggcagtatttgttcacggggagcgagacgacgtccgtgtggttggaggtcgtggaaaccaagggtaaggatgtggtgtgtactgtgaagaacacggccactctggctggaaacatgttcacagctcatgtgtcgcaggtacgcatcgacttgcccactctcagcgaggccgatttgaagaccatggccacttggggcgtgaagaaccagattgatttcgtgtcgttgtcgtacacccggcacgctgacgacgtgcgcgcttgccgcgagcacttgagcaagcttggggatctccgccagacgcagatcttcgcgaagattgagaattacgaaggtttggcgcatttcgacgacatcctgaaggaagccgatggtatcattttgtcccgcggcaacttggggattgatctaccgcctgaaaaggtgtttttgttccagaaggtggcgctgcagaagtgcaatgctgcaggcaaagcatccattgtgacgcgtgtggtggattccatggtggacagtccccgccctactcgagctgaagctacggatgtggccaatgccgtgctggacgggactgacggcatcatgctgggggcggagactttgagagggctgtaccccgaggagagcatttccaccgtccacaagatttgtgcggaggcggaaaaggtattcaaccaggcagtgtacttcaagagaaccatcaaaggcgtgaaggagcccatgcagcatctggaatcgattgcgtcgtctgctgtgcgagctgcgacgaaagttagggcttctgtgatcgtggtgttcacctcctcaggacgttgtgcacgtctgattgccaaataccgtcccacgatgcccgtgctgtgcgttgtgattcccagactcaccaccaaccatttgaagtggagctttacaggcgcgttccaggctcgacaatgcctggcggttcgaggcttgttcccaatgttggccgacccccgccactcatccgattccgccagcacaacgaatgagtccattttgaaggtagcgctggaccacggcaaggctgcaggcattgtcaaggcccatgatagaattgttgtatgccagaaagttggagactcgtcagtggtgaaaatcattgagctagattga

SEQ ID NO: 241 - protein, 526 aa, Physcomitrella patens subsp. patens
MQATQLLLEEPIRLASILEPSSPTAFSALTKIIGTLGPQSRDVETIEALLKAGMTVARFDFSWGDDAYHQETLENLKKAVKNTRRLCAVMLDTVGPELCVLNSDEGVIELVEGASVLLAADRTVKASATVLPLNYDGLASAVKKGDTIFVGQYLFTGSETTSVWLEVVETKGKDVVCTVKNTATLAGNMFTAHVSQVRIDLPTLSEADLKTMATWGVKNQIDFVSLSYTRHADDVRACREHLSKLGDLRQTQIFAKIENYEGLAHFDDILKEADGIILSRGNLGIDLPPEKVFLFQKVALQKCNAAGKASIVTRVVDSMVDSPRPTRAEATDVANAVLDGTDGIMLGAETLRGLYPEESISTVHKICAEAEKVFNQAVYFKRTIKGVKEPMQHLESIASSAVRAATKVRASVIVVFTSSGRCARLIAKYRPTMPVLCVVIPRLTTNHLKWSFTGAFQARQCLAVRGLFPMLADPRHSSDSASTTNESILKVALDHGKAAGIVKAHDRIVVCQKVGDSSVVKIIELD

SEQ ID NO: 242 - DNA, 1554 bp, Physcomitrella patens subsp. patens
  CDS (1)..(1554)
atggctgtgtatgaaaaactggacataaagggcattcttggaagcctagacaaacccatacagggtttctcgaaaaccaagataatatgcacgttggggccgaaatccagggatgttccaatgttagagaagctgcttcgagccggaatgaatgttgcgcgattcaacttctctcacggaacttacgagtatcattccgggacacttgacgctctcaagcaggcaatgtacaacactcaaataatgtgcggtgtcctactcgacaccaagggtcctgagatccgaacagggaccctgaaggaaggacaagttattaaactcatacgaggtcaggagattatgatcacgacagactacaagcatgaaggtgacaatacaatgatcgccatgagctacccaaaacttgctcaggatgtaaagccagggaacttgatcttgtgctcggacggtaccattagcctccttgtgctggagtgcgatacagcaggtgggaaagtgaagtgtaggtgtgagaacacggcaagtttgggtgaacacaagaatgtgaatttgcccggggttatcgtcgaccttcctaccttcacgcagcgagatattgaggatattaccatatggggcatcccaaaccggatcgatttcatagctgcatcatttgtgcggaaaggaatcgatgttatcagagtcaaggagatacttggaagagcatcaaaaactattcacatcatctcaaaggtggaaaaccaagagggacttcagaacttcgacgacatcctgcgcgagaccgatgcaatcatggtcgcaagaggagacttaggaatggaaatacccacagagaaaattttcttagcacagaaaatgatgatagacaagtgcaacgggaaagggaaacctgtagtgacagccacccaaatgttggagtccatgatcaaatccccccgaccaactcgagcagaagcaacagatgttgccaatgctgttctggatggcacggatgctgtcatgcttagtggtgaaactgcaaatggcatcaaccctgacgttgctgtgggaatcatggccagaatctgtcgggaagctgaaatggccatcgattatgcaacactgttcaaagacctttgtcgaaatgctcctgtaccaatgagtcctcttgaaagtttagcatcttctgctgttcgaacagccaacaagatttgtgcatccttaattgtggtactaactcgtggggggaccactgccagattggtggctaaatacagacccaaggttcctattctatccgtggcaatccccgtcatgacaactgatagcattgaatggacgatcagcgaagagtcaccagcccaccatagcctaatctgcaggggcttggttccgttgttggcagaaggctcagtgaaggcaacagacgctgactcgagtgatgaaatattgaatgccgccctagagtatgctgtgagtagaaatctttgtaaggctggggattcggtggtagctctgcatcgcttagggaatgcctccctcatcaaaatcatggcggtcccagacatctactaa

SEQ ID NO: 243 - protein, 517 aa, Physcomitrella patens subsp. patens
MAVYEKLDIKGILGSLDKPIQGFSKTKIICTLGPKSRDVPMLEKLLRAGMNVARFNFSHGTYEYHSGTLDALKQAMYNTQIMCGVLLDTKGPEIRTGTLKEGQVIKLIRGQEIMITTDYKHEGDNTMIAMSYPKLAQDVKPGNLILCSDGTISLLVLECDTAGGKVKCRCENTASLGEHKNVNLPGVIVDLPTFTQRDIEDITIWGIPNRIDFIAASFVRKGIDVIRVKEILGRASKTIHIISKVENQEGLQNFDDILRETDAIMVARGDLGMEIPTEKIFLAQKMMIDKCNGKGKPVVTATQMLESMIKSPRPTRAEATDVANAVLDGTDAVMLSGETANGINPDVAVGIMARICREAEMAIDYATLFKDLCRNAPVPMSPLESLASSAVRTANKICASLIVVLTRGGTTARLVAKYRPKVPILSVAIPVMTTDSIEWTISEESPAHHSLICRGLVPLLAEGSVKATDADSSDEILNAALEYAVSRNLCKAGDSVVALHRLGNASLIKIMAVPDIY

SEQ ID NO: 244 - DNA, 1776 bp, Physcomitrella patens subsp. patens
  CDS (1)..(1776)
atggcttccatgctaattaacagttcacactttgcgacacgcgcagtgagtgggggtgaagtggcctttctggacaggtttcagggattgagaaagcagtcatttggaacaacgaagagtggtttgcgtgtgggaaggaaggggaaggggagtagtgaggctgtcagggttgctgtgcttgtccgtgcgacgagttatcgtcctgggcgatacgtgaaggaaaaaggtggtagcattatacctgtgtcgcccgaggatggccgcatcaactttttggaagacgaggttaaattgcgcctctttcagggtttacccgatgagagcagggttgggatgtgggtcaagccctcttttcagcgtaagacgaagattgtgtgcacaattggccctacatccaatacgaaggagatgatctggaagctcgcggaagctggaatgaatgtggctcggcttaacatgtcccatggagatcacgcctcgcataaggaggtgattgatcttgtgcgagaattcaacaaagaagcgcacgcgaatgtcattgctctcatgttggatacaaagggtccagaggttagaagtggagacctgcctcagccaattatgctgaagaagggcgatccattcaccttcacaattaagcgcggcgtgggaaccgatacctgcgtgagcgttaactacgatgactttgtgaccgatgtggaaataggcgatactttgctgattgatggaggcatgatgtcgctagaggtgaagggcaagacccacgaggaagtgtactgtgaagtggtggatgggggtgaattgaagtcccgtcgtcacctcaacgtgcgcggaaagagtgccactctaccctccattaccgagaaggattgggaagacattaaatttggagtagaaaataaagttgatttctacgcgctgtcatttgtcaaggacgcccaggtggtgcatgagctcaaatcctttttgaaagagaagtcagctgacattcatgtcattgtgaagattgaaagtgcggattcgattcccaatctacaatccattctggatgcagctgatggtgctatggttgcccgtggtgatcttggagccgagctgccaattgaggaggtgcctcttctccagggagaaattattagatcttgccgagccatgggaaagccagtgatcgtggctacgaacatgcttgagagcatgatcactcaccctacgcccacacgagcagaagtctcagacatagccatcgctgtccgtgaaggtgcggatgcaattatgctttcaggggaaaccgctcatggaaagtatcctttgaaagctgtgcgagtgatgcacactgtggccatgcgcacagaagcaaccatgccagaggaggaggcccctgctaaccttggtcgagcctttaagactcatatgagtgaaatgttcgcatttcatgccactttaatgtcaaatacattggggacttctatactggtgtttacacgaacgggctttatggctctgttattgagccattaccgtccagttggtactatcttcgctttcacaaacgataagagagtgcaatcgagattggctctttaccatggtgtaagagctatacacattaaattcacaaacgacgcggaggagacgtttaattatgcgctcagcatactgcagaaaaaaggtatggtccaagatggcgaagaggttgctttggtgcaaagtggaaaacagcccatttggagatcagagtactctcaccatattcaagtgcgcaaagtacgagcgtga

SEQ ID NO: 245 - protein, 591 aa, Physcomitrella patens subsp. patens
MASMLINSSHFATRAVSGGEVAFLDRFQGLRKQSFGTTKSGLRVGRKGKGSSEAVRVAVLVRATSYRPGRYVKEKGGSIIPVSPEDGRINFLEDEVKLRLFQGLPDESRVGMWVKPSFQRKTKIVCTIGPTSNTKEMIWKLAEAGMNVARLNMSHGDHASHKEVIDLVREFNKEAHANVIALMLDTKGPEVRSGDLPQPIMLKKGDPFTFTIKRGVGTDTCVSVNYDDFVTDVEIGDTLLIDGGMMSLEVKGKTHEEVYCEVVDGGELKSRRHLNVRGKSATLPSITEKDWEDIKFGVENKVDFYALSFVKDAQVVHELKSFLKEKSADIHVIVKIESADSIPNLQSILDAADGAMVARGDLGAELPIEEVPLLQGEIIRSCRAMGKPVIVATNMLESMITHPTPTRAEVSDIAIAVREGADAIMLSGETAHGKYPLKAVRVMHTVAMRTEATMPEEEAPANLGRAFKTHMSEMFAFHATLMSNTLGTSILVFTRTGFMALLLSHYRPVGTIFAFTNDKRVQSRLALYHGVRAIHIKFTNDAEETFNYALSILQKKGMVQDGEEVALVQSGKQPIWRSEYSHHIQVRKVRA

SEQ ID NO: 246 - DNA, 1563 bp, Physcomitrella patens subsp. patens
  CDS (1)..(1563)
atggccacgaagactgacatcgctcatattctaggtttagatgctaatgaagacgatggtcatctcaaaatctccaagacgaaaattgtctgcacgttagggcccaagtccagagaggtccatgtcctcgagaagttgctgagagctggaatgaacgtggcccggttcaacttctcccatggaacacacgagtaccatcaatacacgctggacagcctgagacaggccatggctaacacgcaaaccatgtgcgcagttcttctagatactaaggggccagagattcgaaccgggagtttggcagctggcaagccaattcaactgaagcgcaacaatgagatttggatcactactgactacagccacttgggcgacgagaacatgatagccatgagctatgcgaaactcgcagtagatttggagccagggaacacaatcttgtgctctgatggcacaatcacaatgacggtgctcgactgtcatcctgagaagggcatggtgaaggccagatgcgagaacaccgccatgctaggagagaagaaaaacgtgaacctacctggtattgttgtggacttacccaccatcacacagaaggatatcgatgatataatgcaatggggtgttcccaacaaaattgattttattgcagcctcctttgttcgcaagggctcggatgtggtgacaatcaagaagctgctgggagaggcgtctgactctattcatgttatttctaaggttgagaaccaggaaggtctggtcaatttcgatgacattttgaaagagacggatggagtgatggttgcaagaggtgacttgggaatggagattccgactgagaagatttttttggcacagaaaatgatgatctacaaatgcaattcagcaggaaaaccagttgtgactgcaacacagatgctggagtccatgatcaagtcccctcgtcccactcgtgcagaggccactgacgtggcgaacgcagttctcgatggaaccgatgctgtgatgcttagtggagagactgcaaatggatcttaccctgaactcgctgtggcagtgatgtcccagatctgccaggaggctgaggctgcgctggattatgcatcaatctttaaggaaattatgaagtctgttcctttgccaatgagccctttggagagtctggcatcttctgctgttaggaccgccaacaaggtgcgggcctctcttatcattgtgttgacacggggaggcagcactgcgaggcttgtggcaaaataccggccatgtgtaccaatcctctcggtcgcggttccggttatgaccacagatggtttggaatggactttcagcgcgccgtctccagcccaccacagtctttgttgcaggggtctgattccacttctggcggaaggctctgcaaaggccactgattcagagtcgacagaagagattttgaacgcagctgtcaaatatgcgctgaagcgcaaactttgtcttgtgagtgactccgttgtggcccttcaccgcattggcgtggcatcagttatcaagatcattgaggtcaaggaccttgcttcctcataa

SEQ ID NO: 247 - protein, 520 aa, Physcomitrella patens subsp. patens
MATKTDIAHILGLDANEDDGHLKISKTKIVCTLGPKSREVHVLEKLLRAGMNVARFNFSHGTHEYHQYTLDSLRQAMANTQTMCAVLLDTKGPEIRTGSLAAGKPIQLKRNNEIWITTDYSHLGDENMIAMSYAKLAVDLEPGNTILCSDGTITMTVLDCHPEKGMVKARCENTAMLGEKKNVNLPGIVVDLPTITQKDIDDIMQWGVPNKIDFIAASFVRKGSDVVTIKKLLGEASDSIHVISKVENQEGLVNFDDILKETDGVMVARGDLGMEIPTEKIFLAQKMMIYKCNSAGKPVVTATQMLESMIKSPRPTRAEATDVANAVLDGTDAVMLSGETANGSYPELAVAVMSQICQEAEAALDYASIFKEIMKSVPLPMSPLESLASSAVRTANKVRASLIIVLTRGGSTARLVAKYRPCVPILSVAVPVMTTDGLEWTFSAPSPAHHSLCCRGLIPLLAEGSAKATDSESTEEILNAAVKYALKRKLCLVSDSVVALHRIGVASVIKIIEVKDLASS

SEQ ID NO: 248 - DNA, 1584 bp, Phaeosphaeria nodorum SN15
  CDS (1)..(1584)
atggccaacgctctcgaccacctcaatgccggccggaccaggattgagtggctcagccagctcaacaccgagtaccaccctgcgaaggagtaccgccgaacctccatcatcggcaccattggccccaagaccaactctgcggagaagatgaacgctctccgcagggctggcctcaacgtcgtccgcatgaacttctcccacggctcgtacgaataccaccagtccgtcatcgacaacgcgcgcgaagccgagaagcaacagtctggcaggccgctcgccatcgccctcgacaccaagggccccgaaatccgtacaggtaacactgtcggggatgcggacatcccgatcaaggctggcaccgagctcaacatcaccaccgatgatgcctatgccaccaagtgcgacgacaagaacatgtacgtcgactacaagaacatcacaaaggtcattgaggtcggccgcaccatctacgtcgatgacggtgtcctctcattcgaggtcctcgaggttgtcgacgaccagacactgagggtcaagtgcgtgaacaacggcaagatctcctccaagaagggtgttaacctgcccaagaccgacatcgatcttcccccgctgtccgagaaggacaaggccgacttgaagttcggtgtcaagaacaaggtcgacatggtctttgcttcgttcatccgccgcggcagcgacatcactgctatccgtgaggtgctcggcgaggagggcaaggacatccagatcattgccaaggtcgagaaccagcaaggtgtgaacaacttcgacgacatcctcaaggagaccgacggtgtcatggttgcccgtggtgacttgggtatcgagatcccgcccagccaggtcttcattgcgcagaagatgatgatcacaaagtgcaacattgccggaaagcctgtcatttgcgcgacccagatgctcgagtccatgacctacaaccctcgcccaacccgtgccgaagtcagcgatgtcggaaacgctgtccttgacggagccgactgcgtcatgttgtctggcgagactgctaagggagactaccccgtcgaggccgttaccatgatgcacgagacctgcttgctcgcagaggtcgctatcccatacgtaaacgcattcgatgagctgaggaaactggctcctgtcccttgccctaccacagagacctgcgccatggctgccgtcagcgccagtctggagcagaacgctggtgcgatcttggtcttgaccaccagtggtaccaccgcgcgcctcgtttccaagtaccgtcccgtgtgcccgatcatcatggtcacccgtaatgcttcggcttcaaggtactctcacctgtaccgtggtgtataccccttctacttcgcagaggagaagcccgacttcaaggccgcgccatggcaggaggatgttgaccgccgtttgaagtggggcatcatgaatgcgatcaagctcggcgtgctcgagaagggtgctcccgtcatctgcgtccagggctggagaggaggaatgggccacaccaacaccctccgcattgtacctgcgacggaagatcttggtttggaccaggaggcatga

SEQ ID NO: 249 - protein, 527 aa, Phaeosphaeria nodorum SN15
MANALDHLNAGRTRIEWLSQLNTEYHPAKEYRRTSIIGTIGPKTNSAEKMNALRRAGLNVVRMNFSHGSYEYHQSVIDNAREAEKQQSGRPLAIALDTKGPEIRTGNTVGDADIPIKAGTELNITTDDAYATKCDDKNMYVDYKNITKVIEVGRTIYVDDGVLSFEVLEVVDDQTLRVKCVNNGKISSKKGVNLPKTDIDLPPLSEKDKADLKFGVKNKVDMVFASFIRRGSDITAIREVLGEEGKDIQIIAKVENQQGVNNFDDILKETDGVMVARGDLGIEIPPSQVFIAQKMMITKCNIAGKPVICATQMLESMTYNPRPTRAEVSDVGNAVLDGADCVMLSGETAKGDYPVEAVTMMHETCLLAEVAIPYVNAFDELRKLAPVPCPTTETCAMAAVSASLEQNAGAILVLTTSGTTARLVSKYRPVCPIIMVTRNASASRYSHLYRGVYPFYFAEEKPDFKAAPWQEDVDRRLKWGIMNAIKLGVLEKGAPVICVQGWRGGMGHTNTLRIVPATEDLGLDQEA

SEQ ID NO: 250 - DNA, 1581 bp, Aspergillus oryzae RIB40
  CDS (1)..(1581)
atggccgccagcagttctctcgaccatttgagcaaccgtatgaagctggagtggcactccaagctgaacacggagatggtgcccgcgaagaacttccgccgcacctccatcattggcaccattggccctaagaccaactcggtggagaagatcaacgctctccgcagatccggtctcaatgttgttcgtatgaacttctcccacggttcgtatgagtaccaccagtccgttatcgacaacgcccgtgaggccgccagagtccagaccggacgtcccctcgccattgctcttgataccaaaggacctgaaatccgtactggaaacactaccgatgataaggatatccccatcaaggagggtcacgagctcaacatcaccactgatgagaagtacgctaatgctagcgacgaccagaacatgtacctggactataagaacattaccaatgtgatcgctcccggaaagctcatctatgtcgacgatggtatcctctccttccaggttctggaggtcgttgacgacaagaccctgcgcgtcaagtgtcttaacaatggcaacatctcctctcgcaagggtgttaacctgcccggcaccgatgttgaccttcccgccctttccgagaaggatatcagtgatctcaagttcggtgtcaagaacggcgtcgacatgatctttgcctcgttcattcgtcggggaagtgacatccgccacattcgtgacgtgttgggtgaagagggtaaggagattcagatcatcgccaagattgagaaccagcagggtgtcaacaacttcgacgagattctcgaggagactgacggtgttatggtcgcccgtggtgatcttggtatcgaaatccccgcccccaaggtcttcatcgctcagaagatgatgatcgccaagtgcaacatcaagggcaagcctgtcatctgtgccactcaaatgctcgagtccatgacatacaaccctcgccccactcgtgccgaggtgtccgatgtcgctaacgctgttcttgacggagccgactgtgtcatgctttctggtgagaccgctaagggctcatacccttgtgaggctgttaagatgatgagcgagacctgtttgctcgccgaggttgccattccccacttcaatgtctttgacgagttgcgcaacctcgctccccgccccactgatactgtggaatccatcgccatggctgccgttagcgccagtcttgagcttaacgccggtgccattgttgtcttgaccaccagtggtaacactgctcgccttctttccaagtaccgccctgtgtgccccatcctgatggtcacccgtaaccctagagcttcgaggtattctcacctctaccgtggtgtctggcccttcctcttccccgagaacaagcccgacttcaacgtcaagatctggcaggaggacgttgaccgccgtctcaagtgggctatctcccacggtatcaagctcggtatcatcaacaagggagacaacattgtctgtgtccagggttggcgcggaggccagggccacaccaacaccgtccgtgtggtcccagctgaggagaaccttggtctgattgagtaa

SEQ ID NO: 251 - protein, 526 aa, Aspergillus oryzae RIB40
MAASSSLDHLSNRMKLEWHSKLNTEMVPAKNFRRTSIIGTIGPKTNSVEKINALRRSGLNVVRMNFSHGSYEYHQSVIDNAREAARVQTGRPLAIALDTKGPEIRTGNTTDDKDIPIKEGHELNITTDEKYANASDDQNMYLDYKNITNVIAPGKLIYVDDGILSFQVLEVVDDKTLRVKCLNNGNISSRKGVNLPGTDVDLPALSEKDISDLKFGVKNGVDMIFASFIRRGSDIRHIRDVLGEEGKEIQIIAKIENQQGVNNFDEILEETDGVMVARGDLGIEIPAPKVFIAQKMMIAKCNIKGKPVICATQMLESMTYNPRPTRAEVSDVANAVLDGADCVMLSGETAKGSYPCEAVKMMSETCLLAEVAIPHFNVFDELRNLAPRPTDTVESIAMAAVSASLELNAGAIVVLTTSGNTARLLSKYRPVCPILMVTRNPRASRYSHLYRGVWPFLFPENKPDFNVKIWQEDVDRRLKWAISHGIKLGIINKGDNIVCVQGWRGGQGHTNTVRVVPAEENLGLIE

SEQ ID NO: 252 - DNA, 1593 bp, Coprinopsis cinerea okayama7#130
  CDS (1)..(1593)
atgtatcccgtcgatggcgtccgttctcagctcgagtggaactcggagctcagcctcaacactgtcaccccaacagagacaacaaagttcttgcgcaagacctccatcatcgcgactatcggccccaaggtcaacactgtcgagaagcttactgagctcgtccgcgccggtgtcaacatcgtgcgcatgaacttctcccatggttcctacgagtaccaccagagcgtcattgataacaccagagccgtccaagcgaacgatcccaagggccgtcccatcgccatcgcccttgacaccaaaggaccagagatccgcactggcgtgaccaaggaggggaaggactggcccgtctccgccggccaggaattcatcgtttcgacggatgaacggtacgccgaagcctgcgacagccaggttatgtatgtcgactatgccaacctccccaaggtgaccgcacccggaaagttgatctatgtcgacgacggtatcctctccctcctcgtcctctccgtcgatggcaagaacatccatgtccgcgccttgaacagtggaaacatctcttcccgaaagggtgtcaacctccccaagaccgacgtcgacttgcctgctctctccgagaaggacaagaaggatcttgagtttggtgtcaagaatggcgttgacatgatctttgcctcgtttatccgcaaggctgaagacgtccaggacatccgaactgtcctcggtcctgacggtgccaacatcaagatcatcgtcaagattgagaacgagcagggtgtcgccaactttgacgaaatcctcaaggaggctgatggtgtcatggtcgcccgtggtgaccttggtatcgaaatccctgccagccaggtcttccttgcccaaaagatgatgattgccaagtgcaacattgtcggcaagcctgtcattgttgctactcagatgctcgagtccatgacgtacaaccctcgacccactcgtgccgaagtcagcgatgttgccaacgctgtccttgatggtgctgactgcgtcatgttgtccggtgagaccgccaaaggcaactaccccatccaatcagtgttgatgatggccgagacctgcctcctcgccgaatcctccatctgctaccctcccctcttcgacgacatccgtgccatccaaccccgacccactgctaccgccgagaccgtcgctatcgctgctgtcgccgctgccagtgagcagggtgccaaggccatccttgtcctctccaccagcggtaacactgcccgcctggtatccaagtacaagccctctgtgcccatcatcaccgtcacccgcaaccaacaaacggcaaggcaaatccacttgcaccgtggctgctatccattctggtaccccgagcctcgcggcatcgaggctcaccaatggcagactgatgtcgacaaccgtatccggtatggtctccgcaacgccttggctctgcacctcatcacccccggttcaaccgtcatcgccgtgcaaggctggaaaggcggcttgggccacaccaacaccctccgtgtgctctccgttccgaccgaccctgccgacctcgaactccaaccgttgggagcttag

SEQ ID NO: 253 - protein, 530 aa, Coprinopsis cinerea okayama7#130
MYPVDGVRSQLEWNSELSLNTVTPTETTKFLRKTSIIATIGPKVNTVEKLTELVRAGVNIVRMNFSHGSYEYHQSVIDNTRAVQANDPKGRPIAIALDTKGPEIRTGVTKEGKDWPVSAGQEFIVSTDERYAEACDSQVMYVDYANLPKVTAPGKLIYVDDGILSLLVLSVDGKNIHVRALNSGNISSRKGVNLPKTDVDLPALSEKDKKDLEFGVKNGVDMIFASFIRKAEDVQDIRTVLGPDGANIKIIVKIENEQGVANFDEILKEADGVMVARGDLGIEIPASQVFLAQKMMIAKCNIVGKPVIVATQMLESMTYNPRPTRAEVSDVANAVLDGADCVMLSGETAKGNYPIQSVLMMAETCLLAESSICYPPLFDDIRAIQPRPTATAETVAIAAVAAASEQGAKAILVLSTSGNTARLVSKYKPSVPIITVTRNQQTARQIHLHRGCYPFWYPEPRGIEAHQWQTDVDNRIRYGLRNALALHLITPGSTVIAVQGWKGGLGHTNTLRVLSVPTDPADLELQPLGA

SEQ ID NO: 254 - DNA, 1590 bp, Culex quinquefasciatus
  CDS (1)..(1590)
atgatggtgtgggtgtccgactatgacttcgacccgaagggtcgcaaaatgaacccggaatcggtgtcgcatttagagcacatgtgctcgctggatattgacacgcagacatcgttcgtgcggctgtccggcatcatctgtaccatcgggccggcctcggtggcgccggagatgctggaggagatgatgaagaccggcatgaacattgcccggttgaacttttcgcacggttcgtacgagtaccacggcaacacgatcaagaacatccgcgaggcggtggcgagctactcggccaagctgggcaagccgttcccgctggcgatcgcgctggacaccaagggtccggagattcgtaccggtttgattgagggcagcggaaccggcgaggtcgagctgaagaagggcgagaagatcgagctgacgacgaacaaggatcacctggagaagggcaacaaggacaagatctacgtggattacgtcaacatcgtcaaggtggtgaagcccggcgatcgtgtgttcgttgacgatggtttgatctcgctggttgcgaacagtattagcggagacacgctgacctgcacggtcgagaacgggggtttgctgggatcgcgcaagggtgtcaacctgcccggagtgccggtcgatctgccggctgtgtccgagaaggacaaggccgatctgcagttcggtgttgaccagggagtcgatgtgatctttgcttcgttcatccgtaacgctgctgcgttgaaggagatccgcggtatcctcggcgataagggcaagaacatcaagatcatttccaagattgagaaccagcagggtatgcagaacctggacgccatcattgccgcttcggacggtatcatggttgctcgtggtgatctgggtattgaaatcccggccgagaaggtgttcctggctcagaagtcgattatcgctcggtgcaaccgcgccggaaagcccgtcatctgcgccactcagatgttggagtctatgatcaagaagccacgtccgactcgtgccgaaatttcggacgttgccaacgccatcattgacggtgccgactgtgtcatgctgtctggtgagaccgccaagggcgagtacccgctggagtgcgtactgaccatggccaagacgtgcaaggaagccgaagctgccctgtggcatcgcaacctgttcaacgatctggtcaacacgacgcccactccgatcgataccggagcctcgatcgcgatcgctgctgccgaagctgcgagcaagatccgcgccgcggctctcatcgtcatcaccacttcgggacgttcggcccatgtcatctccaagtaccgcccacgctgcccgatcattgccgtgacccgcttcgaccagactgcccgccagtgccatctgtaccgcggcattctgcccgtggtctacgaacagcccccgctcgaggactggctgaaggacgttgacgcgcgcgtccagtacggtatggagtttggcaaggaacgtggcttcctgaagcccggcatgccggtggtcatcgttaccggctggaagcagggctccggcttcaccaacaccattcgcgttgtgaacgtcgaataa

SEQ ID NO: 255 - protein, 529 aa, Culex quinquefasciatus
MMVWVSDYDFDPKGRKMNPESVSHLEHMCSLDIDTQTSFVRLSGIICTIGPASVAPEMLEEMMKTGMNIARLNFSHGSYEYHGNTIKNIREAVASYSAKLGKPFPLAIALDTKGPEIRTGLIEGSGTGEVELKKGEKIELTTNKDHLEKGNKDKIYVDYVNIVKVVKPGDRVFVDDGLISLVANSISGDTLTCTVENGGLLGSRKGVNLPGVPVDLPAVSEKDKADLQFGVDQGVDVIFASFIRNAAALKEIRGILGDKGKNIKIISKIENQQGMQNLDAIIAASDGIMVARGDLGIEIPAEKVFLAQKSIIARCNRAGKPVICATQMLESMIKKPRPTRAEISDVANAIIDGADCVMLSGETAKGEYPLECVLTMAKTCKEAEAALWHRNLFNDLVNTTPTPIDTGASIAIAAAEAASKIRAAALIVITTSGRSAHVISKYRPRCPIIAVTRFDQTARQCHLYRGILPVVYEQPPLEDWLKDVDARVQYGMEFGKERGFLKPGMPVVIVTGWKQGSGFTNTIRVVNVE

SEQ ID NO: 256 - DNA, 1599 bp, Laccaria bicolor S238N-H82
  CDS (1)..(1599)
atgtacccatccgatggtatccgatcccagctcgagtggaactctactttgagcaccaccaatgttcctgtacccacagaaagctctaaatatctccgcaagacttctatcattgccactatcggtccaaaagtcaacactgttgagaagcttgctgaccttcgacgtgctggtgtcaatgttgttcgcatgaatttctcccatggatcctacgagtatcatcaaagcgtcattgacaataccaggaagatggtcgcgcaggatcctcaaggacgccctgttgcaatcgctttggacacaaaaggtcctgagattcgcacaggtctgacgagagagggaaaagattggcctgtttccgccggtcacgagtttgtgatctcaaccgacccaaaatacagcgaggcttgtgatgaccaggttatgtgggttgattataccaatcttcctaaagtcacggcacctggaaaactaatttacgtggatgacggcattctgtctctcctggttctcgccattgatggccctaatgtgcgtgttcgcactctgaacaacgggaacattagctcccgcaagggcgtgaatcttcccaaaaccgatgtcgaccttccagctctttcagacaaggataagaaggatttgctatttggtgttaaaaacggagttgacatgatattcgcttccttcatccgcaaagcccaggacgtcaaggatattcgcacagttctcggaccagacggtgctaacatcaaaatcatcgtcaagattgaaaacgaacaaggtgtcgcgaactttgacgaaattttgaaggagaccgacggcgttatggttgctcgtggcgatcttggaattgagatcccagctagccaagtcttccttgcccaaaagatgatgattgctaaatccaacattgctggaaaaccagttatcgtcgcaacccaaatgctcgagtctatgacatacaacccacgacccacccgtgctgaggtcagtgatgtagccaatgctgttctcgacggcgccgattgtgttatgttgtcgggagaaactgctaagggcaactatcccattcaatctgttctcatgatggctgaaacctgtcttcttgctgagtcggccatctgctacccgcccctattcgatgatattcgaagcattcagcctcggccaactgagaccgcagagactgttgccatcgcagccgtagcagctgcctccgagcagggtgctagtgctatcatcgtcctctccacaagtggacacactgcatgtttgatctccaaatatcgaccttctgttccaatcatcactgttactcgcaaccagcaaacttctcggcagatccacttgcaccggggctgctatcccttctggtatcctgagcccagaggaattgaaggccaccagtggcagactgacgtggacaatcgaatccgctttgggctgcgcaacgcacttgccttgaacatcatcacacctggatcaacgatcattgccgttcagggatggaagggtgggctgggtcataccaacaccctacgtgtcctgtctgtgcccacagacagcgccgatttggagctgcagccgctcggctctgtgtag

SEQ ID NO: 257 - protein, 532 aa, Laccaria bicolor S238N-H82
MYPSDGIRSQLEWNSTLSTTNVPVPTESSKYLRKTSIIATIGPKVNTVEKLADLRRAGVNVVRMNFSHGSYEYHQSVIDNTRKMVAQDPQGRPVAIALDTKGPEIRTGLTREGKDWPVSAGHEFVISTDPKYSEACDDQVMWVDYTNLPKVTAPGKLIYVDDGILSLLVLAIDGPNVRVRTLNNGNISSRKGVNLPKTDVDLPALSDKDKKDLLFGVKNGVDMIFASFIRKAQDVKDIRTVLGPDGANIKIIVKIENEQGVANFDEILKETDGVMVARGDLGIEIPASQVFLAQKMMIAKSNIAGKPVIVATQMLESMTYNPRPTRAEVSDVANAVLDGADCVMLSGETAKGNYPIQSVLMMAETCLLAESAICYPPLFDDIRSIQPRPTETAETVAIAAVAAASEQGASAIIVLSTSGHTACLISKYRPSVPIITVTRNQQTSRQIHLHRGCYPFWYPEPRGIEGHQWQTDVDNRIRFGLRNALALNIITPGSTIIAVQGWKGGLGHTNTLRVLSVPTDSADLELQPLGSV

SEQ ID NO: 258 - DNA, 1503 bp, Brugia malayi
  CDS (1)..(1503)
  misc_feature (81)..(81): r is g or a
  misc_feature (993)..(993): y is t or c
  misc_feature (1054)..(1054): y is t or c
atgcataagagcaaaataaacattcaaagtcaaccacatatcgaaagaaaaacggcaattatatgtaccattggaccggcrtgtggaagtgtggataacctgaaggaaatgatttcatccggaatgaatattgctcgtttgaattttagtcatggatctcatgaatatcatgcaacaacaatcaaaaacatacgtgaagcagtgcaaagttttcatcaaaaaccgatagttggaattgctctagacactaaaggacctgagattcgtactggacttatagacggatccgctactgcggagatagaactaaaaaaaggagcaaaaatcaagctcacgatagataaagcaatggcttcaaaatgcaatgctaatatattatacgtcgattatgagaacatgccaaaaattctgaatcctggagcacacgtatttatcgatgatggactcatttcagtggtggtggatagcatccagggcaaggacataatgtgtacaattgagaatgggggcaaattaggtagcaaaaaaggagtcaaccttcctggtaccaaatgcgacttgcctgctgtttcagacaaagacactaaagatctgaaattcggtgtcgaacagggtgttgatatgatatttgcatcatttattcgaaacgctgaaggtgtacgtacaatacgacgtattcttggcgagaaaggaagatttattaaaattatagcgaaaattgaaaatcaggaaggcattgaaaacgcagatgaaataatcagagaggcagatgggctgatgatagcacgcggtgatttgggtatcgaaattcccactgagaaagtattcgcagcgcaaaaaatgctaatcgcacgatgtaacttaatgggaaagcccgtagtatgtgctactcaaatgcttgaatcaatgaccaagaagccaagacctacccgagctgagggtagtgatgtagcaaatgcagtactcgatggtagcgattgtgttatgttaagyggtgagacagcaaagggagactatcctgtattaacactattaactatgagtaagttatgcytggaagccgaatcgaccgtgaactaccaagaagtattccgtgaagctcttctgtgcatgaagaaacctccagatgtcacacacacgattgcgattgcagccgcttctgcagcaatttcatgcaatgcaagcgctatcatagtgctaactgccacagggcactccgccagtttggtgagtcgttatcgtcccatggcaccaattattgcaataactcgagaagagcaagccgcccgacaaatgcatctgtttcgtggtgtccatccaacactttacaccgagccaaaaaatgaggattggaaggctgatattgatctgcgagtggctcatggtatgaaagaagggaaagcttgtggttttattaaatcaaatgatttaatcatcattatcacaggatggtccaaaggatccggacatacgaacacaatgcgtattattagagtgccatga

SEQ ID NO: 259 - protein, 500 aa, Brugia malayi
MHKSKINIQSQPHIERKTAIICTIGPACGSVDNLKEMISSGMNIARLNFSHGSHEYHATTIKNIREAVQSFHQKPIVGIALDTKGPEIRTGLIDGSATAEIELKKGAKIKLTIDKAMASKCNANILYVDYENMPKILNPGAHVFIDDGLISVVVDSIQGKDIMCTIENGGKLGSKKGVNLPGTKCDLPAVSDKDTKDLKFGVEQGVDMIFASFIRNAEGVRTIRRILGEKGRFIKIIAKIENQEGIENADEIIREADGLMIARGDLGIEIPTEKVFAAQKMLIARCNLMGKPVVCATQMLESMTKKPRPTRAEGSDVANAVLDGSDCVMLSGETAKGDYPVLTLLTMSKLCLEAESTVNYQEVFREALLCMKKPPDVTHTIAIAAASAAISCNASAIIVLTATGHSASLVSRYRPMAPIIAITREEQAARQMHLFRGVHPTLYTEPKNEDWKADIDLRVAHGMKEGKACGFIKSNDLIIIITGWSKGSGHTNTMRIIRVP

SEQ ID NO: 260 - DNA, 1623 bp, Brugia malayi
  CDS (1)..(1623)
  misc_feature (1164)..(1164): y is t or c
atgagaccaccgcaacataacaatgacgataaagaactcatgttaaaatatcgcagtggttatgatcgcttaatttcgcaagaacaaaaattggcaccattgcctgaaagtacaaacttggaacatttatgcaaattaaatattcgtgaacagccatgtgtggttcgaaaaactggaataatttgtactattggaccagcatgccgaagcgtggagaaattgcaggaaatgattatcaacggaatgaatattgcccgcatgaatttcagccatggatcatatgaataccacgcggaaacaatagcaaatgttcgctcagcagcacacagtttcagcgagccacggttggttgcaattgccctcgatacgaaaggtccagaaatacgtaccggtctgctgaagggaggtgctactgcagaagtagaactggtgaaaggaaatcggatccgattaactactgatccatccatggaaaatgcaggaactgctcagaacattttcgttgattataagaacatcactaaagttctgagtgttggctcacgagtctttattgatgacggtcttatttcattaatcgtcaattccatcgaagatgaaggtatattgtgcaccgttgaaaatgggggtatgttaggaagcagaaagggtgtcaatttgcccggtacacctgtcgatttaccagctgtgtctgaaaaagacatcaaggatttgcagtttggtgtggagcagaaagtagatatcgtttttgcttcatttatacgcaatggtaaaggtgttagcacgataaggaaggtgcttggtgaaaaaggaaaatacataaaaatcatagcaaagattgaaaatcaagaaggcgttgataaagccgatgaaattattgaagaagcagatggtgttatggttgcccgcggagatttgggtattgaaattccacctgaaaaagtatttttggcccaaaaaatgttgattgctaaatgtaacaaagcgggaaaaccggtcatctgtgctacccaaatgcttgaatcgatgataaaaaagccgagaccaactcgtgctgaaggcagtgacgttgcaaacgcagttctggacggagctgactgtgtaatgcttagtggtgaaactgctaaaggtgaatacccattagaagctctcaaaatcatgcaygagatctgcaaagaagcggaagcagcggtgtatcatacgcgatttttcgaggaacttctccacgcaaccccaaaaccgacggatatcgcacatactgttgccattgcagcaacatcagctgcggcgtcttgtcatgccagtgcaatgattctagttactactaccggacggtctgctgatttggtatctcgttatcggccgatgatgcctgtctttgcaatatgccgggatgagcatgtcgctcgacagcttcatctttggcgtggtatatttccgcttcattacggagcaaatcgagaaagtgactggtcgagcgatgtcgatgcccgaattaattatggtatttcggttggtaaggaccgtggttttatcaaaaagaacgacctggtggttgtcatcactggatggagacaaggcgctggacacacgaacacattacgtatcatcaaggtaccttaa

SEQ ID NO: 261 - protein, 540 aa, Brugia malayi
MRPPQHNNDDKELMLKYRSGYDRLISQEQKLAPLPESTNLEHLCKLNIREQPCVVRKTGIICTIGPACRSVEKLQEMIINGMNIARMNFSHGSYEYHAETIANVRSAAHSFSEPRLVAIALDTKGPEIRTGLLKGGATAEVELVKGNRIRLTTDPSMENAGTAQNIFVDYKNITKVLSVGSRVFIDDGLISLIVNSIEDEGILCTVENGGMLGSRKGVNLPGTPVDLPAVSEKDIKDLQFGVEQKVDIVFASFIRNGKGVSTIRKVLGEKGKYIKIIAKIENQEGVDKADEIIEEADGVMVARGDLGIEIPPEKVFLAQKMLIAKCNKAGKPVICATQMLESMIKKPRPTRAEGSDVANAVLDGADCVMLSGETAKGEYPLEALKIMHEICKEAEAAVYHTRFFEELLHATPKPTDIAHTVAIAATSAAASCHASAMILVTTTGRSADLVSRYRPMMPVFAICRDEHVARQLHLWRGIFPLHYGANRESDWSSDVDARINYGISVGKDRGFIKKNDLVVVITGWRQGAGHTNTLRIIKVP

SEQ ID NO: 262 - DNA, 1587 bp, Podospora anserina DSM 980
  CDS (1)..(1587)
atggtcaacacagctctcgaccacctcaacttggggggcaagatcgaatggctctcgcagctcgataccgcgttccagcctgcccgcaacttccgccgcacctccatcatctgcaccattggccccaagacgaactctgttgaggccatcaacaagctccgcgaggctggcctcaacgtggtgcgcatgaacttctcccacggcagctacgagtaccaccagtctgtcattgacaatgctcgcgctgccgagaaggcccagaagggccgtcaggtcgccatcgccctcgacaccaagggccccgagatccgtaccggcaacaccgtcaacgatgccgatctccccatctccgccggcgccatcttgaacatcaccaccgatgagaagtatgccacggcctgcaccaccgagaacatgtacgtcgactacaagaacatcaccaaggtcatctccccaggccgaattatttacgtcgacgacggtgtcttggcgttcgatgtgctcgagattgtcgacgacaagaccatcaaggttcaggcgcgcaacaatggtttcatctcttcccgcaagggtgtcaacctgcccaacaccgatgtcgatctgcccgccctctccgagaaggacaaggccgatctcctgttcggcgtcaagaacaatgtcgacatggtctttgcttctttcatccgcagagggcaagacatcaaggacattcgtgaggtcctcggcgaggagggcaagcacattcagatcattgccaagattgagaacagacaaggtctcaacaactttgccgagattctcgaggagaccgacggtgtcatggttgcccgtggcgatctcggtatcgagattcccgccgccgaggtgttcgccgctcagaagaagatcattgccatgtgcaacattgctggcaagcccgtcatttgcgccactcagatgctcgagtccatgatcaagaaccccaggccaaccagagccgagatcagtgatgttggcaacgcagttactgacggcgccgactgtgtcatgctttccggtgagacagccaagggtagctaccccaacgaggctgtgcgtgagatgagcgaggcctgcctcaaggccgagaacaccatcccatatgtcagccacttcgaggagctgtgcgcccttgtcaagcgccccgtctccattgtcgagtcttgcgccatggcggctgtccggacgtctctcgacctcaacgcctcggccatcttcgttctctccacctcgggggtctctgcccgcctcatctccaagtaccgccctgtttgccccatcatcatgatcactcggaacgcgtcggcctcgagatatgcccacttgtaccgcggcgtatacccattctccttcccagaggccaagcccgactttagcaaagtcaactggcaggaggatgtggatcgccgcatcaagtggggtcttacccacgctatcgacttgggtgttctcaacgagggtgagacggtggtggttgtccagggctggaagggcggcatgggcaacacaaacactctgcgtatcgttaaggccgatgtggaccacctcggcattggccagctggagtag

SEQ ID NO: 263 - protein, 528 aa, Podospora anserina DSM 980
MVNTALDHLNLGGKIEWLSQLDTAFQPARNFRRTSIICTIGPKTNSVEAINKLREAGLNVVRMNFSHGSYEYHQSVIDNARAAEKAQKGRQVAIALDTKGPEIRTGNTVNDADLPISAGAILNITTDEKYATACTTENMYVDYKNITKVISPGRIIYVDDGVLAFDVLEIVDDKTIKVQARNNGFISSRKGVNLPNTDVDLPALSEKDKADLLFGVKNNVDMVFASFIRRGQDIKDIREVLGEEGKHIQIIAKIENRQGLNNFAEILEETDGVMVARGDLGIEIPAAEVFAAQKKIIAMCNIAGKPVICATQMLESMIKNPRPTRAEISDVGNAVTDGADCVMLSGETAKGSYPNEAVREMSEACLKAENTIPYVSHFEELCALVKRPVSIVESCAMAAVRTSLDLNASAIFVLSTSGVSARLISKYRPVCPIIMITRNASASRYAHLYRGVYPFSFPEAKPDFSKVNWQEDVDRRIKWGLTHAIDLGVLNEGETVVVVQGWKGGMGNTNTLRIVKADVDHLGIGQLE

SEQ ID NO: 264 - DNA, 1584 bp, Pyrenophora tritici-repentis Pt-1C-BFP
  CDS (1)..(1584)
atggcgaacgctctagaccacctcaactccggcaggaccaggatcgagtggctcagccagctcaacactgagtacacaccggcgaagcagtaccggagaacatccatcatctgcaccatcggccccaagaccaactccgccgagaagatcaactcgctccgcaaagtcggtctcaatgtcgtccgcatgaacttctcccacggctcgtacgagtaccaccagtccgtcattgacaacgcgcgtgaggcggagaagacacagcctggcaggcctctggctattgcccttgacaccaagggcccggaaatccgaacaggtaacactgttgacgatgccgatatccccatcaaggctggtgccgtcatcaacatcaccaccgatgagaagtacgccacagcctgcgacgacaagaacatgtacgtcgactacaagaacatcacaaaggtcattgcccctggccgcacaatctacgtcgatgacggagtcctctcattcgaggtgctcgaagtcacagacgacaagacgctcaagtgcaagtgcgtcaacaacggcaagatctcgtccaggaagggtgtaaacctgcccaagacggacattgaccttcctcctctatcggagaaggacaaggccgatctcaggttcggtgtcaaaaacaaggtcgacatggtctttgcgtcgtttatccgccgcggcagcgacattaccgctatccgcgaggtgctcggcgaggagggcaaggacatccagatcatcgccaaggtggagaaccagcagggtgtcaacaactttgacgagatcctgagggaaaccgacggtgtcatggttgcccgtggtgaccttggtattgagattcctcccagccaggtcttcatcgcacagaagatgatgatcacaaagtgcaacattgccggcaagcccgtcatctgcgccacccaaatgctcgagtccatgacctacaacccccgccctacacgtgctgaagtcagcgatgtcggtaacgcggttctcgacggtgccgactgtgtcatgttgtccggtgagactgccaagggtgactaccctgtcgaggctgttaccatgatgcacgagacgtgcctgctcgctgaggtcgctatcccatacgtcaacgcatttgacgagctgaggaagctcgctcccgtgccctgccctacaaccgagacatgcgccatggcagccgtcagtgccagtctggagcagaacgctggcgccatcttggtgctgacaacgagtggcaccacggcccggctcgtgtccaagtaccggccagtgtgccccatcatcatggtcactcgtaacgagatggctgctaggtactcgcacctgtaccgcggcgtgtacccgttctatttccccgaacagaagcccgacttcaagacggagccatggcaggaggacgttgaccgccgtttgaagtggggtatcatgaacgccatcaagctgggagtgctcagcaagggcgatccggtcatttgcgtgcaaggctggaggggcggcatgggccataccaacacactccgcattgtgccagcacaggaggaccttggcctcgaccaagacgcgtag

SEQ ID NO: 265 - protein, 527 aa, Pyrenophora tritici-repentis Pt-1C-BFP
MANALDHLNSGRTRIEWLSQLNTEYTPAKQYRRTSIICTIGPKTNSAEKINSLRKVGLNVVRMNFSHGSYEYHQSVIDNAREAEKTQPGRPLAIALDTKGPEIRTGNTVDDADIPIKAGAVINITTDEKYATACDDKNMYVDYKNITKVIAPGRTIYVDDGVLSFEVLEVTDDKTLKCKCVNNGKISSRKGVNLPKTDIDLPPLSEKDKADLRFGVKNKVDMVFASFIRRGSDITAIREVLGEEGKDIQIIAKVENQQGVNNFDEILRETDGVMVARGDLGIEIPPSQVFIAQKMMITKCNIAGKPVICATQMLESMTYNPRPTRAEVSDVGNAVLDGADCVMLSGETAKGDYPVEAVTMMHETCLLAEVAIPYVNAFDELRKLAPVPCPTTETCAMAAVSASLEQNAGAILVLTTSGTTARLVSKYRPVCPIIMVTRNEMAARYSHLYRGVYPFYFPEQKPDFKTEPWQEDVDRRLKWGIMNAIKLGVLSKGDPVICVQGWRGGMGHTNTLRIVPAQEDLGLDQDA

SEQ ID NO: 266 - DNA, 1560 bp, Acyrthosiphon pisum
  CDS (1)..(1560)
atggctaactcacaacttttacatgataacactactactcacttggattatatgagcaccttggacatcgatgttgaagcacaatttgttcgtctgtctggtatcatttgtactattggacctgcttcggttgctgtggaaactctcgaggacatgattgactctggcatgaatgttggtcgcttgaacttctctcatggttcacatgaatatcatgcaaacacaattaagaacttaagacaagcggctgaaaactatggcaagaagattggtgtttacagcccattagctattgctctagataccaaaggacctgaaataagaactggcttgttagaaggcggtggatcagctgaagttgaactgaagaaaggtgaactaatcagtttatctacagacaagacatttgaaaacagtggtaatgccactaaagtgtatgttgactatcctaacataaccaaagtggtgaaaccaggcaatcgagtatatgttgatgatggtcttatttctttgattgtcaaagaaattggtagcaactttattgtgtgcaccattgaaaatggtggttcattaggcagtcgtaaaggtgttaacttacctggtgtacctgtagatctaccagcagtatctgaaaaggacaaaagtgatttgaaatttggtgttgaacaaggtgtagatatgatttttgcatcattcattagagaagctgctgctattaaagaaattagagagatcttaggagaaaatggtaaaaacatattgattatttcaaaaattgaaaaccaccaaggcatgaaaaacttgcaagaaatcattgaagcttctgatggtattatggtggctcgtggtgatttgggtattgaaatcccaccagaaaaagtgtttttggcacaaaaatctatgattgcacgttgtaacaaggctggaaaacccgctatttgtgctactcaaatgttggagtctatgattaagaaacctcgtgctaccagagcagaatcatctgatgtagcaaatgccatccttgatggagctgactgtgttatgttatctggagaaactgctaaaggtgaatacccattggagtgtgtacgtactatggctaccatctgtaaagaagctgagacagccgtttggcagagacaactctttgctgacttatcttctgctgttaatttgcctttggatgcttcacatacaactgctattgctgctgtagatgcagctaataaaagcaaagctgctgccattgttgttcttacaacatctggccattctgcacatctcatttccaaatatcgcccacgtagtcctatcatagcattgaccaggaatgtccaagttgcccgtcaatgccacatttatcgtggtattctacctctgtattataatgaacaaccattaagcgactggttgaaggatgtggacactcgtgtagtgcacgccattaagtttggtaaggcccgcggattcattaaaactggagatccagtggtagtcgttaccggatggaagaaaggttctggatacaccaacactttacgcattgttaacgtggaatga

SEQ ID NO: 267 - protein, 519 aa, Acyrthosiphon pisum
MANSQLLHDNTTTHLDYMSTLDIDVEAQFVRLSGIICTIGPASVAVETLEDMIDSGMNVGRLNFSHGSHEYHANTIKNLRQAAENYGKKIGVYSPLAIALDTKGPEIRTGLLEGGGSAEVELKKGELISLSTDKTFENSGNATKVYVDYPNITKVVKPGNRVYVDDGLISLIVKEIGSNFIVCTIENGGSLGSRKGVNLPGVPVDLPAVSEKDKSDLKFGVEQGVDMIFASFIREAAAIKEIREILGENGKNILIISKIENHQGMKNLQEIIEASDGIMVARGDLGIEIPPEKVFLAQKSMIARCNKAGKPAICATQMLESMIKKPRATRAESSDVANAILDGADCVMLSGETAKGEYPLECVRTMATICKEAETAVWQRQLFADLSSAVNLPLDASHTTAIAAVDAANKSKAAAIVVLTTSGHSAHLISKYRPRSPIIALTRNVQVARQCHIYRGILPLYYNEQPLSDWLKDVDTRVVHAIKFGKARGFIKTGDPVVVVTGWKKGSGYTNTLRIVNVE

SEQ ID NO: 268 - DNA, 1593 bp, Drosophila ananassae
  CDS (1)..(1593)
atggtgaacgtaaccatctacgaccaagcgccccagctgaagcccaacgaagtaccgcaaaacatggccgctggagctgatagccaattggagcacatgtgccgcctgcagttcgactcgccggttccccatgttcgcttatccggaatcgtctgcaccatcggacctgcctcgcgcagcgtcgagatgctcgagaagatgatggctaccggcatgaacattgcccgtatgaacttctctcacggctctcacgaataccacgccgagactgtggccaatgtccgtcaggccgttaagaactactccgccaagctgggctacgaacatcccgtggccattgctctggataccaagggtcccgagatccgtaccggtctgatcggaggcagcggcaccgccgagatcgaactgaagaagggcgagaccatcaagctgtccaccaacaaggacttcctggagaagggctcccttgaggtggtctatgtggactacgagaacatcgtcaacgtggtgaagcccggcaaccgcgtcttcgtcgacgacggtttgatctctttggtggtcaaggaggtgaccaaggatactgtcacctgcgaggtggagaacggcggctctctgggatcccgcaagggcgtcaacttgcccggtgtacccgtggatctgccagccgtctctgagaaggacaagagcgatcttcagttcggtgtggagcaggacgtggacatgatctttgcttcgttcatccgcaacgccgccgctctgaccgaaatccgcaaggttcttggcgagaagggaaagaacattaagattatttcgaagatcgagaaccagcagggcatgcacaacctggatgagatcattgaggctggtgatggtattatggtggcccgtggcgatctcggtattgagatcccagctgagaaggtcttcttggcccagaaggccatgattgctcgctgcaacaaggccggcaagcccgtcatctgcgccactcaaatgctggagtccatggtgaagaagccgcgcccaactcgcgctgagatctccgatgtggccaacgccgtccttgatggtgccgattgcgtcatgttgtccggtgagaccgcgaagggcgagtaccctctggagtgcgtcctgacaatggccaagacctgcaaggaggctgaggctgctctgtggcaccagaacctgttcaacgatctggtgcgtggtgccactactctggatgctgcccatgctgccgccattgctgctgttgaggctgccactaaggctaaggctgccgccatcgtagtgatcactaccagcggcaagtcggccttccaggtcagcaagtaccgcccacgttgccccattattgccgtgacccgattcccgcagactgcccgtcaggcccatctgtaccgcggcctggtgcccctcatctacaaggagcctgctctcagcgactggctgaaggatgtggatgtgcgcgtccagttcggtctgcaggtcggcaagaagaacggattcatcaagaccggcgactccgtggtcgtggttactggctggaagcagggctccggattcaccaacaccatccgcattgtgtag

SEQ ID NO: 269 - protein, 530 aa, Drosophila ananassae
MVNVTIYDQAPQLKPNEVPQNMAAGADSQLEHMCRLQFDSPVPHVRLSGIVCTIGPASRSVEMLEKMMATGMNIARMNFSHGSHEYHAETVANVRQAVKNYSAKLGYEHPVAIALDTKGPEIRTGLIGGSGTAEIELKKGETIKLSTNKDFLEKGSLEVVYVDYENIVNVVKPGNRVFVDDGLISLVVKEVTKDTVTCEVENGGSLGSRKGVNLPGVPVDLPAVSEKDKSDLQFGVEQDVDMIFASFIRNAAALTEIRKVLGEKGKNIKIISKIENQQGMHNLDEIIEAGDGIMVARGDLGIEIPAEKVFLAQKAMIARCNKAGKPVICATQMLESMVKKPRPTRAEISDVANAVLDGADCVMLSGETAKGEYPLECVLTMAKTCKEAEAALWHQNLFNDLVRGATTLDAAHAAAIAAVEAATKAKAAAIVVITTSGKSAFQVSKYRPRCPIIAVTRFPQTARQAHLYRGLVPLIYKEPALSDWLKDVDVRVQFGLQVGKKNGFIKTGDSVVVVTGWKQGSGFTNTIRIV

SEQ ID NO: 270 - DNA, 1602 bp, Drosophila erecta
  CDS (1)..(1602)
atggtgaacgtaaccatctacgatgaggctccgcagctgaagcccaacgaagtaccgcaaaacatggcagccggagctgatacccaactggagcacatgtgccgtctgcagttcgactcgccagtgccccatgtgcgtctgtccggaatcgtgtgcaccatcggacctgcctccagcagcgtggagatgctggaaaagatgatggccaccggcatgaatgttgcgcgcatgaacttctctcacggatcgcacgagtaccacgccgccaccgtggccaatgtgcgtcaggcggtgaagaactactcggccaagctgggctacgaacatcccgtggccattgccctggacaccaagggacccgagatccgtaccggtctgatcgcaggtagcggcaccgccgagattgagctgaagaagggcgagaagattaagctgaccaccaacaaggaattcctggagaagggctccctggagattgtgtacgtggactacgtgaacattgtcaatgtggtgaagcccggcaaccgtgtgttcgtcgatgacggccttatctcactgattgtgcgcgaggtgggcaaggatacccttacctgcgaggtggagaacggcggctctctgggttcccgcaagggtgtgaacctgccaggcgtgcccgtcgatctgcccgctgtctccgagaaggataagagcgatctgctgttcggtgtggagcaggaagtggacatgatctttgcttcgttcatccgtaacgccgctgctttgaccgagatccgcaaggttcttggcgagaagggcaagaacatcaagatcatttccaagatcgagaaccagcagggtatgcacaacctggacgagatcatcgaggccggtgatggcatcatggtggcccgtggagatctgggtattgagattcccgccgagaaggtgttcctcgcccagaaggccatgattgcccgttgcaacaaggctggcaagcctgtgatctgcgccacccagatgttggagtccatggtgaagaagccacgtcccactcgcgctgagatctctgatgtggccaacgccgtgctcgatggtgccgattgcgtcatgttgtctggtgagaccgccaagggcgaatacccgctggagtgcgtcctgaccatggccaagacctgcaaggaggccgaggctgccctctggcaccagaacctcttcaacgacttggttcgcggcgctggtaccatcgatgcccctcacgcagctgccatcgctgccgttgaggctgccaccaaggccaaggcctccgccatcgtggtgatcaccaccagcggcaagtcggccttccaggtgagcaagtaccgcccacgctgccccatcatcgcggtcacccgtttcgcgcagaccgcccgtcaggcccatctctaccgtggcctggtgccactcatctacaaggagcctgctcttgatgactggctgaaggatgtggacatgcgcgtgcaattcggtttgcaggtcggaaagaagaacggcttcatcaagaccggcgactccgtcgtggtggtcaccggctggaagcagggctccggcttcaccaacaccatccgcattgtcaccgtcgaataa

SEQ ID NO: 271 - protein, 533 aa, Drosophila erecta
MVNVTIYDEAPQLKPNEVPQNMAAGADTQLEHMCRLQFDSPVPHVRLSGIVCTIGPASSSVEMLEKMMATGMNVARMNFSHGSHEYHAATVANVRQAVKNYSAKLGYEHPVAIALDTKGPEIRTGLIAGSGTAEIELKKGEKIKLTTNKEFLEKGSLEIVYVDYVNIVNVVKPGNRVFVDDGLISLIVREVGKDTLTCEVENGGSLGSRKGVNLPGVPVDLPAVSEKDKSDLLFGVEQEVDMIFASFIRNAAALTEIRKVLGEKGKNIKIISKIENQQGMHNLDEIIEAGDGIMVARGDLGIEIPAEKVFLAQKAMIARCNKAGKPVICATQMLESMVKKPRPTRAEISDVANAVLDGADCVMLSGETAKGEYPLECVLTMAKTCKEAEAALWHQNLFNDLVRGAGTIDAPHAAAIAAVEAATKAKASAIVVITTSGKSAFQVSKYRPRCPIIAVTRFAQTARQAHLYRGLVPLIYKEPALDDWLKDVDMRVQFGLQVGKKNGFIKTGDSVVVVTGWKQGSGFTNTIRIVTVE

SEQ ID NO: 272 - DNA, 1608 bp, Drosophila grimshawi
  CDS (1)..(1608)
atggttaacgtatccatttatgacgaggctccgacgctaaagcccaacgaagtaccgcaaaacatggctgccggagctgatacccaattggaacacatgtgccgcctgcagttcgactcgcccgttccccatgtgcgtctgtccggcattgtgtgcaccattggccccgcatcgcgcagcgtcgagatgttggagaagatgattgccaccggcatgaatgtggcccgtatgaatttttcgcacggatcgcacgaatatcacgccgagacagtggccaatgtgcgtacggctgtcaagaactattcggccaagttgggctacgagcatcccgttgccattgctttggataccaagggtcctgaaatccgtactggtctcattgccggcagcggtacagctgagattgatctaaagaagggcgataccatcaagttgtccaccaacaaggatttccttgagaatggctccccggaggtaatctatgtggactatgtgaacatcgtcaacgttgttaaaccgggcaatcgtgtctttgtcgacgatggtctcatctcgctggtggtgcgcgaagtaagcaaggacaccgttgtctgcgaggtggagaacggtggtgcactcggctcccgcaagggtgtcaatctgcccggcgtccccgtcgatttgcccgctgtgtccgagaaggacaagtctgacttgctcttcggcgtagaacaggatgtggacatggtctttgcttctttcattcgcaatgctgccgctctgacagaaattcgcaatgtgctgggcgagaagggcaagaacatcaagatcatctccaagattgagaaccaacagggcatgcacaatctggacgaaattattgaggctggtgatggcatcatggttgcccgtggtgatctgggcattgagatacccgccgagaaggtgttcctcgctcagaaggcaatgattgcacgttgcaacaaggctggcaaaccagttatttgcgccacccagatgctggagtccatggtgaagaagccgcgtcccacgcgtgccgaaatctctgatgtggccaatgcagtgctcgatggcgccgactgtgtcatgttgtctggcgagacagccaagggcgaatatccgctggagtgtgtgctgaccatggccaagacctgcaaggaggctgaagctgctctgtggcatcagaatctgtttaccgatttagttcgtggcgcctctgcaaatactttggatgctccacatgcggcggcaattgctgccgtcgaggcggccaacaaagccaaggcagctgccattgtggtgatcaccaccagcggcaagtccgccttcctggtgagcaaatatcgcccacgttgccccattattgccgttacgcgtttcccgcaaaccgctcgtcaggctcacctgtaccgtggcctggttccactcatttacaaggaagctgctcagcccgattggctgaaggatgtcgatttgcgtgtccagttcggtttgcaggtgggcaagaagaacggcttcatcaaaactggggattctgttgtcattgttaccggctggaagcagggatccggcttcaccaacaccattcgtattgtaaccgtcgaataa

SEQ ID NO: 273 - protein, 535 aa, Drosophila grimshawi
MVNVSIYDEAPTLKPNEVPQNMAAGADTQLEHMCRLQFDSPVPHVRLSGIVCTIGPASRSVEMLEKMIATGMNVARMNFSHGSHEYHAETVANVRTAVKNYSAKLGYEHPVAIALDTKGPEIRTGLIAGSGTAEIDLKKGDTIKLSTNKDFLENGSPEVIYVDYVNIVNVVKPGNRVFVDDGLISLVVREVSKDTVVCEVENGGALGSRKGVNLPGVPVDLPAVSEKDKSDLLFGVEQDVDMVFASFIRNAAALTEIRNVLGEKGKNIKIISKIENQQGMHNLDEIIEAGDGIMVARGDLGIEIPAEKVFLAQKAMIARCNKAGKPVICATQMLESMVKKPRPTRAEISDVANAVLDGADCVMLSGETAKGEYPLECVLTMAKTCKEAEAALWHQNLFTDLVRGASANTLDAPHAAAIAAVEAANKAKAAAIVVITTSGKSAFLVSKYRPRCPIIAVTRFPQTARQAHLYRGLVPLIYKEAAQPDWLKDVDLRVQFGLQVGKKNGFIKTGDSVVIVTGWKQGSGFTNTIRIVTVE

SEQ ID NO: 274 - DNA, 1608 bp, Drosophila mojavensis
  CDS (1)..(1608)
atggttaacgtaacaatttatgatgaggcaccgaagctgaagccaaacgaagtaccacaaaacatggctgccggagctgagagccaattggagcatatgtgccgcctgcagttcgactcgcctgtgccccatgtgcgtctgtcgggaattgtgtgcaccatcggacccgcatcgcgcagtgtcgagatgctggagaagatgatcgccactggcatgaatgtggcgcgcatgaacttctctcatggctcgcacgaataccacgctgagacggtggccaatgtgcgacaggctgttaagaactattcggccaagctgggatacgagcacccagttgctatcgccctggataccaagggtcccgagatccgtactggtctcatcggcggcagcggcactgctgagattgagctgaagaagggcgagaccattaagctgaccaccaacaaagaattcctagagaagggctctctggagattgtctatgtggactacgtgaacattgtcaacgtggtgaagccaggcaatcgcgtgtttgtcgacgatggactcatctcgctggttgtgcgcgaggtctccggggacacggtgacttgcgaggtggagaacggtggtgctcttggctcccgcaagggtgtcaatctccccggcgtgcccgtcgacttgccagctgtgtccgagaaggacaagtctgacttgcagttcggtgtagagcaggatgtggacatgatctttgcatcgtttattcgcaatgctgccgctctgaccgaaatccgcaaagttttgggcgagaagggcaagaacatcaagatcatctctaagattgagaaccagcagggcatgcacaatctggacgagatcattgaggccagtgacggtatcatggtcgctcgtggtgatcttggcattgagatacccgccgagaaggtgttcctggcccaaaaggcaatgatcgcacgttgcaacaaggccggcaagcccgttatttgcgctactcagatgttggagtccatggtgaagaaaccacgtcccactcgtgccgaaatctcggacgtggccaacgctgtgctcgatggcgctgattgtgtcatgttgtctggtgagacagctaagggtgactaccctctggagtgtgtattgaccatggccaaaacttgcaaggaggccgaggctgccctgtggcaccaaaatctatttgcggatttggtgcgcgcagcctccgcaaccactctggatgctccccatgctgcggctattgccgctgtcgaggcagccaacaaggccaaggcagccgccattgtggtgatcaccaccagcggcaagtccgcattcctggtgagcaagtatcgcccacgttgccccatcattgccgtcacgcgtttcgcgcaaactgctcgccaggctcatctgtaccgtggcttggtgccacttatctacaaggagcctgccctcagcgactggctaaaggatgttgatgtgcgtgtccagttcggcttgcaagtgggcaagaagaacggcttcatcaaggctggcgactctgtggtcattgtcactggctggaagcagggctccggcttcaccaacaccattcgtattgtcaccgtcgaataa

SEQ ID NO: 275 - protein, 535 aa, Drosophila mojavensis
MVNVTIYDEAPKLKPNEVPQNMAAGAESQLEHMCRLQFDSPVPHVRLSGIVCTIGPASRSVEMLEKMIATGMNVARMNFSHGSHEYHAETVANVRQAVKNYSAKLGYEHPVAIALDTKGPEIRTGLIGGSGTAEIELKKGETIKLTTNKEFLEKGSLEIVYVDYVNIVNVVKPGNRVFVDDGLISLVVREVSGDTVTCEVENGGALGSRKGVNLPGVPVDLPAVSEKDKSDLQFGVEQDVDMIFASFIRNAAALTEIRKVLGEKGKNIKIISKIENQQGMHNLDEIIEASDGIMVARGDLGIEIPAEKVFLAQKAMIARCNKAGKPVICATQMLESMVKKPRPTRAEISDVANAVLDGADCVMLSGETAKGDYPLECVLTMAKTCKEAEAALWHQNLFADLVRAASATTLDAPHAAAIAAVEAANKAKAAAIVVITTSGKSAFLVSKYRPRCPIIAVTRFAQTARQAHLYRGLVPLIYKEPALSDWLKDVDVRVQFGLQVGKKNGFIKAGDSVVIVTGWKQGSGFTNTIRIVTVE

SEQ ID NO: 276 - DNA, 1602 bp, Drosophila sechellia
  CDS (1)..(1602)
atggtgaacgtaaccatctacgatgaggccccgcagctgaagcccaacgaagtaccccaaaacatggccgcaggagctgatacccaactggagcacatgtgccgtctgcagttcgactccccagtgccccatgtgcgtctctccggaatcgtgtgcaccatcggacctgcctccagcagcgtcgagatgctggagaagatgatggccaccggcatgaacatcgcgcgcatgaacttctctcacggatcgcacgagtaccacgccgccactgtggccaatgtgcgccaggcggtgaagaactactcggccaagctgggctacgaacaccccgtggccattgccctggacaccaagggacccgagatccgtaccggtctgattggaggcagcggcaccgccgagattgagctgaagaagggcgagaagatcaagctgaccaccaacaaggaattcctggagaagggctctttggagattgtgtacgtggactacgagaacattgtcaatgtggtgaaacccggcaaccgggtgttcgtcgatgatggtctgatctcactgattgtgcgcgaggtgggcaaggattccctcacctgcgaggtggagaacggcggctctctgggttcccgcaagggtgtgaacctgccaggcgtgcccgtcgatctgcctgccgtctctgagaaggataagagcgatctgctgttcggtgtggagcaggaagtggacatgatctttgcttcgttcatccgcaacgccgctgctttgaccgagatccgcaaggttcttggcgagaagggcaagaacatcaagatcatttccaagattgagaaccagcagggcatgcacaacctggacgagatcatcgaggccggtgatggcattatggttgcccgtggagatctgggtattgagattcccgctgagaaggtgttcctcgcccagaaggccatgattgcccgatgcaacaaggctggcaagcctgtgatctgcgccacccagatgttggagtccatggtgaagaaaccacgtcccactcgcgctgagatctctgatgtggccaacgccgtgctcgatggtgctgattgcgtcatgttgtctggtgagaccgccaagggcgagtacccgctggagtgcgtcctgaccatggccaagacctgcaaggaggccgaggctgccctctggcaccagaacctcttcaacgacttggttcgcggcgctggtaccatcgatgcctctcacgcggctgccatcgctgccgttgaggctgccaccaaggccaaggcctccgccatcgtggtgatcaccaccagcggcaagtcggccttccaggtgagcaagtaccgcccacgctgccccatcatcgcggtcacccgtttcgcgcagaccgcccgtcaggcccatctctaccgcggcctggtgccactcatctaccaggagcctgctcttggtgactggctgaaggatgtggacgtgcgcgtgcagttcggtctgcaggtcggaaagaagaacggcttcatcaagaccggcgattccgtcgtggtggttaccggctggaagcagggttccggcttcaccaacaccatccgcattgtcaccgtcgaataa

SEQ ID NO: 277 - protein, 533 aa, Drosophila sechellia
MVNVTIYDEAPQLKPNEVPQNMAAGADTQLEHMCRLQFDSPVPHVRLSGIVCTIGPASSSVEMLEKMMATGMNIARMNFSHGSHEYHAATVANVRQAVKNYSAKLGYEHPVAIALDTKGPEIRTGLIGGSGTAEIELKKGEKIKLTTNKEFLEKGSLEIVYVDYENIVNVVKPGNRVFVDDGLISLIVREVGKDSLTCEVENGGSLGSRKGVNLPGVPVDLPAVSEKDKSDLLFGVEQEVDMIFASFIRNAAALTEIRKVLGEKGKNIKIISKIENQQGMHNLDEIIEAGDGIMVARGDLGIEIPAEKVFLAQKAMIARCNKAGKPVICATQMLESMVKKPRPTRAEISDVANAVLDGADCVMLSGETAKGEYPLECVLTMAKTCKEAEAALWHQNLFNDLVRGAGTIDASHAAAIAAVEAATKAKASAIVVITTSGKSAFQVSKYRPRCPIIAVTRFAQTARQAHLYRGLVPLIYQEPALGDWLKDVDVRVQFGLQVGKKNGFIKTGDSVVVVTGWKQGSGFTNTIRIVTVE

SEQ ID NO: 278 - DNA, 1602 bp, Drosophila willistoni
  CDS (1)..(1602)
atggttaacgtatccatttatgatgaggcacctaaactaaagcccaacgaagtaccgcaaaatatggcagccggagcagatagccaactggagcatatgtgccgccttcagttcgattcgccagtgccccatgtccgtctatccggcattgtgtgcaccattggacctgcctcgcgcagcgtcgagatgttggagaagatgatggccaccggcatgaatattgcccgcatgaatttctctcatggatcccatgaatatcacgccgaaaccgttgccaatgtccgtcaggccgttaagaactattctgccaaattgggctacgaacatccagtggccattgccctcgacaccaagggacccgagatccgtactggtctaattggaggaagtggcacagctgaaattgagttgaagaagggagagtccatcaaattgtcaaccaacaaggatttcctagagaagggatctctggaagttgtctatgtagattacgaaaacattgtgaatgtcgttaagcccggtaaccgtgtcttcgttgatgatggtctcatctctttggttgtgcgtgaagtgtccaaggacaccatcacttgcgaggtcgaaaacggcggttctttgggttcccgcaagggtgtcaatttgcccggtgtccccgtcgacttgcccgctgtatctgagaaggataagtccgatttgcagttcggtgtggagcaggatgtcgatatgatctttgcttctttcatccgcaatgctgctgctcttactgagatccgtaaggtgttgggcgagaagggcaagaacatcaagatcatctcgaaaatcgagaaccaacagggcatgcacaatttggatgaaattattgaagctggtgatggtattatggtggctcgcggtgacttgggtatcgagattcccgctgaaaaggtgttcctcgcccaaaaggcaatgatcgctcgttgcaacaaggccggcaagcctgttatttgcgctacccaaatgttggagtccatggtgaagaagccacgtcccacacgtgccgaaatctctgatgtggctaacgccgtgctggatggcgctgattgtgtcatgttgtctggtgagacagccaagggcgagtaccccttggagtgtgtcttgacaatggccaagacttgcaaggaggccgaggcagctctctggcatcagaacttgtttgccgatttggtccgcagtgccagcactttggatgctgcccatgctgccgccattgctgctgttgaggctgccaacaaggctaaggctgccgccattgtggtcatcactaccagtggcaagtctgctttccaagtgagcaaataccgcccacgttgccccatcattgcggtgactcgtttccctcagaccgctcgtcaggctcatctctaccgcggactggtgccgcttatctacaaggaacccgctcttgccgattggctgaaggatgtcgatgttcgcgtccaattcggtctgcaggttggtaagaagaatggcttcatcaagaccggagattccgtggtcattgtgactggctggaagcagggttccggcttcaccaacaccattcgcattgtgaccgttgaataa

SEQ ID NO: 279 - protein, 533 aa, Drosophila willistoni
MVNVSIYDEAPKLKPNEVPQNMAAGADSQLEHMCRLQFDSPVPHVRLSGIVCTIGPASRSVEMLEKMMATGMNIARMNFSHGSHEYHAETVANVRQAVKNYSAKLGYEHPVAIALDTKGPEIRTGLIGGSGTAEIELKKGESIKLSTNKDFLEKGSLEVVYVDYENIVNVVKPGNRVFVDDGLISLVVREVSKDTITCEVENGGSLGSRKGVNLPGVPVDLPAVSEKDKSDLQFGVEQDVDMIFASFIRNAAALTEIRKVLGEKGKNIKIISKIENQQGMHNLDEIIEAGDGIMVARGDLGIEIPAEKVFLAQKAMIARCNKAGKPVICATQMLESMVKKPRPTRAEISDVANAVLDGADCVMLSGETAKGEYPLECVLTMAKTCKEAEAALWHQNLFADLVRSASTLDAAHAAAIAAVEAANKAKAAAIVVITTSGKSAFQVSKYRPRCPIIAVTRFPQTARQAHLYRGLVPLIYKEPALADWLKDVDVRVQFGLQVGKKNGFIKTGDSVVIVTGWKQGSGFTNTIRIVTVE

SEQ ID NO: 280 - DNA, 1602 bp, Drosophila yakuba
  CDS (1)..(1602)
atggtgaacgtaaccatctatgatgaagctccgcagctgaagcccaacgaagtaccgcaaaacatggccgcaggagctgatacccaactggagcacatgtgccgtctgcagttcgactcgccagtgccccatgtgcgtctgtccggaatcgtgtgcaccatcggacctgcctccagcagcgtggagatgctggagaagatgatggccaccggcatgaacgtcgcgcgcatgaacttctctcacggatcgcacgagtaccacgccgccaccgtggccaatgtgcgccaggcggttaagaactactcggccaagctgggctacgaacaccccgtggccattgccctggacaccaagggacccgagatccgtaccggtctgatcggaggcagcggcaccgccgagattgagctgaagaagggcgagaagatcaagctgaccacaaacaaggaattcctggagaagggctccctggagattgtgtacgtggactacgagaacattgtcaatgtggtgaagcccggcaaccgagtgttcgtcgatgacggtctgatctcactgattgtgcgcgaggtgggcaaggataccctcacctgcgaggtggagaacggtggctctctgggttcccgcaagggtgtgaacctgccaggcgtgcccgtcgatctgcccgccgtctccgagaaggataagagcgatctgctgttcggtgtggagcaggaagtggacatgatctttgcatcgttcatccgcaacgccgctgctttgaccgaaatccgcaaggttcttggcgagaagggcaagaacatcaagatcatttccaagatcgagaaccagcagggcatgcacaacttggacgagatcatcgaggccggtgatggtatcatggtggcccgtggagatctgggtattgagattcccgccgagaaggtgttcctcgcccagaaggccatgattgcccgttgcaacaaggctggcaagcctgtgatctgcgccacccagatgttggagtccatggtgaagaagccacgtcccactcgtgctgagatctctgatgtggccaacgctgtgctcgatggtgccgattgcgtcatgttgtctggtgagaccgccaagggcgagtacccgctggagtgcgtcctgaccatggccaagacctgcaaggaggccgaggctgccctctggcaccagaacctcttcaacgacttggttcgcggcgctggtaccatcgatgcctctcacgcggctgccatcgctgccgttgaggctgccaccaaggccaaggcctccgccatcgtggtgatcaccaccagcggcaagtcggccttccaggtgagcaagtaccgcccacgctgccccatcatcgcggtcacccgtttcgcgcagaccgcccgtcaggcccatctctaccgtggcctggtgccacttatctacaaggagcccgctcttggtgactggctgaaggatgtggacgtgcgcgtgcagttcggcttgcaggtcggaaagaagaacggcttcatcaagaccggagactccgtcgttgtggtcaccggctggaagcagggctccggcttcaccaacaccatccgcattgtcaccgtcgaataa

SEQ ID NO: 281 - protein, 533 aa, Drosophila yakuba
MVNVTIYDEAPQLKPNEVPQNMAAGADTQLEHMCRLQFDSPVPHVRLSGIVCTIGPASSSVEMLEKMMATGMNVARMNFSHGSHEYHAATVANVRQAVKNYSAKLGYEHPVAIALDTKGPEIRTGLIGGSGTAEIELKKGEKIKLTTNKEFLEKGSLEIVYVDYENIVNVVKPGNRVFVDDGLISLIVREVGKDTLTCEVENGGSLGSRKGVNLPGVPVDLPAVSEKDKSDLLFGVEQEVDMIFASFIRNAAALTEIRKVLGEKGKNIKIISKIENQQGMHNLDEIIEAGDGIMVARGDLGIEIPAEKVFLAQKAMIARCNKAGKPVICATQMLESMVKKPRPTRAEISDVANAVLDGADCVMLSGETAKGEYPLECVLTMAKTCKEAEAALWHQNLFNDLVRGAGTIDASHAAAIAAVEAATKAKASAIVVITTSGKSAFQVSKYRPRCPIIAVTRFAQTARQAHLYRGLVPLIYKEPALGDWLKDVDVRVQFGLQVGKKNGFIKTGDSVVVVTGWKQGSGFTNTIRIVTVE

SEQ ID NO: 282 - DNA, 1461 bp, Trichoplax adhaerens
  CDS (1)..(1461)
atgactagaaatactggcatcatctgtactattggaccggcatcacgcactgttgacaaattagttcagttgataagaaatggtatgaatatagctcgactaaatttttcccatggaactcatgattaccatagagaaactatcaataatatcagagaagcaataaggcgtagtccattgtttcgtactgttgcaattgctcttgatactaagggtccggaaattcgcactggtttaattgctggcagcggtacaggagaagtcgaattgaaaactggaaatgccttcaaacttagtttaagtgaaagcgattataaaaatggaagtactgcaggcacttatgttgattacaaaaatttaaccaaagtgctatctcttggcagcaaaatttacatagacgatgggcttatttctttgttggttacggaaattggacctgattttgtcatgactaaaattgaaaatggtggctctcttggaagtcacaaaggagttaatttgcctaatgctatagttgacttgccagctgtttccgagcgagacaaaaatgatttacgatttggcgtagaaatggaggttgatatggtttttgcatcctttatccgtaaaggagcagatgttcgtgctgtaagggctgctatgggtgaatatggtgatagagttcgaatcatttcaaaaattgaaaatcatgaaggcgttagcaatattgatgacattatcactgcaagtgatggtattatggtagcacgaggtgaccttggaattgaaatacctccagaaaaagtaatcattgctcagaaaatgatgatcggacggtgtaatagaattggaaaaccagtcatttgtgcaacccagatgttagagagtatgatatcaaagccacggcctactagagcagaagtatctgatgtagccaacgctgtgctagatggtgcagactgcgtaatgttgtctggtgaaactgcgaaaggagcatacccagttgaggcagtaaagatcatgcacaaagtctgcttagaagctgaagcagccatatttcatagaattttatttgatgaacttcgtgcaagtactccgactcctacaataacggctgaaacttgtgctattgccgcagtagatgcctcgttcaagcagtgtgctagtgccatcatcgtccttacaacaactggccggtctgctgagttgctttctcgatttcgaccgagatcaccgattattgctgttacgcgcagtcctcaagctggaaaacaattgcatctttatcgtggtttattccctcttatctacactaaggaacgtctatcaaattggtctgacgatactgatgctaggatagactttgctatagaagaaggcaagcgactgggcatccttgaagaaggtagtcccgtcattcttgttacgggttggaaggcaggttccggccataccaatactatacgtgttactagagcttga

SEQ ID NO: 283 - protein, 486 aa, Trichoplax adhaerens
MTRNTGIICTIGPASRTVDKLVQLIRNGMNIARLNFSHGTHDYHRETINNIREAIRRSPLFRTVAIALDTKGPEIRTGLIAGSGTGEVELKTGNAFKLSLSESDYKNGSTAGTYVDYKNLTKVLSLGSKIYIDDGLISLLVTEIGPDFVMTKIENGGSLGSHKGVNLPNAIVDLPAVSERDKNDLRFGVEMEVDMVFASFIRKGADVRAVRAAMGEYGDRVRIISKIENHEGVSNIDDIITASDGIMVARGDLGIEIPPEKVIIAQKMMIGRCNRIGKPVICATQMLESMISKPRPTRAEVSDVANAVLDGADCVMLSGETAKGAYPVEAVKIMHKVCLEAEAAIFHRILFDELRASTPTPTITAETCAIAAVDASFKQCASAIIVLTTTGRSAELLSRFRPRSPIIAVTRSPQAGKQLHLYRGLFPLIYTKERLSNWSDDTDARIDFAIEEGKRLGILEEGSPVILVTGWKAGSGHTNTIRVTRA

SEQ ID NO: 284 - DNA, 1590 bp, Ciona intestinalis
  CDS (1)..(1590)
atgtcttcgaacactgatgcattctaccaaaaccagcagcaacaagggcaatcccagacagcagttactttacttcagcactcctgtgagttgaacatcgacagtgaaccttcaacatgcagaaatacttctattgtttgcaccatcggacctgcatcaaacaaagtggaaacattaaagaacatgatcatatgtggaatgaacattgctcgaatgaacttttcacatggcacacacgagtaccatggacaaaccattgcaaatgtacgagcggctgctgaaagtttcaaatctaacccggtttactacagaccaattggaattgctcttgataccaaagggcctgaaatccggactggtttgttgaagggtggtggtagcgcagatgtggaattagtgaaaggaaacacaattaaactttcactggatgaggaaaactttgagaaaggagatgcttcttgtatttatgttgattacaagaatcttaacaaagttattaatattggaaatcgcatttttgttgatgacggtttgatttctttgttggtgaaagaaaaaggtacagactattgcatttgtgaaattgaaaatggaggtttgctcggttctaagaaggggattaatttacctgggattgaagtggatttgcccgctgtatctgagaaggataaaggagacttacgttttggagtggaacaaggtgttgatatggtgtttgcttcctttattcgaaaagctgatgatgtgaaagctgtaagggatgttcttggtgaagatggaaaaaatattaaaattatttccaagattgaaaatcatgaaggtgtaatgaagattgatgagatcatcgaagccagtgatggtatcatggttgccagaggtgatatgggaattgaaattccagcagaaaaagtgttcatcgctcaaaaaatgttgatcggaaaatgcaacctgaagggcaaaccggtaatctgtgcgacacaaatgttagaaagcatgatcactaaaccaagaccaacaagagctgaggcatcagatgttgcaaacgctgtgctggatggttccgactgtgtcatgcttagtggagagaccgcgaaaggcagctatcctctggaatgtgtgaagatgcaacatcagattgcaagagaagctgaagctgctattttccacaagaatgtgtttgaggagttgcgtatgtcacgaccttttgctacggatccaaccgaagcaattgctagtgctgtggttgaagcatctttcaagtgccaggctgctggcataatcgttttgactcgatctggtcaatctgctgcgcttgtttcaagctatcgaccacgtgcaccaatcttaactgtaacaagatttgaacaaactgccagacaagttcatctatggagaggatgcttcccaatacttttccagaaaccagtgatctcaccgtggtctgatgatgttgatgctagagtccagtttgctgtggaggttggaaagcaaagaaagttcatgaaaagtggagattttgttattgttgtgactgggtggcaacctgggtctgggttcactaacacaatgagagttgtgaagatcgagtag

SEQ ID NO: 285 - protein, 529 aa, Ciona intestinalis
MSSNTDAFYQNQQQQGQSQTAVTLLQHSCELNIDSEPSTCRNTSIVCTIGPASNKVETLKNMIICGMNIARMNFSHGTHEYHGQTIANVRAAAESFKSNPVYYRPIGIALDTKGPEIRTGLLKGGGSADVELVKGNTIKLSLDEENFEKGDASCIYVDYKNLNKVINIGNRIFVDDGLISLLVKEKGTDYCICEIENGGLLGSKKGINLPGIEVDLPAVSEKDKGDLRFGVEQGVDMVFASFIRKADDVKAVRDVLGEDGKNIKIISKIENHEGVMKIDEIIEASDGIMVARGDMGIEIPAEKVFIAQKMLIGKCNLKGKPVICATQMLESMITKPRPTRAEASDVANAVLDGSDCVMLSGETAKGSYPLECVKMQHQIAREAEAAIFHKNVFEELRMSRPFATDPTEAIASAVVEASFKCQAAGIIVLTRSGQSAALVSSYRPRAPILTVTRFEQTARQVHLWRGCFPILFQKPVISPWSDDVDARVQFAVEVGKQRKFMKSGDFVIVVTGWQPGSGFTNTMRVVKIE

SEQ ID NO: 286 - DNA, 1593 bp, Drosophila pseudoobscura pseudoobscura
  CDS (1)..(1593)
atggtgaacgtaaccatatacgatgaggcgccccagctgaagcccaatcaagtaccacaaaacatggcagccgcagctgatacccaactggagcacatgtgccgcctgcagttcgattcgcccattccccatgtgcgtctgtccggcatcgtgtgcaccatcggcccggcctcgagcagcgtcgagatgttggagaagatgatggccaccggcatgaacattgcccgcatgaacttctcgcacggctcccacgagtatcacgcccagacggtggccaatgtccgccaggcggtgaagaactactcggccaaggttggctacgagcaccccgtggccattgccctggacaccaagggacccgagatccgtactggtctgattggcggcagcggcaccgccgagatcgagctgaagaagggcgataccattaagctgtccaccagcaaggacttcctggagaagggctccctggaggtggtctatgtggactacgagaacatcgtgaaggttgtcaagcccggcaatcacatcttcgtcgacgacggcctcatttccttggtggtgcgcgaggtgagcaaggacactgtcacctgcgaggtggagaacggcggctctctgggctcccgcaagggtgtgaatctgcccggcgtgccggtggatctgcccgccgtgtccgagaaggacaagtccgatctgcagtttggtgtggaacaggatgtcgacatggtctttgcctcgttcatccgcaatgccgctgctctcgctgagatccgcaaggtgctgggcgagaagggcaagaacatcaagatcatctcgaagatcgagaaccagcagggcatgcacaatctggatgagattatcgaggctggagacggcatcatggttgcccgtggagatttgggcattgagatcccagccgagaaggtgttcctggcccaaaaggccatgattgcccgctgcaacaaggccggcaagcccgtgatctgcgccacccagatgttggagtccatggtgaagaagccccgcccaactcgcgctgaaatctctgatgtggccaatgccgtgctcgatggcgccgactgcgtcatgttgtccggcgagacagccaagggcgagtaccccctggagtgtgtcctgaccatggccaagacctgcaaggaggccgaagctgctctctggcatgcgaatctgtttgccgatctggtgaaaggcgtgtccgtcctggatgctgctcatggtgtggccattgccgccgttgaggccgccaccaagaccaaggctgccgccattgtggtgatcaccaccagcggaaagtccgccttccaagtgagcaagtaccgcccacgctgccccatcattgccgttactcgtctgccccagacggcccgacaggcccatctctaccgtggcctggtgccccttatctacaaggagccaccacagagcgactggttgaaggatgtggaccagcgtgtccagttcggtgtccaggtgggcaagaagaacggcttcatcaagaccggcgacgctgtggtcgttgtcacaggctggaagcagggctccggcttcaccaacaccattcgcattgtgtaa

SEQ ID NO: 287 - protein, 530 aa, Drosophila pseudoobscura pseudoobscura
MVNVTIYDEAPQLKPNQVPQNMAAAADTQLEHMCRLQFDSPIPHVRLSGIVCTIGPASSSVEMLEKMMATGMNIARMNFSHGSHEYHAQTVANVRQAVKNYSAKVGYEHPVAIALDTKGPEIRTGLIGGSGTAEIELKKGDTIKLSTSKDFLEKGSLEVVYVDYENIVKVVKPGNHIFVDDGLISLVVREVSKDTVTCEVENGGSLGSRKGVNLPGVPVDLPAVSEKDKSDLQFGVEQDVDMVFASFIRNAAALAEIRKVLGEKGKNIKIISKIENQQGMHNLDEIIEAGDGIMVARGDLGIEIPAEKVFLAQKAMIARCNKAGKPVICATQMLESMVKKPRPTRAEISDVANAVLDGADCVMLSGETAKGEYPLECVLTMAKTCKEAEAALWHANLFADLVKGVSVLDAAHGVAIAAVEAATKTKAAAIVVITTSGKSAFQVSKYRPRCPIIAVTRLPQTARQAHLYRGLVPLIYKEPPQSDWLKDVDQRVQFGVQVGKKNGFIKTGDAVVVVTGWKQGSGFTNTIRIV

SEQ ID NO: 288 - DNA, 1578 bp, Penicillium marneffei ATCC 18224
  CDS (1)..(1578)
atggctaccaccgcgttagaccacctctccaaccggatgaagctggaatggtattcccagcttaataccgagatggctccagagggcaactaccgtcgtacctccatcatctgtaccattggccccaagactaactccgtcgagaagatcaatgagctccgcaaagctggtctcaacgttgttcgcatgaacttctctcacggctcatacgagtaccaccaatctgttatcgaccatgcccgcgaggctgagcgcgtccaggccggtcgcccagttgccattgctcttgacaccaaaggtcctgagatccgtaccggaaacaccgttgacgacaaggactaccccatctctgctggaaccgtgttcaatgtcaccaccgatgaccaatacgctactgccagtgacaacaagaacatgtatgtcgactacaagaacatcagcaaggtcattgagcccggcaagctcatctatgtcgatgacggtattctctctctcaaagtcctcgaagtcgttgacgacaagactgtccgcgttcagtgcctcaacaacggcaacatctcctcccgcaagggtgtcaaccttcccggcactgatgtcgatttgcccgctctttccgagaaggacaagaacgacttgcgctttggtgtcaagaacagggtcgacatggtctttgcatcattcatccgtcgcggtgaagatattaaggaaatccgtaaggtgcttggcgaggaaggcaaggagattcagatcattgccaagatcgagaaccaacaaggtgtcaacaactttgatgaaattctcgaggagaccgacggtattatggtcgctcgtggtgatcttggtatcgagattcctgcccccaaggtcttcattgcccagaagatgatgatcgccaagtgtaacttgaagggcaagcccgttatctgcgctacccagatgttggagtccatgacatacaaccctcgccccactcgtgctgaagtgtccgatgttgccaacgccgttcttgacggtgctgactgtgtcatgttgtccggagagactgcaaagggtaactaccccaaagaggctgttaccatgatgagcgagacttgcttgctggctgaagtggctgttcctcatttcagcatctttgacgagttacgcactctctgccctcgtcctgccgataccgttgaggctattgctatgtctgctgtcagcgccagtttggaactgaacgctggtgccatccttgtcttgaccaccagtggtaagaccgctcgtctgctcgccaagtaccggcccgtttgccctattatcatgatcacccgtaacgaagccgcatcccggtattctcacttgtaccgtggtgtctatcccttctacttccctgagtccaagcccgacttcaacgtcaagatttggcaggaggatgtcgaccgtcgtttgaagtggggtatccacaacggtatcaagcttggtgtcatccagaagggtgctagcgtcgtctgtgttcaaggatggcgcggtggtatgggccacaccaacaccattcgtgtggttcctgccgaggataacttgggtcttgagcagtaa

SEQ ID NO: 289 - protein, 525 aa, Penicillium marneffei ATCC 18224
MATTALDHLSNRMKLEWYSQLNTEMAPEGNYRRTSIICTIGPKTNSVEKINELRKAGLNVVRMNFSHGSYEYHQSVIDHAREAERVQAGRPVAIALDTKGPEIRTGNTVDDKDYPISAGTVFNVTTDDQYATASDNKNMYVDYKNISKVIEPGKLIYVDDGILSLKVLEVVDDKTVRVQCLNNGNISSRKGVNLPGTDVDLPALSEKDKNDLRFGVKNRVDMVFASFIRRGEDIKEIRKVLGEEGKEIQIIAKIENQQGVNNFDEILEETDGIMVARGDLGIEIPAPKVFIAQKMMIAKCNLKGKPVICATQMLESMTYNPRPTRAEVSDVANAVLDGADCVMLSGETAKGNYPKEAVTMMSETCLLAEVAVPHFSIFDELRTLCPRPADTVEAIAMSAVSASLELNAGAILVLTTSGKTARLLAKYRPVCPIIMITRNEAASRYSHLYRGVYPFYFPESKPDFNVKIWQEDVDRRLKWGIHNGIKLGVIQKGASVVCVQGWRGGMGHTNTIRVVPAEDNLGLEQ

SEQ ID NO: 290 - DNA, 1536 bp, Schizosaccharomyces japonicus yFS275
  CDS (1)..(1536)
atgatttcttccttcaagagcaacaagcaatggctttcttccctcagcactgagaccaacattgctcccatcaaccgccgtacctccatcatttgcaccatcggtcccaagaccaacagcgtcgagaagctcgctgctctccgtgatgctggtatgaacgttgttcgtatgaacttctcccacggttcttacgagtaccaccaatctgtcattgacaacgctcgcaaggccgctgccaccaagcccgagtggccccttgccattgcccttgacaccaagggtcccgagatccgtactggtctcactgtcggtgagcaagactaccccatctctgctggccacgagatgatcttcaccactgatgacgcctatgccaccaagtgtgacgacaagatcatgttcgttgactacaagaacattgttaaggtcattgaggtcggtaagaccatctacgtcgatgacggtatcctttccttcactgtcctcgagaagatcgatgacaagaacttgaaggtccgtgtcaacaacaacggtaagatctcctccaagaagggtgtcaacttgcccaagactgatgtcgacttgcccgctctttccgagaaggacaaggctgatctccgcttcggtgtcaagaacggtgtcgacatgatcttcgcctctttcatccgtcgtgctgaggacgttctcgctatccgtgaggttctcggtgaggatggtaaggacatcaagatcatcgtcaagattgagaaccaacaaggtgtcaacaacttcgactctatcctcgaggttactgacggtgttatggttgcccgtggtgacttgggtattgagatccctgctcctcaagtcttcgtcgctcaaaagatgatgatggccaaggctaacattgccggcaagcccatcatctgtgccactcaaatgctcgagtctatgacctacaacccccgccctacccgtgctgaggtttctgatgtcggtaacgctatccttgacggtgctgactgtgtcatgctttccggtgagactgccaagggttgctaccccattgaggccgtcacctacatggccgagactgcccgtgttgctgagaactccatcgcttacggtcaacaataccaagagctcttcgccattgccaagaagcccttgtgccccactgagaccaccgctgctgccgctgtcgctgcttccctcgagaacggtgccaaggccatcgttgtcctctccaccactggtaccaccccccgtctcgtctccaagtaccgccctgcctgccccatcatcttggtcacccgcaacgcccaaaaggcccgccaagctcacctcaaccgtggtgtctaccccttcgtctacgagaaggctcccgttgctgctgagggcagtgagtggcaaaaggatgttgacgctcgtgttgccttcggtgctgagcgcgctatctcttacggtctcctcaagaagggtgatgacattgttgtcatccaaggttggacctctggtgctggcaagtcttccatgatccgcctcaccaaggcctaa

SEQ ID NO: 291 - protein, 511 aa, Schizosaccharomyces japonicus yFS275
MISSFKSNKQWLSSLSTETNIAPINRRTSIICTIGPKTNSVEKLAALRDAGMNVVRMNFSHGSYEYHQSVIDNARKAAATKPEWPLAIALDTKGPEIRTGLTVGEQDYPISAGHEMIFTTDDAYATKCDDKIMFVDYKNIVKVIEVGKTIYVDDGILSFTVLEKIDDKNLKVRVNNNGKISSKKGVNLPKTDVDLPALSEKDKADLRFGVKNGVDMIFASFIRRAEDVLAIREVLGEDGKDIKIIVKIENQQGVNNFDSILEVTDGVMVARGDLGIEIPAPQVFVAQKMMMAKANIAGKPIICATQMLESMTYNPRPTRAEVSDVGNAILDGADCVMLSGETAKGCYPIEAVTYMAETARVAENSIAYGQQYQELFAIAKKPLCPTETTAAAAVAASLENGAKAIVVLSTTGTTPRLVSKYRPACPIILVTRNAQKARQAHLNRGVYPFVYEKAPVAAEGSEWQKDVDARVAFGAERAISYGLLKKGDDIVVIQGWTSGAGKSSMIRLTKA

SEQ ID NO: 292 - DNA, 1584 bp, Neurospora crassa OR74A
  CDS (1)..(1584)
atggccgctactgcgcttgaccatctcagcctcggcggcaagattcagtggctcgctcagcttaacactgagttccagcccgctcgcgagttccgtcgcacttccatcatctgcaccattggtcccaagaccaactcggtcgaggccatcaacaagctccgcgatgctggtctcaacgtcgttcgcatgaacttctcccacggaagctacgagtatcaccagtccgtcattgacaatgctcgccaggctgagaaggttcatcccggccgccctattgccattgcccttgacaccaagggccctgagatccgtaccggcaacaccaagaacgatgaggatattcccatctccgccggtaccatccttaacatcaccactgatgaaaagtacaaggatgagtgcactatcgagcacatgtacgtcgactatgtcaacatcaccaaggtcattgctcctggccgtatcatctacgtcgacgatggtgtcctcgctttcgaggtcctcgagattgtcgatgacaagaccatcaaggttaaggcccgcaacaacggctacatctcctcccgcaagggtgtcaaccttcccaacaccgatgtcgatctccctgctctttccgagaaggataaggccgatctcaggttcggtgtcaagaacaaggtcgacatggtctttgcttcttttatccgtcgcggccaggacatcaaggacattcgtgaggtccttggcgaggatggcaagcagatccagatcattgccaagatcgagaacaggcagggtctcaacaactttgctgagattctcgccgagaccgatggtgtcatggttgcccgtggtgacttgggtattgagatccccgccgccgaggtgttcgctgcccagaagaagatcatcgccatgtgcaacattgccggcaagcccgtcatctgcgctacccagatgctcgagtccatgatcaagaaccccagacccaccagagccgagatcagcgatgtcggtaacgctgttaccgatggtgctgactgcgtcatgctttctggtgagaccgccaagggtgcttaccccaccgaggccgtccgtgagatgagcgaggccgttcttaaggccgagaacaccatcccctacgtcagccacttcgaggagctttgcagcttggccaagcgccccgtctccattgtcgagtcctgcgccatggcctctgtccgcgcctcccttgaccttaacgccgctgccattcttgttctctccacctccggcgagtccgctcgtctcatctccaagtaccgccctgtgtgccccatcatcatgatcaccaggaacgactctgcttcgaggtacgcccacctttaccgtggcgtctaccccttccttttccccgagtccaagcccgactttagcaaggtcaactggcaggaggatgttgatcgtcgcatcaagtggggtctcagccacggtattggcctcaaggtcctcaacgagggcgaaaccgttgtcgttgttcagggctggaagggtggtatgggtaacaccaacaccttccgtatcgttaaggccgatgtcaaccacctcggtcttggccagccttaa

SEQ ID NO: 293 - protein, 527 aa, Neurospora crassa OR74A
MAATALDHLSLGGKIQWLAQLNTEFQPAREFRRTSIICTIGPKTNSVEAINKLRDAGLNVVRMNFSHGSYEYHQSVIDNARQAEKVHPGRPIAIALDTKGPEIRTGNTKNDEDIPISAGTILNITTDEKYKDECTIEHMYVDYVNITKVIAPGRIIYVDDGVLAFEVLEIVDDKTIKVKARNNGYISSRKGVNLPNTDVDLPALSEKDKADLRFGVKNKVDMVFASFIRRGQDIKDIREVLGEDGKQIQIIAKIENRQGLNNFAEILAETDGVMVARGDLGIEIPAAEVFAAQKKIIAMCNIAGKPVICATQMLESMIKNPRPTRAEISDVGNAVTDGADCVMLSGETAKGAYPTEAVREMSEAVLKAENTIPYVSHFEELCSLAKRPVSIVESCAMASVRASLDLNAAAILVLSTSGESARLISKYRPVCPIIMITRNDSASRYAHLYRGVYPFLFPESKPDFSKVNWQEDVDRRIKWGLSHGIGLKVLNEGETVVVVQGWKGGMGNTNTFRIVKADVNHLGLGQP

SEQ ID NO: 294 - DNA, 1587 bp, Magnaporthe grisea 70-15
  CDS (1)..(1587)
atggctaccgcccttgaccacctctacattggcggccgcatcaactggctggcccagttgaacacggctgcccagcctgacaagaactaccgccgttcttccatcatctgcaccattggccccaagaccaactcggtcgaggccatgaacgacctgcgcaaggccggcatgaacgtcgtccgcatgaacttctcccacggaagctacgagtaccaccagtccgttatcgacaatgcgcgtgaggctgagaagcagatgcccggccgtcagctcgccattgctctcgacaccaaaggccccgagatccgtaccggcaacaccaagaacgatgaggacctgcccatctcggccggcaaggagcttaactttaccactgatgagcagtacgccaccagctgtgacacggacaatgtctacgtcgactacaagaacatcaccaaggtcattgagaagggacgcattatttatgtcgacgatggtgtcttggcttttgaggttctcgatgtgattgacgagaagaccgtccgcgtccgtgcccgcaacaacggcttcatctgctccaagaagggtgtcaacctgcccaacaccgacgttgacctgcccgccctttccgagaaggacaaggccgacttgaggtttggtgtcaagaacaacgtcgacatggtctttgcttcgttcatccgccgcggccaggacatcaaggatatccgtgaggttctcggccaggatggcgcccacatccagatcattgccaagattgagaaccgtcaaggcctgaacaacttccctgagatcctcaaggagactgatggcgtcatggttgcccgtggtgacctgggtattgagatccctgccgccgaggttttcgcggctcagaagaagatgattgctctgtgcaacatggccggcaagcccgtcatctgcgctactcagatgctcgagtccatgatcaagaacccccgccccacccgtgccgagatcagcgatgttggcaacgccgtcaccgacggttcggactgtgtcatgctttccggtgagacggccaagggtagctacccctgtgaggccgtcagggagatgagcgatgcttgtctcaaggctgagaacacgatcccgtacgtcagccactttgaggagatgtgcggtgctgtccaccgcccagtcagcattgtcgagtcgtgcgccatggccgctgttcgtgcctcgcttgacatcaacgctggcggcatcatcgtcctctctacctcgggcgtctcggcacgtctcctgtccaagtaccgcccggtctgccccatcttcatggtcacccgcaacgcctcggcatcaaggtacagccacttgtaccgtggtgtctacccattcctgttccctgaggccaagcccgacttctccaaggtcaactggcaggaggatgtcgaccgccgcatcaagtggggtgtcaagcacgccctcgatctgggtgtgcttgagaagaacgactcgattgtcgtcgtccagggctggaagggcggcatgggcaacaccaacaccatccgtgtgctcaaggccgataccgagagccttggaattggccaggctgacatttaa

SEQ ID NO: 295 - protein, 528 aa, Magnaporthe grisea 70-15
MATALDHLYIGGRINWLAQLNTAAQPDKNYRRSSIICTIGPKTNSVEAMNDLRKAGMNVVRMNFSHGSYEYHQSVIDNAREAEKQMPGRQLAIALDTKGPEIRTGNTKNDEDLPISAGKELNFTTDEQYATSCDTDNVYVDYKNITKVIEKGRIIYVDDGVLAFEVLDVIDEKTVRVRARNNGFICSKKGVNLPNTDVDLPALSEKDKADLRFGVKNNVDMVFASFIRRGQDIKDIREVLGQDGAHIQIIAKIENRQGLNNFPEILKETDGVMVARGDLGIEIPAAEVFAAQKKMIALCNMAGKPVICATQMLESMIKNPRPTRAEISDVGNAVTDGSDCVMLSGETAKGSYPCEAVREMSDACLKAENTIPYVSHFEEMCGAVHRPVSIVESCAMAAVRASLDINAGGIIVLSTSGVSARLLSKYRPVCPIFMVTRNASASRYSHLYRGVYPFLFPEAKPDFSKVNWQEDVDRRIKWGVKHALDLGVLEKNDSIVVVQGWKGGMGNTNTIRVLKADTESLGIGQADI

SEQ ID NO: 296 - DNA, 1623 bp, Gibberella zeae PH-1
  CDS (1)..(1623)
atgcctcagaagtcagaaaaccaaaacaaaagcgtcatggctactaccgctcaggaccacctcgaattcggtggcaagatctcatggcttgcttccctcgacaccgctttccgacctgagcgcaactaccgccgctcttccatcatctgcaccattggccccaagaccaactctgtcgaggccatcaacaagctccgagattccggtcttaatgttgttcgcatgaacttttctcacggatcatacgagtaccacaagtccgtcattgaccatgctcgtgagtccgaggccacccacgctggccgcaacgtcgccattgccctcgacaccaagggtcccgagatccgaactggtaacactcccggcgatgaggacattcccatcagcgtcggacacgagatgaacatcaccaccgacgatgcttatgctaccgcttctgacgacaagaacatgtacgtcgactacaagaacattaccaatgtcattgagcccggccgtatcatctacgtcgacgatggtgtccttgctttcgatgttctcaagatcgttgacgagaagactatccttgtcaaggcccgcaacaacggtgctatctgctccaagaagggtgtcaacctgcccaacactgatgtcgatctgcctgccctttccgagaaggacaaggccgatctgaagttcggtgttgagaacaacgtcgacatggtctttgcttcatttatccgccgcgctcaggatatctacgacatccgtgacgtcctcggcgagcagggcaagcgcatccagatcatcgccaagatcgagaaccgacaaggtctcaacaacttccgcgagattctcgaggccacagacggtgtcatggtggcccgtggtgatctcggtattgagatccccgctgctgaggttttcgctgcccagaagaagctcattgccatgtgcaaccttgccggcaagcctgtcatctgcgccactcagatgctcgagtccatgatcaagaacccccgccccacccgtgccgaaatcagcgatgtcggtaacgccattactgacggtgctgactgtgtcatgctttccggtgagacggccaagggtagctacccctccgaggccgtcaaggagatgcacgaggcctgtctcaaggctgagaacaccatcccctatgtctctcacttcgaggagatgtgcactctcgtcaagcgccccgtcagcactgtcgagtcctgcgccatggccgctgtccgtgcctctctcgatcttggtgccggtggtatcattgttctctccacctctggcgagtctgcccgcatgctttccaagtaccgccccgtctgccctatcttcatggtcacccgaagccccacaacatctcgattcgctcacttgtaccgtggcgtctaccccttcctattccccgagcagaagcccgactttgctcaggtcaactggcaggaggatgttgaccgccgaatcaagtgggctgtcaacaacgctcttgagcttaacgtcctgacccccggcgacactgtcgtcgttgtccagggctggaagggcggcatgggtaacactaacaccctccgaattgtcaaggccgaccccgagcacctcggcattggccagcttcagtaa

SEQ ID NO: 297 - protein, 540 aa, Gibberella zeae PH-1
MPQKSENQNKSVMATTAQDHLEFGGKISWLASLDTAFRPERNYRRSSIICTIGPKTNSVEAINKLRDSGLNVVRMNFSHGSYEYHKSVIDHARESEATHAGRNVAIALDTKGPEIRTGNTPGDEDIPISVGHEMNITTDDAYATASDDKNMYVDYKNITNVIEPGRIIYVDDGVLAFDVLKIVDEKTILVKARNNGAICSKKGVNLPNTDVDLPALSEKDKADLKFGVENNVDMVFASFIRRAQDIYDIRDVLGEQGKRIQIIAKIENRQGLNNFREILEATDGVMVARGDLGIEIPAAEVFAAQKKLIAMCNLAGKPVICATQMLESMIKNPRPTRAEISDVGNAITDGADCVMLSGETAKGSYPSEAVKEMHEACLKAENTIPYVSHFEEMCTLVKRPVSTVESCAMAAVRASLDLGAGGIIVLSTSGESARMLSKYRPVCPIFMVTRSPTTSRFAHLYRGVYPFLFPEQKPDFAQVNWQEDVDRRIKWAVNNALELNVLTPGDTVVVVQGWKGGMGNTNTLRIVKADPEHLGIGQLQ

SEQ ID NO: 298 - DNA, 1581 bp, Aspergillus nidulans FGSC A4
  CDS (1)..(1581)
atggccgcaagctcttccctcgaccacttgtccaaccgtatgaagctggagtggcactccaagctgaatactgagatggtgccggcgaagaacttccgccgtacatccatcatctgtaccatcggtcccaagacaaactccgttgagaaaatcaatgccctccgcagagccggtctcaatgtcgttcgcatgaacttttctcacggttcatacgagtaccaccaatcagttatcgaccacgctcgggaagccgaaaagcagcaggctggccgccccgttgccattgctctggacaccaaaggacccgagatccgtaccggaaacaccgtaggtgacaaggacatcccaatcaaggctggccatgagatgaacatcagcaccgatgagcaatatgccaccgcatccgacgaccagaacatgtatgtcgattacaagaacatcaccaaggtgatttctgccggcaagctcatctatgtcgatgacggtatcctttcatttgaggttcttgaagttgtagatgacaagaccctgcgcgtccgatgccttaacaacggcaacatctcttcccgcaagggtgtcaaccttcccggtaccgacgtagacttgcccgctctttcagagaaggacatcagcgatctgaagtttggtgtcaagaacaaggtcgacatggttttcgcttccttcatccgtcgtggcagcgacatccgccacatccgtgaggtgttgggtgaagagggccgagagattcagatcatcgccaagattgagaaccaacaaggtgtcaacaatttcgacgagattctggaagagaccgacggtgtcatggtcgcccgtggtgaccttggtatcgagatccccgctcccaaggtgttcatcgcccagaagatgatgatcgccaagtgtaacatcaagggcaagcccgtcatttgtgccactcagatgcttgagtccatgacatataaccctcgtcccactcgtgctgaggtgtccgatgtggccaacgctgttctcgacggtgccgactgtgtcatgctttctggagagactgccaagggtaactacccttgcgaggctgtcacgatgatgtctgagacctgcctcctcgccgaggttgccattcctcacttcaacgtcttcgacgagctgcgaaacctggcccctcgtcccaccgacactgttgaatccatcgccatggctgctgtgagtgccagtcttgaactgaacgccggcgccattgtggtcctcaccactagtggaaacactgcccgtatgatctccaagtaccgccccgtttgccccatcatcatggtttctcgcaaccctgctgctacaaggtactcccacctgtaccgtggtgtctggcccttctacttccccgagaagaagcccgacttcaacgtcaagatctggcaggaggatgtcgaccgtcgcctcaagtggggtatcaaccacggtctcaagctcggtatcatcaacaagggcgacaacatcgtctgtgttcagggctggcgcggcggtatgggccacactaacactgtccgtgtggtccctgctgaggagaacctcggactttctgagtaa

SEQ ID NO: 299 - protein, 526 aa, Aspergillus nidulans FGSC A4
MAASSSLDHLSNRMKLEWHSKLNTEMVPAKNFRRTSIICTIGPKTNSVEKINALRRAGLNVVRMNFSHGSYEYHQSVIDHAREAEKQQAGRPVAIALDTKGPEIRTGNTVGDKDIPIKAGHEMNISTDEQYATASDDQNMYVDYKNITKVISAGKLIYVDDGILSFEVLEVVDDKTLRVRCLNNGNISSRKGVNLPGTDVDLPALSEKDISDLKFGVKNKVDMVFASFIRRGSDIRHIREVLGEEGREIQIIAKIENQQGVNNFDEILEETDGVMVARGDLGIEIPAPKVFIAQKMMIAKCNIKGKPVICATQMLESMTYNPRPTRAEVSDVANAVLDGADCVMLSGETAKGNYPCEAVTMMSETCLLAEVAIPHFNVFDELRNLAPRPTDTVESIAMAAVSASLELNAGAIVVLTTSGNTARMISKYRPVCPIIMVSRNPAATRYSHLYRGVWPFYFPEKKPDFNVKIWQEDVDRRLKWGINHGLKLGIINKGDNIVCVQGWRGGMGHTNTVRVVPAEENLGLSE

SEQ ID NO: 300 - DNA, 1527 bp, Candida glabrata CBS 138
  CDS (1)..(1527)
atggactccaggttgcatagattgattaacttagaagtcactccaggtaaggatgtcagaaagactgccattattggtaccattggtcccaagactaacaatgttgacacattagttgctttgagaaaggctggtttgaatattgtccgtatgaacttctctcatggttcttacgaataccaccaatctgtgattgataacgccagaaagtcagaacaggtttatcctggtagaccattggccattgccttggacaccaagggtccagagattagaacaggtaccaatgttgacgatgttgactacccaattccaccaaatcatgagatgatcttcactactgatgataaatatgccaaggcatgtgatgacaagatcatgtatgttgattataagaacatcaccaaagtgattcaaccaggtaaagtcatctatgttgatgacggtgttttgtcttttgaagtcttagaagtcgtcgacgataagaccttgaaggtcaaatccttaaatgcaggtaaaatttcttctcataaaggtgttaacttgccaggaactgatgtcgacttaccagctttatctgaaaaggacaaagaagatttgagattcggtgtcaaaaatggtgttcatatgatctttgcctcttttatcagaactgcacaagatgtcttgactatcagagaagtactgggcgaggaaggtaaagacataaaagtcattgttaagatagaaaaccagcaaggtgtcaataactttgatgagattttggaagtggcccatggtgttatggttgccagaggtgacttgggtatcgaaattccggcaccacaggtcttggccgttcaaaagaaacttatagctaaatgtaacttggctggtaagccagtcatttgtgctactcaaatgctagagtccatgacattcaacccaagaccaaccagagctgaagtttctgatgttggtaacgctatattggatggtgctgattgtgtcatgttgtctggagaaactgctaaaggtaattaccccatcaatgctgtcacaacaatggcagaaactgccattatcgctgaacgagccattgcttatatgccattgtatgatgatttgagaaattgtactccaaaaccaacatcgacaacagagactgttgctgcctcggcagttgcagctgttcaagagcaaggtgccaaacttattttggtactatctacttctggtaacactgcaagattagtctccaagtatagacctcaatgcccaatcgttttggttacaagaaacccaagaactgctagattttctcatttattcagaggtgtgttcccatttgtttatgaaaaagaaccactagatgactggagtgaggatacccacgctcgtttgagatttggtgtcgatatggccaaagaatatggctttgttaagaatggtgatgcagttatttccattcaaggtttcaagggtggtgttggtcactctaatactatgcgtgtttccattgtaggtggagaaaaggaggatatctga

SEQ ID NO: 301 - protein, 508 aa, Candida glabrata CBS 138
MDSRLHRLINLEVTPGKDVRKTAIIGTIGPKTNNVDTLVALRKAGLNIVRMNFSHGSYEYHQSVIDNARKSEQVYPGRPLAIALDTKGPEIRTGTNVDDVDYPIPPNHEMIFTTDDKYAKACDDKIMYVDYKNITKVIQPGKVIYVDDGVLSFEVLEVVDDKTLKVKSLNAGKISSHKGVNLPGTDVDLPALSEKDKEDLRFGVKNGVHMIFASFIRTAQDVLTIREVLGEEGKDIKVIVKIENQQGVNNFDEILEVAHGVMVARGDLGIEIPAPQVLAVQKKLIAKCNLAGKPVICATQMLESMTFNPRPTRAEVSDVGNAILDGADCVMLSGETAKGNYPINAVTTMAETAIIAERAIAYMPLYDDLRNCTPKPTSTTETVAASAVAAVQEQGAKLILVLSTSGNTARLVSKYRPQCPIVLVTRNPRTARFSHLFRGVFPFVYEKEPLDDWSEDTHARLRFGVDMAKEYGFVKNGDAVISIQGFKGGVGHSNTMRVSIVGGEKEDI

SEQ ID NO: 302 - DNA, 1506 bp, Candida glabrata CBS 138
  CDS (1)..(1506)
atggactctagattggctagattgactaccttgcaaacctctgccggtgaggaattgagaagaacctctatcatcggtaccattggtccaaagaccaacaacccagaaaccttggttgctctaagaaaggctggtttgaacattgtccgtatgaacttctcccacggttcttacgaataccacaagtctgtcattgacaatgccagaaagtccgaagagctatacccaggtagaccattggctatcgctttggacaccaagggtccagaaatcagaactggtaccaccactaacgaagtcgactacccaatcccaccaaaccacgaaatgatcttcaccaccgatgacaagtacgctaaggcttgtgacgacaagatcatgtacttggactacaagaacatcaccaaggtcatctccgctggtagaatcatctacgtcgatgacggtgttttgtctttcgaagtcttgcaagtcgttgacgacaagaccttgaaggtcaagtccttgaacgctggtaagatctgctcccacaagggtgttaacttgccaggtaccgatgtcgacttgccagctttgtctgaaaaggacaaggctgacttgagattcggtgttgaaaacggtgtccacatgatcttcgcttctttcatcagaaccgctcaagatgttttgaccatcagagaagttttgggtgaagacggtaaggacatcaagatcgtcgtcaagattgaaaaccaacaaggtgttaacaacttcgacgaaatcttgaaggtcactgacgctgtcatggttgccagaggtgacttgggtatcgaaatcccagccccagaagtcttggctgtccaaaagaagttgatcgctaagtctaacttggccggtaagccagttatctgtgctacccaaatgttggaatctatgacctacaacccaagaccaaccagagctgaagtttccgatgtcggtaacgctgttttggacggtgctgactgtgtcatgttgtccggtgaaaccgctaagggtaactacccaattaacgctgttaccactatggctgaaactgctttgatcgctgaacaagctattgcttacttgccaaactacgatgacatcagaaactgcactccaaagccaacttctaccactgaaactgttgctgcttccgccgtcgctgctgtcttcgaacaaaaggctaaggctatcatcgttttgtctacctctggtaccaccgctagattggtttccaagtacagaccaaactgcccaatcatcttggtcaccagaaacgccagaactgctagattctctcacttgtacagaggtgttttcccattcgtttacgagaaggaatctgtctctgactggactgaagatgttgaagctagattgaacttcggtatcgaacaagctatcgaattcggtatcttgaagaagggtgacacttacgtttccatccaaggtttcaaggctggtgtcggtcactccaacactttgcaagtctccactgcttaa

SEQ ID NO: 303 - protein, 501 aa, Candida glabrata CBS 138
MDSRLARLTTLQTSAGEELRRTSIIGTIGPKTNNPETLVALRKAGLNIVRMNFSHGSYEYHKSVIDNARKSEELYPGRPLAIALDTKGPEIRTGTTTNEVDYPIPPNHEMIFTTDDKYAKACDDKIMYLDYKNITKVISAGRIIYVDDGVLSFEVLQVVDDKTLKVKSLNAGKICSHKGVNLPGTDVDLPALSEKDKADLRFGVENGVHMIFASFIRTAQDVLTIREVLGEDGKDIKIVVKIENQQGVNNFDEILKVTDAVMVARGDLGIEIPAPEVLAVQKKLIAKSNLAGKPVICATQMLESMTYNPRPTRAEVSDVGNAVLDGADCVMLSGETAKGNYPINAVTTMAETALIAEQAIAYLPNYDDIRNCTPKPTSTTETVAASAVAAVFEQKAKAIIVLSTSGTTARLVSKYRPNCPIILVTRNARTARFSHLYRGVFPFVYEKESVSDWTEDVEARLNFGIEQAIEFGILKKGDTYVSIQGFKAGVGHSNTLQVSTA

SEQ ID NO: 304 - DNA, 1506 bp, Kluyveromyces lactis NRRL Y-1140
  CDS (1)..(1506)
atggaatctagattaggctggttgaccgatttgagtaccgaaactggtaccaacttgagaagaacctcaattatttgtaccattggtccaaagaccaacaacccagaaactttggttgaattgagaaaggctggtatgaacattgttcgtatgaacttctcccacggttcttacgaataccatcaatctgtcattgacaacgccagaaaatctgaagaactataccaaggtagacctctggctattgcattggacactaagggtcctgaaatcagaactggtaccaccactaacgatgtggattacccaattcctccaaaccacgaaatgatcttcactactgatgacaagtacgctaaggcttgtgacgacaaaaccatgtacgttgattacaagaacatcaccaaggtcattgaagctggtagaattatctacgtcgatgatggtgttttgtcattcgaagttttggaagttattgatgacaacaccttgaaggttaagtctttgaacgccggtaagatttgttctcacaagggtgtcaacttgccaggtaccgatgtcgatttgccagctttgtccgaaaaggacaagtctgacttgaaattcggtgtcaagaacggtgtccacatggtcttcgcctctttcatcagaaccgctcaagatgttttgactatcagagaagttttgggtgagcaaggtaaggatatcaagatcattgttaagattgaaaaccaacaaggtgtcaacaactttgacgatatcttgaaggtcactgacggtgttatggttgctagaggtgatttgggtattgaaattccagctcctcaagtgtttgctgtgcaaaagaagttgattgctaagtgtaacttggctggtaagccagttatctgtgctacccaaatgttggaatccatgacctacaacccaagaccaaccagagctgaagtctctgatgttggtaacgccgttcttgatggtgctgactgtgttatgttgtctggtgaaactgccaagggtaactacccaatcaatgccgttaagaccatggctgaaactgctttgattgctgaacaagccatcccatacatcccaacttacgatgacttaagaaacttgactccaaagccaacctcaaccactgaaactatcgctgctgcttctgtttctgctgtatttgaacaaaaggccagagctttgattgtcctatccaccaccggtgacactccaagattggttgccaagtacaagccaaatgtcccaattgttatggttactagaaacccaagagctgctagattctctcatctatatagaggtgtcttcccattcgtatacgatgaatcctctgactccgaatggactgtcgatgttgaaaagagaatcaacttcggtgtcaagaaggccaaggaattcggaattttggttgacggtgacaccattgtcaccattcaaggtttcgccgctggtgtcggtaactccaacactctacgtgtcttgaccgtttaa

SEQ ID NO: 305 - protein, 501 aa, Kluyveromyces lactis NRRL Y-1140
MESRLGWLTDLSTETGTNLRRTSIICTIGPKTNNPETLVELRKAGMNIVRMNFSHGSYEYHQSVIDNARKSEELYQGRPLAIALDTKGPEIRTGTTTNDVDYPIPPNHEMIFTTDDKYAKACDDKTMYVDYKNITKVIEAGRIIYVDDGVLSFEVLEVIDDNTLKVKSLNAGKICSHKGVNLPGTDVDLPALSEKDKSDLKFGVKNGVHMVFASFIRTAQDVLTIREVLGEQGKDIKIIVKIENQQGVNNFDDILKVTDGVMVARGDLGIEIPAPQVFAVQKKLIAKCNLAGKPVICATQMLESMTYNPRPTRAEVSDVGNAVLDGADCVMLSGETAKGNYPINAVKTMAETALIAEQAIPYIPTYDDLRNLTPKPTSTTETIAAASVSAVFEQKARALIVLSTTGDTPRLVAKYKPNVPIVMVTRNPRAARFSHLYRGVFPFVYDESSDSEWTVDVEKRINFGVKKAKEFGILVDGDTIVTIQGFAAGVGNSNTLRVLTV

SEQ ID NO: 306 - DNA, 1515 bp, Debaryomyces hansenii CBS767
  CDS (1)..(1515): transl_table=12
atgtctaacgcatcattatcttggttaaccaaattgaataccagtgaaaccccagataaggttttacgtcgttcgtctattatcggtactattggaccaaagaccaacaacgttgacgttttggtcaaattaagaaaggccggtttaaacattgttcgtatgaacttctcgcacggatcttacgaataccatcaatccgttattgacaatgctaagcaatcggaagaaatctacaagggccgtccattggccattgctttggacactaaaggtccagaaatcagaactggtactaccattgacgacaaggactacccaatcttaccaaaccatgaaatgatcttcaccactgacgaagcttacgctaagaagtgtgacgacaaggttatgttcatcgactacaagaatatcaccaaggtcatcgaagccggtaaaatcatatatattgacgatggtgttgtttcattcgaagttttacaaattgtcgacgataagaccttgaaggttagatccgtcaactccggtaagatatgttcccacaagggtgttaacttgccaggtaccgatgttgacttaccagctttatccgaaaaggataaggctgatatcaaattcggtgtcaagaacggtgtccacatgatctttgcttctttcatcagaactggtgacgatatcaaggaaatccgtaaggttttaggtgaagaaggtaaggatatccaaatcattgctaagatcgaaaatcaacaaggtgtcaacaactttgacgaaatcttagtcgaaaccgatggtgttatggttgccagaggtgatttaggtattgaaattcctgctcctcaagtctttgttgttcaaaagcaattgattgctaagtgtaacttggctgctaagccagtcatttgtgccacccaaatgttggaatccatgacttacaacccaagaccaaccagagccgaagtttctgatgtcggtaacgccattttagatggtgctgattgtgttatgttgtctggtgaaactgccaagggtaactacccattcgaagctgtctccatgatgcacaacaccgctatcattgctgaaaaggccatcgcttaccaacctttacacaacgaaatcaggtctttagctaacagaccaacacctaccaccgaaacatgtgccatggcttccgtctcagctgcctacgaacaagatgctaaggctattgttgttttgtccacctctggtttcacctccagattggtttccaaatacaagccaaatgtcccagttatgatggttacaagaaaccatagagctgctagatactgtcacttgtacagaggtgtctacccatttgtctacgaaaagaaaactgttgacaactggcaagaagatgtcgaaaacagattaagatgggctgtttctgaagctattgatttaggtatcatcaagaagggtgactccatcgttactattcaaggttggaccagaggttctggtcactctaacactgttagggttgtccaagcttaa

SEQ ID NO: 307 - protein, 504 aa, Debaryomyces hansenii CBS767
MSNASLSWLTKLNTSETPDKVLRRSSIIGTIGPKTNNVDVLVKLRKAGLNIVRMNFSHGSYEYHQSVIDNAKQSEEIYKGRPLAIALDTKGPEIRTGTTIDDKDYPILPNHEMIFTTDEAYAKKCDDKVMFIDYKNITKVIEAGKIIYIDDGVVSFEVLQIVDDKTLKVRSVNSGKICSHKGVNLPGTDVDLPALSEKDKADIKFGVKNGVHMIFASFIRTGDDIKEIRKVLGEEGKDIQIIAKIENQQGVNNFDEILVETDGVMVARGDLGIEIPAPQVFVVQKQLIAKCNLAAKPVICATQMLESMTYNPRPTRAEVSDVGNAILDGADCVMLSGETAKGNYPFEAVSMMHNTAIIAEKAIAYQPLHNEIRSLANRPTPTTETCAMASVSAAYEQDAKAIVVLSTSGFTSRLVSKYKPNVPVMMVTRNHRAARYCHLYRGVYPFVYEKKTVDNWQEDVENRLRWAVSEAIDLGIIKKGDSIVTIQGWTRGSGHSNTVRVVQA

SEQ ID NO: 308 - DNA, 1548 bp, Yarrowia lipolytica CLIB122
  CDS (1)..(1548)
atgatttacaccgccaattcgtccccttccaccaacctgcagtggctcagtaccctgaacacggatgacattcccaccaagaactaccgaaagtcgtccatcattggtactatcggtcccaacacaaactccgccgagatgatctccaagcttcgacaagctggtctcaacattgttcgaatgaacttctcccacggctcgtacgagtaccaccagtccgtcattgagaacgcccgagagtccgagcagcagttccagggccgacccctggccattgctctcgacaccaagggccccgagatccgaaccggtgtcaccaaggacgacaaggactgggacgtcaaggccggccatgtcatgctcttctccaccaaccccaagtacaaggaccagtgcgacgataagatcatgtacattgactacaccaacattgtcaagcagattgacattggcaagatcatcttcgttgacgacggtgttctgtccttcaaggttctcgagaagattgacggcgagaccctcaaggtcgagactctcaacaacggtaagatctcttctcgaaagggtgtcaacctccctggcaccgatgtcgatctccccgctctgtccgagaaggacaaggccgatctcaagtttggtgttgagcacggtgtcgacatgatctttgcctctttcgtccgaaccgccaacgacgtccaggccatccgagacgtgctcggcgagaagggcaagggcatccaggtcatctccaagattgagaaccagcagggtgtcaacaactttgacgagattctgaaggagaccgacggtgtcatggttgcccgaggagacttgggtatcgagatccccgccccccaggttttcattgcccagaagcagctgatcgccaagtgtaacctggccggaaagcccgtcatctgtgccacccagatgctcgattccatgacctacaacccccgacccacccgagccgaggtctctgatgtcggtaacgccgtccttgatggtgctgactgtgtcatgctgtctggtgagacggccaagggaacctaccccattgagtccgtcaagatgatgcacgagacctgtctggttgccgagaaggccattgcctatgctcctctgttcaatgagatgcgaaccctgactgtccgacccaccgagaccgtcgagaccattgctatctccgccgtgtctgcttctttcgagcagcaggcccgagctattattgtgctgtccacatcgggaacctccgcccgactgtgttccaagtatcgacccaactgtcccattcttatggtgactcgaaacgcacaggccgctcgattctcccatctgtaccgaggcgtctaccccttcatctaccacaaggcccgagcttccaaccctgccgagtggcagcacgatgttgaggagcgactcaagtggggtatggacgaggctgttgctcttggtattcttaacaagggcgatgttgttgtcgccatccagggatggaccggtggtcttggccacaccaacactctccgagttctcgagtgtgtctaa

SEQ ID NO: 309 - protein, 515 aa, Yarrowia lipolytica CLIB122
MIYTANSSPSTNLQWLSTLNTDDIPTKNYRKSSIIGTIGPNTNSAEMISKLRQAGLNIVRMNFSHGSYEYHQSVIENARESEQQFQGRPLAIALDTKGPEIRTGVTKDDKDWDVKAGHVMLFSTNPKYKDQCDDKIMYIDYTNIVKQIDIGKIIFVDDGVLSFKVLEKIDGETLKVETLNNGKISSRKGVNLPGTDVDLPALSEKDKADLKFGVEHGVDMIFASFVRTANDVQAIRDVLGEKGKGIQVISKIENQQGVNNFDEILKETDGVMVARGDLGIEIPAPQVFIAQKQLIAKCNLAGKPVICATQMLDSMTYNPRPTRAEVSDVGNAVLDGADCVMLSGETAKGTYPIESVKMMHETCLVAEKAIAYAPLFNEMRTLTVRPTETVETIAISAVSASFEQQARAIIVLSTSGTSARLCSKYRPNCPILMVTRNAQAARFSHLYRGVYPFIYHKARASNPAEWQHDVEERLKWGMDEAVALGILNKGDVVVAIQGWTGGLGHTNTLRVLECV

SEQ ID NO: 310 - DNA, 1590 bp, Cryptococcus neoformans var. neoformans JEC21
  CDS (1)..(1590)
atggccggtaccccctcttcccagctcgcttggctctctggtctcagcaccaatttcaatgagatgtccgccgaccagaagttcctccgcaagacttccatcattgctaccattggccccaaaaccaacaacgtcgagactctcgtgcagctcgctgatgcgggcatgaacatcgttcgaatgaacttttctcatggctcctatgagtaccatcaatctgtcattgacaatgctcgtgctgctgctgccaagagcccttctggccgacccattgccatcgctctcgacaccaaaggtccagagattaggactggcttgatgaaggatgacaccgatgtccccatttctgctggccacgaattctgggtcaccaccgacaaggcttatgcagaggctggtactgccgagcacatctatattgactataccaacatcgtcaaggtcactgccccgggcaagctcatctacgttgacgatggtattctttctctccaagtcatctctatccaaggcgaaaagatccgtgtcaagtctctcaactcgggcgttctctcctctcgcaagggtgttaacctgcccaagaccgctgtggatcttcccgctctttctgaaaaggacaagtctgatcttgccttcggtgtcaagaacggtgtcgacatgatcttcgcttctttcatccgttctgccaacgatgtcaaggagattcgaaaggtcctcggccctgaaggcgccgacatcaaaatcattgtcaagattgagaacgagcagggagtgatgaacttcgatgagattctcagggagactgacggcgtcatggtcgcccgaggtgatttgggtattgaaatccccgcaagtcaggtattcatggcccaaaagatgatgattgccaagtgcaacgtcgccggcaagcctgtcatttgtgctactcagatgcttgagtccatgacttacaaccctcgacccactcgtgccgaagtttccgatgttgccaacgcggtcatcgacggtgctgactgtatcatgctttccggcgagactgccaagggcaagtatcccattgaagctgtcaagatgatggctgagactgctttccttgctgagtcttctatcgcctaccctcctcttttcgaccagctccgagctcttactcctcgacctaccgagaccgctgagactcttgctctttctgctgttgccgctgctatcgaacaggatgccggcgctatcattgtgctttcgacttccggtgtttccgccaggttgatttccaagtacaggcctgcttgtcccatcatctgtgtgacccgaaacgaacaaaccgctcgacagctccacctttcgcgaggtgtttaccccgtctggttccctgaaccccgcggtattcctgctgagaagtggcagattgacgttgacaacaggattcgatatggtctcaggatggctctcggtttgggcatcattaagcctgaggctaccgtcatggctgtccaaggatggaagggcggtcttggccacactaacacgcttcgtatcctctccgttccttctgaccccgctgacctcgacctccactctatcgagcgcgactaa

SEQ ID NO: 311 - protein, 529 aa, Cryptococcus neoformans var. neoformans JEC21
MAGTPSSQLAWLSGLSTNFNEMSADQKFLRKTSIIATIGPKTNNVETLVQLADAGMNIVRMNFSHGSYEYHQSVIDNARAAAAKSPSGRPIAIALDTKGPEIRTGLMKDDTDVPISAGHEFWVTTDKAYAEAGTAEHIYIDYTNIVKVTAPGKLIYVDDGILSLQVISIQGEKIRVKSLNSGVLSSRKGVNLPKTAVDLPALSEKDKSDLAFGVKNGVDMIFASFIRSANDVKEIRKVLGPEGADIKIIVKIENEQGVMNFDEILRETDGVMVARGDLGIEIPASQVFMAQKMMIAKCNVAGKPVICATQMLESMTYNPRPTRAEVSDVANAVIDGADCIMLSGETAKGKYPIEAVKMMAETAFLAESSIAYPPLFDQLRALTPRPTETAETLALSAVAAAIEQDAGAIIVLSTSGVSARLISKYRPACPIICVTRNEQTARQLHLSRGVYPVWFPEPRGIPAEKWQIDVDNRIRYGLRMALGLGIIKPEATVMAVQGWKGGLGHTNTLRILSVPSDPADLDLHSIERD

SEQ ID NO: 312 - DNA, 1554 bp, Apis mellifera
  CDS (1)..(1554)
atggtttccggaaaaacgatctctcatgcattatatgctcaaacccaactagatcatgtgtgtgctctggatatcgatgctcctataggagctgtccgtctttcagggattatttgtacaattggaccagcttcaagatctattgatatgcttgaaaaaatgatcgatacgggtatgaacattgctagattaaatttctcgcacggaactcatgaatatcatgctgagactattgctaatgtgcgacaagcacagaaaaacgtttcctctaaagctggattaagcattcctgtaggaattgctcttgatactaaaggtcctgaaatccgtactggacttttagaaggtggtggagctgctgaagtcgaattaaaaaaagatcaactttttaaattgtctactgataaagcatatgcagaaaaaggcacttcaagtattgtttatgttgattatgaaaatattactaaagttttgaagcctaatagtcgcgtttttgtcgatgatggtttaatttcccttaaagttactgccatccttgtaactgttgttgaaaatggtgggatgttgggttctcgtaaaggtgtcaatctaccaggtactcctgtagatttacctgctgtttctgaaaaagataagtctgatttaatattcggtgttgaacatgaagttgatatgatttttgcctcgtttatacgagatgcacacgctttgacagaaattcgaacaattcttggtgaaaaaggaaaaaatattaaagtaatatctaaaattgaaaatcatcagggcgtagtaaatattgatgaaattattgatgcttctgatggtattatggtagcacgtggtgatcttggtattgaaataccaccagagaaagtattcttagctcaaaaatctgctattagcaaatgtaataaagttggaaaaccaataatttgtgctacacaaatgcttgaatctatggtgaaaaaaccacgtgcaaccagagctgaatcatctgatgtagctaatgctattcttgatggagcagattgtgttatgttatcaggagaaactgctaaaggagattatccattggaatgtgtactcacaatggctaatatttgtaaagaagcagagtctgcaatctggcaaacacaattatttcacgagctttcaatgaaagcaatacctccaattgatgctacacatgccgtagcgattgctgttgtagaagcatctgtgaaatgtttagctagtgctattatagtaattacaactaccggccattccgcgtatttaatttctaaatacagaccacgttgcccaattattacagttactagacactcccagactgcacgacaatcacatctttatcgtgggattttgccacttcactttgaagaaccacgattagctgattgggtaaaagatgttgatgtacgtgttcagtttggtatgaaatttggcaaaaatcaaggtttcattaaacctggagatgcagttatagtagtcactggatggagaaaaggcgccggatttacgaactcacttcgtattgtgacggtcgaataa

SEQ ID NO: 313 - protein, 517 aa, Apis mellifera
MVSGKTISHALYAQTQLDHVCALDIDAPIGAVRLSGIICTIGPASRSIDMLEKMIDTGMNIARLNFSHGTHEYHAETIANVRQAQKNVSSKAGLSIPVGIALDTKGPEIRTGLLEGGGAAEVELKKDQLFKLSTDKAYAEKGTSSIVYVDYENITKVLKPNSRVFVDDGLISLKVTAILVTVVENGGMLGSRKGVNLPGTPVDLPAVSEKDKSDLIFGVEHEVDMIFASFIRDAHALTEIRTILGEKGKNIKVISKIENHQGVVNIDEIIDASDGIMVARGDLGIEIPPEKVFLAQKSAISKCNKVGKPIICATQMLESMVKKPRATRAESSDVANAILDGADCVMLSGETAKGDYPLECVLTMANICKEAESAIWQTQLFHELSMKAIPPIDATHAVAIAVVEASVKCLASAIIVITTTGHSAYLISKYRPRCPIITVTRHSQTARQSHLYRGILPLHFEEPRLADWVKDVDVRVQFGMKFGKNQGFIKPGDAVIVVTGWRKGAGFTNSLRIVTVE

SEQ ID NO: 314 - DNA, 1515 bp, Candida albicans SC5314
  CDS (1)..(1515): transl_table=12
atgtctcactcatctttatcttggttatccaacttcaatgttgaaactgttccatctaaatatttgagaagatcctcaattatcggtaccattggtccaaaaaccaacaacgtggacgttttggttaaattgagaaaagctggtttgaacgttgtcagaatgaatttctcccatggttcttatgaataccatcaatctgtcattgacaatgctagaaaatctgaagaagtctacaaaggtagaccattggccattgccttggataccaaaggtccagaaatcagaactggtactaccattggtgacaaagattacccaattccaccaaaccacgaaatgatcttcaccactgatgatgcttacaaaactaaatgtgacgacaaggtcatgtacattgactataagaacatcaccaaagtcattgctccaggtaaaatcatatatgttgatgatggtgtcttgtcatttgaagtcatctccgttgatgatgaacaaactttgaaagtcagatctcttaacgctggtaagatctcttcccacaaaggtgtcaacttgccaggtaccgatgttgatttgccagctttatcagaaaaagatatcgctgatatcaaatttggtgtcaaaaacaaggtccacatgatctttgcttcctttatcagaactgctaacgatgttttggaaattagaaaagttttgggtgaagaaggtaaggacattcaaattatctccaagatcgaaaatcaacaaggtgtcaacaactttgacgaaattttggaagttaccgatggtgttatggttgctagaggtgatttgggtattgaaattccagctccacaagtgtttgttgtccaaaaacaattgattgctaaatgtaacttggctgccaaaccagtcatttgtgccacccaaatgttggaatccatgacctacaacccaagaccaaccagagctgaagtttctgatgttggtaacgctatcttggatggtgctgactgtgttatgttgtctggtgaaaccgctaaaggtaactacccagttgaagccgtctctatgatgcacaacacttgtcttaccgctgaaaaggccattgcctacccacaattgttcaacgaattgagatcattggctaaaaaaccaactgctaccactgaaacttgtgctgttgccgctgtttctgctgcttacgaacaagatgctaaagctattgttgtcttgtccaccagtggtctttctgctagattggtttctaaatacaaaccagatgttccaattttgatggttaccagaaacgaaagagctgctaaattctcccacttgtacagaggtgtctacccattcatttacgataaaccaagtattgaaaactggcaagaagatgttgaaaacagattgagatgggctgtttctgaagctgttgaattgggaatcatttctaaaggtgactcaattgttactgtccaaggttggactagaggttctggtcactctaacactgttagaatcgtccaagcttaa

SEQ ID NO: 315 - protein, 504 aa, Candida albicans SC5314
MSHSSLSWLSNFNVETVPSKYLRRSSIIGTIGPKTNNVDVLVKLRKAGLNVVRMNFSHGSYEYHQSVIDNARKSEEVYKGRPLAIALDTKGPEIRTGTTIGDKDYPIPPNHEMIFTTDDAYKTKCDDKVMYIDYKNITKVIAPGKIIYVDDGVLSFEVISVDDEQTLKVRSLNAGKISSHKGVNLPGTDVDLPALSEKDIADIKFGVKNKVHMIFASFIRTANDVLEIRKVLGEEGKDIQIISKIENQQGVNNFDEILEVTDGVMVARGDLGIEIPAPQVFVVQKQLIAKCNLAAKPVICATQMLESMTYNPRPTRAEVSDVGNAILDGADCVMLSGETAKGNYPVEAVSMMHNTCLTAEKAIAYPQLFNELRSLAKKPTATTETCAVAAVSAAYEQDAKAIVVLSTSGLSARLVSKYKPDVPILMVTRNERAAKFSHLYRGVYPFIYDKPSIENWQEDVENRLRWAVSEAVELGIISKGDSIVTVQGWTRGSGHSNTVRIVQA

SEQ ID NO: 316 - DNA, 1584 bp, Aspergillus fumigatus Af293
  CDS (1)..(1584)
atggccgccagcaattctcttgaccacctgagcaaccgtatgaagctggaatggcacgccaagctgaacacggagatggttcctgcgaagaacttccgtcgcacctccatcatttgcaccatcggccccaagacaaactccgtcgagaagatcaatgctctccgcaaagctggtctcaacgtggttcgcatgaacttctctcatggctcgtatgagtaccaccaatccgtcatcgacaacgcccgggaggccgagagagttcagcccggacgtcctgttgccattgctcttgacactaaaggacctgaaatccgtaccggaaacaccgtcggcgacaaggatattcctatccaagctggtcacgaactcaacatcaccactgatgagaagtatgctaccgccagcgacgacaagaacatgtacctcgactacaagaacatcaccaaggtcatccaacccggcaagctgatctatgtggacgacggtattctctcatttgaggtgctcgagattgttgacgatcagacccttcgtgtcaggtgcctgaacaatggcaacatctcgtctagaaagggtgtcaacctgcccggcactgacgttgatcttcccgctctttctgaaaaggatatcaacgatctcaagttcggtgttaagaatagggttgacatgatcttcgcctcgtttatccgtcgcggaagcgacattcgtcacattcgtgaagtccttggcgaggagggcaaggagattcaaattattgccaagatcgagaaccagcaaggtgttaacaacttcgatgagattctcgaggagactgacggtgtcatggtcgcccgtggtgacttgggtatcgagatccctgcgcccaaggtcttcttggcccagaagatgatgattgccaagtgtaacatgaagggcaagcccgtcatctgtgccactcagatgctcgagtccatgacatacaacccccgccccacccgtgcggaggtatcggacgttgccaacgctgttctcgacggcgctgactgtgtcatgttgtccggagagactgccaagggcaattaccccaccgaggctgtcaagatgatgtcggagacctgcttgcttgcagaggtcgctattcctcacttccaggtctttgacgaattgcgtaaccttgctccccgccccactgacaccgttgagtctatcgccatggctgccgtcagcgccagtcttgagctcaacgctggagccattgttgtcttgaccactagcggtaaaactgctcgtcttctttccaagtatcgccctgtctgcccaatcatcatggtcactcgcaaccccatggccgcccggtactcccatctgtatcgtggtgtttggcccttcaccttccctgagaagaagcccgacttcaatgtcaagatctggcaggaggatgttgaccgccgcctcaagtggggtatttctcatgctctcaagctcggcctcatcaacaagggcgacaacatcgtctgtgtccagggctggcgcggtggcatgggacacaccaacactgtccgtgtggtccctgctgaggagaaccttggccttgctgaagagtaa

SEQ ID NO: 317 - protein, 527 aa, Aspergillus fumigatus Af293
MAASNSLDHLSNRMKLEWHAKLNTEMVPAKNFRRTSIICTIGPKTNSVEKINALRKAGLNVVRMNFSHGSYEYHQSVIDNAREAERVQPGRPVAIALDTKGPEIRTGNTVGDKDIPIQAGHELNITTDEKYATASDDKNMYLDYKNITKVIQPGKLIYVDDGILSFEVLEIVDDQTLRVRCLNNGNISSRKGVNLPGTDVDLPALSEKDINDLKFGVKNRVDMIFASFIRRGSDIRHIREVLGEEGKEIQIIAKIENQQGVNNFDEILEETDGVMVARGDLGIEIPAPKVFLAQKMMIAKCNMKGKPVICATQMLESMTYNPRPTRAEVSDVANAVLDGADCVMLSGETAKGNYPTEAVKMMSETCLLAEVAIPHFQVFDELRNLAPRPTDTVESIAMAAVSASLELNAGAIVVLTTSGKTARLLSKYRPVCPIIMVTRNPMAARYSHLYRGVWPFTFPEKKPDFNVKIWQEDVDRRLKWGISHALKLGLINKGDNIVCVQGWRGGMGHTNTVRVVPAEENLGLAEE

SEQ ID NO: 318 - DNA, 1539 bp, Tribolium castaneum
  CDS (1)..(1539)
atgagtacgcagccgaaaacaaacctcctggactacatcagtagtttggacattacagccaaaccgaaatatctgcggctaacgggaatcgtgtgtacgatcggaccagcatgccagaaggtagagattttggagaaaatgctcgaagctggaatgaacgtggcacgtttgaacttctctcacggtactcacgagtaccacgtcgatttgatcaaaaacataaggaccgctgtggacaactacagcaagagaataggccgctactgcccccttgccatcgccatcgacaccaaaggctccgaaatccgaactggagtactagaagggggcatctctgccgaagtggtcctggagaaagggtcaaaagtgaccgtgacaaccgacgaaaagtatgccaaaaagtgcaccaagagcgtcatctacgtcgattataaaaacatcaccaaggtgcagaaacccggaaaccagattttcatcgacgacggtttgattaccctcaactgtgagaaaatccaaggctcggagatcacttgctcggttgccaatgggggaaaactggggagtagtaaaggggtgaacctgccaggcgtcgagaaagacctgcccacggtttcggaaaaggacaagaaggatttgaaattcgcagttgagcagaacgtcgactgtgttttcgcctcgttcacacgaaacgccgaagaagtgcgccagattcgctccattttaggcgacagcaacattcgggtgattgccaagatcgagaacacgcaaggtgtgaagaacatggacgagattattgaagctgccgatgggattctcatcgatcggggcgacctggggatggaaatctccttccagaaggtgttcctcgcccagaaagccatcatcgcgaggtgtaacaaggttggaaagcccattattatcgccacccatttgctggaatcaatggttgataaaccaaggcctacgagagccgagagctcggatgtggccaatgctgtgctggacggtgccgactgtgtgatgctagcaggggagacggccaagggcttgtaccctgtggagtgtgtggagaccatggctttgatttgcaaagaggccgaggcagcggtgtggcaaaaacagctctttaacgacctcaaaagccagcctaaagtaccgcttgacatcgtccaaactaccgcaatatccacagttgaagcctcgatgaactcgctagccacggccatcatcgtggtcacgaaaacgggaaaatcggcacaattgttgtcaaaatacaagccaaagtgcccgattattgcagtgacgaggaatgcgcaagttgcgcgccagttacacttgttcagggcgattatgcccttgtattttgacggccaaagcccaaccgagtggttgaaaaatgtggaagtccgggttaaagccggagttagttatggaaagtcgttggggtttgttaaatcaggggatactgtaattattgtgacgggtttgcatcaagggcctggctctacaaacactcttacgttgatgactgtccaatga

SEQ ID NO: 319 - protein, 512 aa, Tribolium castaneum
MSTQPKTNLLDYISSLDITAKPKYLRLTGIVCTIGPACQKVEILEKMLEAGMNVARLNFSHGTHEYHVDLIKNIRTAVDNYSKRIGRYCPLAIAIDTKGSEIRTGVLEGGISAEVVLEKGSKVTVTTDEKYAKKCTKSVIYVDYKNITKVQKPGNQIFIDDGLITLNCEKIQGSEITCSVANGGKLGSSKGVNLPGVEKDLPTVSEKDKKDLKFAVEQNVDCVFASFTRNAEEVRQIRSILGDSNIRVIAKIENTQGVKNMDEIIEAADGILIDRGDLGMEISFQKVFLAQKAIIARCNKVGKPIIIATHLLESMVDKPRPTRAESSDVANAVLDGADCVMLAGETAKGLYPVECVETMALICKEAEAAVWQKQLFNDLKSQPKVPLDIVQTTAISTVEASMNSLATAIIVVTKTGKSAQLLSKYKPKCPIIAVTRNAQVARQLHLFRAIMPLYFDGQSPTEWLKNVEVRVKAGVSYGKSLGFVKSGDTVIIVTGLHQGPGSTNTLTLMTVQ

SEQ ID NO: 320 - DNA, 1611 bp, Tribolium castaneum
  CDS (1)..(1611)
atggttttcacgacaatttacgacaatgacgagcgcgagatggcctcttccagcgttccgcccctgcagatggaggcggccgacgccagcacccacctggaccacatgtgcgctctggacatccaatcgaaggcgccctttgtgcgcctttctggcattatttgcaccattgggccggcctcgcgcgaccccgcaatgttggagaaaatgatggagactggcatgaatatcgcacgcttgaatttctcgcacggctcgcacgagtaccacgccgagactattaaaaatataaggacggctgtggcgaattatagcaaaaaaattggaatgtcgtatcctttggccattgcgctcgacaccaaagggcccgagatcaggaccgggctgctcgaagggggcggttcagcggaagtcgaactgaaacgcggcgaaaaaatcaccctcaccaccaacaaagcgtacgctgaaaaaggcaccgccagcatcgtctacgtcgactacgaaaacatccaaaaagtgctgaaggtcggcaatcgcgtctacgtcgacgacggcctcatgtcgctcgtttgcaccgaaatcaaaggcgccgacttgatctgcaccatcgaaaacggcggaatgctgggcagtcgcaaaggcgtcaacctgcccggcgtccccgtcgacctccccgccgtttcggaaaaagacaaatccgatctgaaattcggcgtggaacaaggcgtcgacatgattttcgcctcgtttatccgaaacggaagtgcacttagcgagattcgcaatatcctcggccccgaaggcaaaaacatcctcatcatctccaaaatcgaaaaccagcaagggatgcaacacctggatgagataatcaaggctagtgacggcatcatggtggcgagaggtgacttaggcattgaaataccgacggagaaagtcttccttgcgcaaaaggccatgattgccaagtgcaacaaagtgggaaaacctgtcatttgcgccacccagatgctggaaagcatggtgaaaaagccacggcccactcgggccgaaagctccgacgttgccaatgccatcctggatggggctgattgtgtgatgctgtcgggggagacggccaagggggattaccccttggagtgtgtgcacacaatggcgaatatttgtaaagaggcagaggcggcgatttggcagaaacagttgtttcaagatcttacaagcaaggctgtgcctccaatggatgctgctcatactgtggccattgcagcagctgaggcttcgtccaagtgtttggcggctgcgattgttgtggtgacaacatcaggacgctctgcacatctcatctccaagtatagaccgaggtgtcccattattgcagttacaaggaatgcgcaaactgcaagacaggcacacttgtatagggcgattttgccgctccattacgaagccgagaggaaggacgactggctgaaggatgtcgaggctcgtgttaacacgtccatcgagttcggcaaagctcgaggtttcataaaacaaggtgacccggtgattatcgtcacagggtggaagcaaggatccggattcaccaacacgatgcgcattgtgaacgtctaa

SEQ ID NO: 321 - protein, 536 aa, Tribolium castaneum
MVFTTIYDNDEREMASSSVPPLQMEAADASTHLDHMCALDIQSKAPFVRLSGIICTIGPASRDPAMLEKMMETGMNIARLNFSHGSHEYHAETIKNIRTAVANYSKKIGMSYPLAIALDTKGPEIRTGLLEGGGSAEVELKRGEKITLTTNKAYAEKGTASIVYVDYENIQKVLKVGNRVYVDDGLMSLVCTEIKGADLICTIENGGMLGSRKGVNLPGVPVDLPAVSEKDKSDLKFGVEQGVDMIFASFIRNGSALSEIRNILGPEGKNILIISKIENQQGMQHLDEIIKASDGIMVARGDLGIEIPTEKVFLAQKAMIAKCNKVGKPVICATQMLESMVKKPRPTRAESSDVANAILDGADCVMLSGETAKGDYPLECVHTMANICKEAEAAIWQKQLFQDLTSKAVPPMDAAHTVAIAAAEASSKCLAAAIVVVTTSGRSAHLISKYRPRCPIIAVTRNAQTARQAHLYRAILPLHYEAERKDDWLKDVEARVNTSIEFGKARGFIKQGDPVIIVTGWKQGSGFTNTMRIVNV

SEQ ID NO: 322 - DNA, 1695 bp, Tribolium castaneum
  CDS (1)..(1695)
atggcgtcaacaaatgcacttcttcggtttatgacgttaatgcgcatgcgctttattacaatttattttcattactttagacgggtacaggttttagcgaaagtgcccgcttacacacaactcgaccacaactcgctgcttgacattcaatcacatccaccacaagtgcgtctcactggaataatctgcactttgggaccttcaacgacagatgtcgaaacgttggaaagaatgatcgaagctggaatgaacattgcccgcctaacactctcccacggcacccaggaaatgcacaccgaactgatccaaaacgtgagaaccgccgtcgaaaattacagcaaaagactgggagtcatgtaccccttatccctcgccctcgatatcaaaggacccgaagtccggaccggttacatggaaggcggcatcgccgccgaagtcgagctgaaaaagggcgaacaaatcaaactgacaacagacaaagcgtatctggagaagggcagctcgagcgtgatctacgtcgactacgacaacatccagaaggtggtccaacccgggaaccgtattttcctggacgatggtctcatctccctgatttgcacaagcgtccaaggctcggtcctgacatgtagtgtggaaaacgggggaatgcttggcagttgcaaaaacgtgaacctccccggaatcgatatcgacttacccgtggtgtccgaaaaagacaaggaggatttgcttttcggcgtcgaacacggcattgacaccgttcacgcctcattcatccgcaatgctgtcgatgtgtcggaggttcgagacgtgctagggcgggccggtaacaagatcttgatcatttcgaaaatcgaaaaccaccaaggtgtgcacaacatcgacgaaataatcaaagcttccgacggcattatgatcgggcgaggcgacctagcggtggaaatcggccctgagaagcttttcctcgcccagaagagcatcatagctaagtgtaacaaagcggggaaaccggtcatttgcgccaatcagctgctctactcgatgataaaacgtccaagacccactcgggccgaatgcaccgatgttgcaaacgcggtgcttgacggtgttgactgcgtgatgttgacgggggaaacttttcttggccagcacccgatcgagtgcattcgggccgcgtccaaaatttgcaaagaggccgaaggggccatttggtacaaacaccactttcgggaattgatcgggcatgcgagacctccgctagagacgtcgcatacaatttgcatagctgcagtcgaagctgcaaatcagtgtctagcagctgcgattattgtcacgtcagtttcgggacgttcggcccattcactggcaaagtatcggcccaactgccctattattttagtgacacgtgatccgactgtcgccaaacaagcgaacttattccggggaatcatcccccttttttacgaagtcgagaggaaagacgattggaggcgagatattgaagctaggatcagtttcgggatcagttttggaaagtggagggggtttgtaaggtcgggggaccccatcgtggcagtgaatgggtcacaaagggggtcggggtacactgatacgatccgagtcctgtacgttatgaggcccatagtggaaggggactgcacgtgtgataagaaaacgggtgaccaaaacgtatag

SEQ ID NO: 323 - protein, 564 aa, Tribolium castaneum
MASTNALLRFMTLMRMRFITIYFHYFRRVQVLAKVPAYTQLDHNSLLDIQSHPPQVRLTGIICTLGPSTTDVETLERMIEAGMNIARLTLSHGTQEMHTELIQNVRTAVENYSKRLGVMYPLSLALDIKGPEVRTGYMEGGIAAEVELKKGEQIKLTTDKAYLEKGSSSVIYVDYDNIQKVVQPGNRIFLDDGLISLICTSVQGSVLTCSVENGGMLGSCKNVNLPGIDIDLPVVSEKDKEDLLFGVEHGIDTVHASFIRNAVDVSEVRDVLGRAGNKILIISKIENHQGVHNIDEIIKASDGIMIGRGDLAVEIGPEKLFLAQKSIIAKCNKAGKPVICANQLLYSMIKRPRPTRAECTDVANAVLDGVDCVMLTGETFLGQHPIECIRAASKICKEAEGAIWYKHHFRELIGHARPPLETSHTICIAAVEAANQCLAAAIIVTSVSGRSAHSLAKYRPNCPIILVTRDPTVAKQANLFRGIIPLFYEVERKDDWRRDIEARISFGISFGKWRGFVRSGDPIVAVNGSQRGSGYTDTIRVLYVMRPIVEGDCTCDKKTGDQNV

SEQ ID NO: 324 - DNA, 1413 bp, Yersinia enterocolitica subsp. enterocolitica 8081
  CDS (1)..(1413): transl_table=11
atgaaaaagactaaaattgtttgtactatcggtccaaaaaccgaatccgaagaaatgctgacgaacctgctgaaagctggcatgaacgttatgcgcttaaacttctcccacggtgactatgaagaacatggtcaacgtatcaagaatatccgtgctgtcatggcaaaaactggcttgaaagccggtatcttgttggacaccaaaggcccagaaattcgcaccatgaaactggaaggcggcaaagatgctgctctgattgcaggtcagactttcactttcaccactgatcaaagcgttattggtaacaacaacatcgttgctgtgacctaccctggctttgctgctgatctgaaaattggcaacactgtgctggttgacgatggtttgatcggcatggaagtcaccgaagtcactgaaagcactgtggtatgtaaggtgctgaacaatggtgatttaggtgaaaacaaaggcgttaacttgccaggtgtttctatccaactgccagcactggctgaaaaagataaagctgacctgatctttggttgtgagcaaggcgtggacttcgttgcggcatcctttatccgtaaacgttcagacgtgctggaaatccgcgaacacctgaaagcccacggtggtgagcacattcagatcatctccaaaattgaaaaccaggaaggtctgaataacttcgacgaaatcctggaagcctccgacggtatcatggttgctcgtggtgacctgggtgttgagatcccggttgaagaagttatcttcgcgcagaagatgatgattgagaaatgtaaccgcgctcgcaaagttgttatcactgcaacgcagatgctcgattccatgatcaaaaacccacgccctacccgtgcagaagctggcgacgtggctaacgccattctggacggtacagacgccgtgatgctgtctggtgaaagtgctaagggtaagtacccattagagtctgtcaccatcatggcgaccatctgtgagcgtacagaccgtattatgcctagccgcattgatacgctgaatgataatcgtaaaatgcgtatcactgaagcggtttgccgtggtgcagtagaaaccgcagaaaaactggaagcaaaattgatcgtggtagcaactggtggcggtaaatctgccaagtcagtacgcaaatacttcccaacagcgaccattttagcactgactaccaatgaagtgaccgcgcgtcagttaatcctgaccaaaggcgtgataactcaactggtcaacgagattgcttcaacagataacttctaccgcatcggtaaagaagcagctctggcgagcggtctggcacaaaaaggcgacgttgtcgtgatggtttctggtgcgttagtgccaagtggcaccaccaatacctcttccgtgcacgttttataa

SEQ ID NO: 325 - protein, 470 aa, Yersinia enterocolitica subsp. enterocolitica 8081
MKKTKIVCTIGPKTESEEMLTNLLKAGMNVMRLNFSHGDYEEHGQRIKNIRAVMAKTGLKAGILLDTKGPEIRTMKLEGGKDAALIAGQTFTFTTDQSVIGNNNIVAVTYPGFAADLKIGNTVLVDDGLIGMEVTEVTESTVVCKVLNNGDLGENKGVNLPGVSIQLPALAEKDKADLIFGCEQGVDFVAASFIRKRSDVLEIREHLKAHGGEHIQIISKIENQEGLNNFDEILEASDGIMVARGDLGVEIPVEEVIFAQKMMIEKCNRARKVVITATQMLDSMIKNPRPTRAEAGDVANAILDGTDAVMLSGESAKGKYPLESVTIMATICERTDRIMPSRIDTLNDNRKMRITEAVCRGAVETAEKLEAKLIVVATGGGKSAKSVRKYFPTATILALTTNEVTARQLILTKGVITQLVNEIASTDNFYRIGKEAALASGLAQKGDVVVMVSGALVPSGTTNTSSVHVL

SEQ ID NO: 326 - DNA, 1791 bp, Prochlorococcus marinus str. AS9601
  CDS (1)..(1791): transl_table=11
atgtcgaatattgatttaaaaagaagaacaaaaatagtagcaactattggccctgcgacccaatctgaagagataattacaaatttaattaaagctggagtaacaacattcagattaaatttctcacatggagatcataaagatcatgctgagagaataaaaaccataagggaagtatcaaaaaagttagatatagatattggaatattgcaagatcttcaaggacctaaaatacgattaggacgctttaaagatgggccagtaaaagttaaaaaaggcgataaatttacgcttacatcaaatgaagtcgaatgtacaaatactattgcaaatgttacctacgacaaactttctcaagaagttagcgaagggaaaagaatacttttagatgatggaaaaatagaaatgattgtagaaaaagttgatacaaaagctaataatctggagtgcatggtaactgtaggaggggttctttcaaacaataaaggtgttaattttccagatgttcaattatcagtaaaagcattaacagaaaaggataaagaggatttaaaatttggtttatctgtaggagttgattggatagcactaagtttcgtaagaaatccatccgatataaatgagataaaagatttaataaacacaaatgggcattcaactccggtagtcgcaaaaatagaaaaatttgaagcaattgatcagatcgatacagttttacccttatgtgatggggttatggttgcaagaggtgatttgggagtagaaatgcctgctgaagaagttcctcttctacaaaaggagttaataagaaaagctaattcattaggtatcccaataattacagcgactcaaatgcttgattctatggcttctaatccaagaccaactagggccgaagttagtgatgttgcaaatgcaattctggatggtacagatgctgtaatgctttcaaacgaaactgcagttggcgattatcctgtagaggcagttgaaacgatggcaaccatagcaagaagaattgaaagggattatccacttaaggctattgaaagccacttacccagtacgatcccaaatgctattagtgcagcagtaagcaatatagctagacaacttgatgcaggagctataatccctttaactaaatcaggttctaccgctcgaaatgtaagtaagttcagacctccaacacctatcttggcaactactacagaaagaagtgtagcgagaagattgcaacttgtttggggagttaccccaatagtagttaaaaatgatgaaagaacagcaaagacttttagtttagctatgcaaattgctcaagagatgggcatcctaaatcaaggagatttagtagttcaaaccgcaggtacattaacaggaattagcggctctacagatttaataaaagtcggtttagtaagaaagattgtatcaagaggaatttcaataggggaaatcggtgttacaggtaaagcaaggataattaaaaataatcttgatatatccttaatttgcccaggagaaatattatttgttcccaaggaattaatgaaaaatattccactgagtaaaaatattgccggcattgttacaaaccaaaatgtaaatgatgtttacgccttttttaataaaaataataaaaagatttctacaatttgtaatttagagaatatggataatcatcaaatcagtaatggcgatcttattaccctccagcttaatgaaggtgttatatacatgggacaaattgaagatgatgatgcaatagataaatataaatatgtctag

SEQ ID NO: 327 - protein, 596 aa, Prochlorococcus marinus str. AS9601
MSNIDLKRRTKIVATIGPATQSEEIITNLIKAGVTTFRLNFSHGDHKDHAERIKTIREVSKKLDIDIGILQDLQGPKIRLGRFKDGPVKVKKGDKFTLTSNEVECTNTIANVTYDKLSQEVSEGKRILLDDGKIEMIVEKVDTKANNLECMVTVGGVLSNNKGVNFPDVQLSVKALTEKDKEDLKFGLSVGVDWIALSFVRNPSDINEIKDLINTNGHSTPVVAKIEKFEAIDQIDTVLPLCDGVMVARGDLGVEMPAEEVPLLQKELIRKANSLGIPIITATQMLDSMASNPRPTRAEVSDVANAILDGTDAVMLSNETAVGDYPVEAVETMATIARRIERDYPLKAIESHLPSTIPNAISAAVSNIARQLDAGAIIPLTKSGSTARNVSKFRPPTPILATTTERSVARRLQLVWGVTPIVVKNDERTAKTFSLAMQIAQEMGILNQGDLVVQTAGTLTGISGSTDLIKVGLVRKIVSRGISIGEIGVTGKARIIKNNLDISLICPGEILFVPKELMKNIPLSKNIAGIVTNQNVNDVYAFFNKNNKKISTICNLENMDNHQISNGDLITLQLNEGVIYMGQIEDDDAIDKYKYV

SEQ ID NO: 328 - DNA, 1791 bp, Prochlorococcus marinus str. MIT 9515
  CDS (1)..(1791): transl_table=11
atgtcgaatattgatttaaaaagaagaacaaaaattgtagcaacaattggaccagctactcagtctgaagaagtaattactgatcttataaaggctggggtaacaacattccgattaaatttttcccatggcgatcataaagatcatgaagaaaggattaaaactataagaaaagtttctaaaaatcttgatctagatgtaggaatactacaagatctgcaaggacctaaaataagactaggaagatttaaagatggtcccgttaaagtaaaaaaaggagataaatttacattgacttctaacgaagttgaatgcactaaaagtattgcaaacgttacttataatagactcgcgcaggaagttaccgaaggcaaaagaatattattagacgatggtaaaattgaaatgattgttgaaaaggttgacttaccaaataatttattaaagtgtaaagtaactgtcggtggggtactttctaacaataaaggagttaattttccagatgtgcaattatcggtaaaagctttaactgataaagatatagatgatcttgaatttggattaaccgctggagtagattggatagctctaagttttgtaagaaacccctcagatattaatgaaataaaaaatttaataaataagagtgggcaatcaatacctgtgatagcaaaaattgaaaaatttgaagcaatagatcaaatagattcaatactacccttgtgtgatggagttatggttgcaagaggagatttaggagttgaaatgccagcggaggaagttccacttttacaaaaagagttaataaggaaagctaatacatttgggatccctataatcacggctacacaaatgcttgactccatggcatcaaatcccagaccaacacgagcggaagttagtgatgtggctaacgcaattcttgatgggactgatgcagttatgctctcaaatgaaactgccgtaggtgactatcctgtagaggctgttgaaactatggctactattgccagaagaattgaaagagattatccattaaaagcaatcgagagtaatctgcctagtactatcccaaatgcaataagtgctgcagtaagcaatattgcgaggcagcttgacgctggagcaataattcctttaactaaatcaggatccacagcacgtaatgtaagtaagttcagaccacctactcctatccttgccacgactactgagaagagtgtcgcaagaagattacaacttgtgtggggagtgacaccattattagtaaaatctgacgatagaacagcaagaacatttagtattgcaatgcaaatagctcaagaaatggggattcttaagcaaggagacttagtagtacaaactgctggaactttgacaggaataagtggatctactgaccttataaaagttggcctagtaagaaaagtgataacccgaggaatatcaattggagaaataggtgttacaggtaaagcgagaaatatagaaacaagtcttgatttatcattaataactcacggtgaaatattatttgtatctaagaatctattaaaagatttaccttactcaaaaaaaatcacaggcatcgttactgatgaaactgttgatgaatgttataagatttttaaaaaaaataaaattaaaatatcttcaatttgtaatttatctactattgataatcaggtaacaaatggtgatgtaataacactacaacttaatgaaggagtaatttatatgggacagatagaggaagatgaagaggcactagacagatataaatatgtctag

SEQ ID NO: 329 - protein, 596 aa, Prochlorococcus marinus str. MIT 9515
MSNIDLKRRTKIVATIGPATQSEEVITDLIKAGVTTFRLNFSHGDHKDHEERIKTIRKVSKNLDLDVGILQDLQGPKIRLGRFKDGPVKVKKGDKFTLTSNEVECTKSIANVTYNRLAQEVTEGKRILLDDGKIEMIVEKVDLPNNLLKCKVTVGGVLSNNKGVNFPDVQLSVKALTDKDIDDLEFGLTAGVDWIALSFVRNPSDINEIKNLINKSGQSIPVIAKIEKFEAIDQIDSILPLCDGVMVARGDLGVEMPAEEVPLLQKELIRKANTFGIPIITATQMLDSMASNPRPTRAEVSDVANAILDGTDAVMLSNETAVGDYPVEAVETMATIARRIERDYPLKAIESNLPSTIPNAISAAVSNIARQLDAGAIIPLTKSGSTARNVSKFRPPTPILATTTEKSVARRLQLVWGVTPLLVKSDDRTARTFSIAMQIAQEMGILKQGDLVVQTAGTLTGISGSTDLIKVGLVRKVITRGISIGEIGVTGKARNIETSLDLSLITHGEILFVSKNLLKDLPYSKKITGIVTDETVDECYKIFKKNKIKISSICNLSTIDNQVTNGDVITLQLNEGVIYMGQIEEDEEALDRYKYV

SEQ ID NO: 330 - DNA, 1509 bp, Lactococcus lactis subsp. cremoris MG1363
  CDS (1)..(1509): transl_table=11
atgaataaacgtgtaaaaatcgtctcaactcttggacctgctgtcgaaattcgtggtggcaaaaaatttggtgaaagcggctattggggagaatctcttgacgtcgaagcatcagcaaaaaacattgcagctttgattgaagaaggcgctaatgtcttccgtttcaacttctcacacggtgaccatcctgaacaaggtgctcgtatggcaactgttcaccgcgctgaagaaatcgctggtcacaaagtaggtttcttgcttgatactaaaggtcctgaaatgcgtacagaactcttcactgacggtgctgattcaatcagcgttgttactggagataaattccgtgttgcaactaaacaaggtcttaaatcaactcctgaattgattgccttgaacgtagctggcggacttgacatctttgatgatgttgaaatcggtcaaactatcttgattgatgatggtaaacttggtttgtcattgactggtaaagatgcagcaactcgtgaattcgaagttgaagcacaaaatgatggtgttatcggtaaacaaaaaggtgttaacattcctaacactaaaattcctttcccagcccttgctgaacgtgacgatgcagatatccgtttcggtctttcacaacctggtggaattaactttatcgctatctcattcgtacgtactgcaaatgacgttaaagaagtacgtcgtatttgtgaagaaactggtaatccacacgtacaacttttggctaaaattgaaaaccaacaagggattgaaaaccttgatgaaatcatcgaagcagctgatggtatcatgattgctcgtggtgacatgggtatcgaagttccatttgaaatggttccagtttaccaaaaattgattatcagcaaagttaacaaagcaggtaaaattgttgtaactgcaacaaacatgcttgaatcaatgacttacaacccacgtgctacacgttcagaaatttcagacgtatttaacgctgttattgacggaactgatgctacaatgctttcaggtgagtctgctaatggtaaatacccacgcgaatcagttcgtacaatggctactgttaacaaaaatgctcaaacaatgttgaaagaatacggacgtcttcacccagaacgttacgacaaatcaactgtaacagaagttgttgctgcatcagttaaaaatgctgcagaagctatggatgttaaattgattgttgctttgactgaatctggtaacacagctcgtttgatttctaaacaccgtccagatgctgatatcttggctatcacatttgacgaaaaagttgaacgtggattgatgatcaactggggtgttatcccaatgatgactgaaaaacctgcatctactgatgacatgtttgaagttgctgaaaaagttgcattggcttctggtttggttgaagctggcgacaatatcatcatcgttgctggtgttccagttggtactggtcgcactaatacaatgcgtatccgcactgttaaataa

SEQ ID NO: 331 - protein, 502 aa, Lactococcus lactis subsp. cremoris MG1363
MNKRVKIVSTLGPAVEIRGGKKFGESGYWGESLDVEASAKNIAALIEEGANVFRFNFSHGDHPEQGARMATVHRAEEIAGHKVGFLLDTKGPEMRTELFTDGADSISVVTGDKFRVATKQGLKSTPELIALNVAGGLDIFDDVEIGQTILIDDGKLGLSLTGKDAATREFEVEAQNDGVIGKQKGVNIPNTKIPFPALAERDDADIRFGLSQPGGINFIAISFVRTANDVKEVRRICEETGNPHVQLLAKIENQQGIENLDEIIEAADGIMIARGDMGIEVPFEMVPVYQKLIISKVNKAGKIVVTATNMLESMTYNPRATRSEISDVFNAVIDGTDATMLSGESANGKYPRESVRTMATVNKNAQTMLKEYGRLHPERYDKSTVTEVVAASVKNAAEAMDVKLIVALTESGNTARLISKHRPDADILAITFDEKVERGLMINWGVIPMMTEKPASTDDMFEVAEKVALASGLVEAGDNIIIVAGVPVGTGRTNTMRIRTVK

SEQ ID NO: 332 - DNA, 1440 bp, Shewanella loihica PV-4
  CDS (1)..(1440): transl_table=11
atgttccgcagaaccaaaattgtaacgactctgggtccagcaaccgatcgtgacgacaatctacgtcgtatcatcaaagctggtgcaaacgttgttcgcctcaacttctctcatggttcacctgaagatcacctgaaacgtgccaccgacgtgcgaaatatcgccaaagagctcggtgttcacgttgccgtactgggtgatctacaaggccctaagatccgtgtatcaaccttcaaagacaacaagaaggtgcaactggatatcggtcaggcatttatcttagatgccgatctcgaaaaaggccaaggtgatgaacaccaagtgggtatcgactataaagagctaccgcaagatgtcaccatcggcgatatcctgatgctcgacgatggtcgtgttcagcttaaagtagaaaaagttgaaggtaataaggttcacaccacagtgacggttgccggtcccctgtctaacaacaagggcatcaacaagaaaggtggtggtttgtctgccgcggcgttgaccgagaaagacaagcaagacatcatcacagcagcggccatcaaggtcgactacctagcggtctctttcccacgcagcggcgccgatctgaactacgcccgtgaactggcccagaaggctggtagcaatgccctgatcgtctctaaagttgagcgcgccgaagccgttgcctctgatgaagcgatggacgatgtgatcctagcctctgacgccgtgatggttgcccgtggtgaccttggtgttgaaattggtgacgctgctctggtggctgtacagaagaaactgatcagccgttctcgccagctgaacaagagcgtgatcaccgcgactcagatgatggagtctatgatcaccagcccaatgccaacccgcgccgaagtaatggacgtggctaacgccgtgcttgatggcactgacgccgtgatgctttcggccgaaaccgctgccggtgacttccctgaagaaaccgttaaggcgatggccaacgtttgtcttggcgccgaggctcacccaagtgttcaggtgtctaagcaccgtatggacgagcgtttcacctcggttgaagaaaccatcgccctgtcgaccatgtatgcggccaaccacctggaaggcgttaaggctatcgttgccctgacagaatctggtgcgacacctcagcttatgtctcgtatcagctctgctctgcctatcctggccctatcacgtcacgatgtgactctagctaagatggcactgtaccgcggcgtacagcctgtctacttcgactcaacagcctacggcgcagacgagctagcgaagaaggcacttgaagccctgaccgaagcgggttacctcacatccggtgacatggtactgatgaccaagggtgacgcgatggaaactatcggtggcactaacacctgtaaggtactgatcgtcgcctaa

SEQ ID NO: 333 - protein, 479 aa, Shewanella loihica PV-4
MFRRTKIVTTLGPATDRDDNLRRIIKAGANVVRLNFSHGSPEDHLKRATDVRNIAKELGVHVAVLGDLQGPKIRVSTFKDNKKVQLDIGQAFILDADLEKGQGDEHQVGIDYKELPQDVTIGDILMLDDGRVQLKVEKVEGNKVHTTVTVAGPLSNNKGINKKGGGLSAAALTEKDKQDIITAAAIKVDYLAVSFPRSGADLNYARELAQKAGSNALIVSKVERAEAVASDEAMDDVILASDAVMVARGDLGVEIGDAALVAVQKKLISRSRQLNKSVITATQMMESMITSPMPTRAEVMDVANAVLDGTDAVMLSAETAAGDFPEETVKAMANVCLGAEAHPSVQVSKHRMDERFTSVEETIALSTMYAANHLEGVKAIVALTESGATPQLMSRISSALPILALSRHDVTLAKMALYRGVQPVYFDSTAYGADELAKKALEALTEAGYLTSGDMVLMTKGDAMETIGGTNTCKVLIVA

SEQ ID NO: 334 - DNA, 1737 bp, Desulfotomaculum reducens MI-1
  CDS (1)..(1737): transl_table=11
atgcgtaaaacaaaaatagtttgtaccataggaccagccagcgaaagattagaaaccattaatgaaatgatcaaagctggtatgaatgttgccagactgaacttttcgcacggttcccatgaggaacatgctaagcgtatcacaaccattcgttgtgcagcacaagagatgggacaaaatattgctattttattagataccaaaggtcctgaaatcaggctgggggattttcaggaacaaccagtgctactagaggcaggacagtcattttttttaacaaccgaaccgattataggggatcagcacggagtttccgttacatatgaggacctgtcaaaggatgtcaaaaggggagaccgtatcctggttgacgatggtctaattgaattagtagttgaagctgttgaagaaaaaaagatagtttgccgggtaatgaatggcggaaaagtttctaaccgcaaaggagtaaatttaccggatattcatgtaaacttaccggcggtaacggagaaggatattgcagatatcaaatttggcatagaacagcaagtggattttattgcggcatcctttgtacgcaaggctggggatgtcttagccattcggaaaattttggaggatgacggggctaaaattgatattattgccaagatagaaagccgagaagcagttgataatctggatgagattatccaagcatcagatggtatcatggtggcccggggtgacctaggggtagaaattccggctgaagaagtacccattattcaaaaaaaaataataaccatttgtaaccaagtaggaaagcccgtgattaccgctacccaaatgcttgattccatgattcaaaaccctcgcccgaccagggcagaggccagtgatgtggcgaatgccatctttgatggaactgacgccatcatgctatccggggaatctgccaatggcaaatatcccgttgaagctgtaaggacaatggatcgcattgccagacgttcggaacaagccctgagcgacggggctaaaacatacactaactgctttagtgttaccgatgccctaggtcaggccgtatgtactgtggccaaccaactggacgcagctgccattattactgccaccaccagtggctatacggcaaagatgatttcacgctatcgcccccaatcagccattgtggcggtgacgccggaccgaggtgtcatgagacggctgtcattggtttggggagtggttgcattaccttcaccaaagcttaccaacacagaccaaatgattgctacagcggtggataccgcagtggaacaaaaagtcgtaaagggtggagatctagtagtcatcactgcaggggtacctgtaggacttcagggaaccaccaacttgatgaagattcatactgtaggaaccatagtgtccagtggtacagggattgttgcacaggctgtgtctgggccggtaagggtatgcaatgatgctgaagaggcggctaggctggaaccaggtgaaatcctcgtaaccaacggaactgatgcaggctttgtaccattcctgaagaatgctgctgccattgtggcggaagagggagggctaacctctcacgcagcaattttaggactggagctaaaggttccaaccattgtgggagcgaaaggtgccagcggaatatttaaaaatggtgaaatcattacagtggatggtcaaagtggtgttatttacagaggaaacgccaaggttttctaa

SEQ ID NO: 335 - protein, 578 aa, Desulfotomaculum reducens MI-1
MRKTKIVCTIGPASERLETINEMIKAGMNVARLNFSHGSHEEHAKRITTIRCAAQEMGQNIAILLDTKGPEIRLGDFQEQPVLLEAGQSFFLTTEPIIGDQHGVSVTYEDLSKDVKRGDRILVDDGLIELVVEAVEEKKIVCRVMNGGKVSNRKGVNLPDIHVNLPAVTEKDIADIKFGIEQQVDFIAASFVRKAGDVLAIRKILEDDGAKIDIIAKIESREAVDNLDEIIQASDGIMVARGDLGVEIPAEEVPIIQKKIITICNQVGKPVITATQMLDSMIQNPRPTRAEASDVANAIFDGTDAIMLSGESANGKYPVEAVRTMDRIARRSEQALSDGAKTYTNCFSVTDALGQAVCTVANQLDAAAIITATTSGYTAKMISRYRPQSAIVAVTPDRGVMRRLSLVWGVVALPSPKLTNTDQMIATAVDTAVEQKVVKGGDLVVITAGVPVGLQGTTNLMKIHTVGTIVSSGTGIVAQAVSGPVRVCNDAEEAARLEPGEILVTNGTDAGFVPFLKNAAAIVAEEGGLTSHAAILGLELKVPTIVGAKGASGIFKNGEIITVDGQSGVIYRGNAKVF

SEQ ID NO: 336 - DNA, 1752 bp, Desulfotomaculum reducens MI-1
  CDS (1)..(1752): transl_table=11
atgagacgtacaaagattgtttgcaccatcggtcccgccagtgaagatgtggaaacgctgaaaaatatgatgctggcaggcatgaatgttgcaagattaaacttttcccatggtacccatgaggaccatgccaagagaattgctgctattcgccagtctgcagatgaattaaacaaaaatattgccattctgctagataccaagggtccggaaattcgtttaaagaaatttgcccaaccgccggttatcctaaaacaggatcagcaatttaccctgacaaccagggaggttaccggtgacaataccattgtgtctgtaacttatcaggatttgcccaaggatgtgaagcctggcagtcggatagctgtggcagatgggttaatcgaaatggttgtggaatctgtggagggaccagatgttcattgtagagtcgttaatggtggtcaactttccaaccagaagggagttaatttacctggtgtaaatgtaaaccttccttcgattaccgaaaaggatattgaggacattcgctttggtatagagcaaagggtagattttattgctgcatcctttattcgcaaacccggggatgtcctcgccattcgccaaatccttgaggaatatgatgcggatattgatatcatagctaagattgaaagtcgccagggtgtggagaatctgactggtattattaatgttgcagatggtatcatggtggccagaggtgacttgggcgttgaaatccctgcagaagaagtacctgtcttacaaaagacgatgattgaaatgtgcaacagggcaggtaaaccagttattactgctacacaaatgctggagtccatgacccagaatccaagaccaaccagggccgaggccagcgatgtggctaatgccatttttgatggaaccgatgcaattatgctttccggcgaaacagctgcgggtaagtatcctgtacaaaccgttgaaaccatggctcgtattgcccagcgggcagagcttgctgtaaattttgatgacctgctggaaatcagaggagctgccatacagagaacggtcaccgatggtattagccaggccgtttgcagtgtggctagggaattgggtgtaaccgccattgtaaccgcgacggccagcggacataccgccagaatgatttccaagtataggcccaaagtacctgtgattgctgtgacacccagatccaatgtgttaagaaaaatggctctggtttggggggttgttcctcttttaattgaagatgtacatggtacagatgaaatgattaatatatccgtggaagcggccctggcctccggacatattactgctggcgacctaattgttattactgccggtgtaccggtgggtgttcatggtaccaccaatatgatgaaggttcacacagtggggactctgctggccaaaggaacaggcattggccagaaagctgtcacaggtaaggttaggatttgtcgaacggcggaggaagccatggttaaggttcagccgggtgatattttggtgactatggccactgatcgtgacttcgtgtctgctatgcagaaagccaaagccgtgataacggaagaaggtggtcttacttcccatgctgccattgtgggactggaatttggcttacccgttatagtaggcgttgataacgccactggtattctaccagacgatgaaattattacggtggatagccagcgagggctgatttacggcggtgttgccagagttttatag

SEQ ID NO: 337 - protein, 583 aa, Desulfotomaculum reducens MI-1
MRRTKIVCTIGPASEDVETLKNMMLAGMNVARLNFSHGTHEDHAKRIAAIRQSADELNKNIAILLDTKGPEIRLKKFAQPPVILKQDQQFTLTTREVTGDNTIVSVTYQDLPKDVKPGSRIAVADGLIEMVVESVEGPDVHCRVVNGGQLSNQKGVNLPGVNVNLPSITEKDIEDIRFGIEQRVDFIAASFIRKPGDVLAIRQILEEYDADIDIIAKIESRQGVENLTGIINVADGIMVARGDLGVEIPAEEVPVLQKTMIEMCNRAGKPVITATQMLESMTQNPRPTRAEASDVANAIFDGTDAIMLSGETAAGKYPVQTVETMARIAQRAELAVNFDDLLEIRGAAIQRTVTDGISQAVCSVARELGVTAIVTATASGHTARMISKYRPKVPVIAVTPRSNVLRKMALVWGVVPLLIEDVHGTDEMINISVEAALASGHITAGDLIVITAGVPVGVHGTTNMMKVHTVGTLLAKGTGIGQKAVTGKVRICRTAEEAMVKVQPGDILVTMATDRDFVSAMQKAKAVITEEGGLTSHAAIVGLEFGLPVIVGVDNATGILPDDEIITVDSQRGLIYGGVARVL

SEQ ID NO: 338 - DNA, 1764 bp, Geobacillus thermodenitrificans NG80-2
  CDS (1)..(1764): transl_table=11
atgaagcggaaaacgaaaatcgtctgtaccattgggccggcaagtgaaagtgtggacaagcttgaacaactgattgaagcgggaatgaacgtagcacgcctgaatttttcgcatggcgatcacgaggaacatggacggcgcattgccaacattcgtgaggcagcgcagcgaacgggcaaaacggtcgccattttgcttgatacgaaaggcccggaaatccggacgcacaatatggaaaacggcgcgatcgaactgagagaaggagcgaagctggtcatttcgatgagcgaagtgctcggcacgccagaaaagatctcggtcacttatccgggattgatcgatgacgtatctgttggttcgaaaattttgctcgacgatgggttgatcgcccttgaggtcaatgcagttgacaagcaagccggagaaattatcacgaccgttttaaacggcggcgtgttgaaaaacaaaaaaggggtcaacgtcccgggggtgcgcgtcaacttgccggggattaccgagaaagaccgggccgatattttgtttggcattcgtcaaggaatcgactttatcgctgcctcgttcgttcgtcgagcgtccgatgtgctcgaaattcgcgagctgcttgaagcgaacgatgccctccatatccaaattatcgccaaaattgagaatgaagaaggcgtcgacaacatcgacgaaattttagaagcagccgacggcctcatggtggcccgcggtgatttaggcgtcgaaattccggctgaggaagtgccgctcatccaaaagttgttgatcaaaaagtgcaatatgctcggtaagccggtcattacagcgacgcaaatgcttgattcgatgcagcgcaacccgcggccgacgcgggcggaagcaagcgacgtcgccaacgccatttttgacggcacagatgctgtcatgctttctggggaaacggcggctggtcaatatccagttgaagcggtcagaacgatgcaccaaattgcactccgcaccgaacaggcgcttgagcaccacgatattttgtcccagcgcacaaaagaaagcgcgacgacgattaccgatgccatcggacagtcagtcgctcatacagccttaaatttagatgtagcagcgatcgtcacgccgacggtgagcgggaaaacgccgcaaatggtggcgaaataccgcccgaaagcaccgattattgctgtcacctcaaacgaagcggtatcgcgccggttggcgctcgtatggggcgtctatacgaaagaagcgcggcatgtgaacacgacggatgaaatgctcgatgtcgccgtcgatgccgcggtgcgttccggtttggtgaagcacggtgatttagtcgtcatcaccgccggggttccggtcggtgagaccggttcgacgaacttaatgaaagtgcacgtcatcagcgacttgatcgcgaaaggacaaggcatcggccgcaagtcggcgtttggcaaggccgttgtggcgaaaacagcggaagaagcgtgtcaaaaaatggtcgagggtggcattttagtcaccatcaacaccgatgccgatatgatgccggcaattgaaaaggcgtcggcgatcattaccgaggaaggcggattgacaagccatgccgcggttgttggcctaagccttggcattcctgtcgttgtcggggtgaacaatgcaacaagcttgtttaaagacgggcaagaaattacggtcgacggagggtttggtgctgtctaccgcggccacgcaagcgtcttgtaa

SEQ ID NO: 339 - protein, 587 aa, Geobacillus thermodenitrificans NG80-2
MKRKTKIVCTIGPASESVDKLEQLIEAGMNVARLNFSHGDHEEHGRRIANIREAAQRTGKTVAILLDTKGPEIRTHNMENGAIELREGAKLVISMSEVLGTPEKISVTYPGLIDDVSVGSKILLDDGLIALEVNAVDKQAGEIITTVLNGGVLKNKKGVNVPGVRVNLPGITEKDRADILFGIRQGIDFIAASFVRRASDVLEIRELLEANDALHIQIIAKIENEEGVDNIDEILEAADGLMVARGDLGVEIPAEEVPLIQKLLIKKCNMLGKPVITATQMLDSMQRNPRPTRAEASDVANAIFDGTDAVMLSGETAAGQYPVEAVRTMHQIALRTEQALEHHDILSQRTKESATTITDAIGQSVAHTALNLDVAAIVTPTVSGKTPQMVAKYRPKAPIIAVTSNEAVSRRLALVWGVYTKEARHVNTTDEMLDVAVDAAVRSGLVKHGDLVVITAGVPVGETGSTNLMKVHVISDLIAKGQGIGRKSAFGKAVVAKTAEEACQKMVEGGILVTINTDADMMPAIEKASAIITEEGGLTSHAAVVGLSLGIPVVVGVNNATSLFKDGQEITVDGGFGAVYRGHASVL

SEQ ID NO: 340 - DNA, 1419 bp, Aeromonas salmonicida subsp. salmonicida A449
  CDS (1)..(1419): transl_table=11
atgaaaaagaccaaaatcgtctgcaccataggtcccaagaccgaatccaaagaaatgctggctaaaatgctggacgccggcatgaacgtcatgcgcctgaacttctcccacggcgattacgccgagcacggtggtcgtatcaacaacctgcgcgctgttatggccgaaaccggcaagcacgcagccatactgctcgacaccaagggtccggaaatccgtaccatcaagctggaaggcggcaacgacgttgccctggtcgctggccagaccttcaccttcaccttcaccaccgaccagaccgtcattggcaacaaagacaaagtggccgtgacctatgccggtttcgccaacgacctgcgcgtcggcaaccgcatcctggtggatgacggcctgatcggcctggacgtgatcgaaatcaccgagcgtgaagtcatctgtaaagtgctgaacagcggtgatctgggcgagaacaaaggcatcaacctgccgggcgtctccatcaagctgccggccctggccgagaaagacaagcgcgacctcatcttcggttgcgagcaaggcgttgatttcgttgcggcttccttcattcgcaagaaagaagacgtgctggaaatccgtgagcacctgagagcccacggtggcgagaacatccagatcatctccaagatcgaaaaccaggaaggcctggacaacttcgacgagatcctggctgtctccgacggcatcatggtggcacgtggcgacatgggcgtggaaattccggttgaagaagtgatcttcgcccagaagatgatcatcaccaagtgcaacaaggcacgcaaagtggttatcaccgccacccagatgctggattccatgatcaagaacccgcgtccgacccgcgccgaagccggcgacgtggccaacgctatcctggacggtaccgatgcagtcatgctgtccggtgagtccgccaagggcaagtacccgctggaagccgtgaccatcatggccaccatctgcgagcgtaccgatgccgttatgccgtccaacctgtctgctgccaacgacagcaacaagctgcgcatcaccgaagccgtttgtaaaggcgcggtcgagacctccgagaagctgggcgccccgctgatcgtggttgccaccgaaggcggcaaatctgccaaggccattcgcaagtacttcccgcaagcctggatcctggccatcaccaccaacaagaaaactgcagcccaactggttctgaccaagggtgtggtgactcatgtggttgacagcatcgcctctaccgacgatttctatcgcatcggtaaagaagcagcgctggaaagcggcatgggtctgaagggtgacgtggtcgtcatggtctccggtgctctggtaccgagcggtaccaccaacaccgcctccgttcacctgctctga

SEQ ID NO: 341 - protein, 472 aa, Aeromonas salmonicida subsp. salmonicida A449
MKKTKIVCTIGPKTESKEMLAKMLDAGMNVMRLNFSHGDYAEHGGRINNLRAVMAETGKHAAILLDTKGPEIRTIKLEGGNDVALVAGQTFTFTFTTDQTVIGNKDKVAVTYAGFANDLRVGNRILVDDGLIGLDVIEITEREVICKVLNSGDLGENKGINLPGVSIKLPALAEKDKRDLIFGCEQGVDFVAASFIRKKEDVLEIREHLRAHGGENIQIISKIENQEGLDNFDEILAVSDGIMVARGDMGVEIPVEEVIFAQKMIITKCNKARKVVITATQMLDSMIKNPRPTRAEAGDVANAILDGTDAVMLSGESAKGKYPLEAVTIMATICERTDAVMPSNLSAANDSNKLRITEAVCKGAVETSEKLGAPLIVVATEGGKSAKAIRKYFPQAWILAITTNKKTAAQLVLTKGVVTHVVDSIASTDDFYRIGKEAALESGMGLKGDVVVMVSGALVPSGTTNTASVHLL

SEQ ID NO: 342 - DNA, 1449 bp, Salinispora tropica CNB-440
  CDS (1)..(1449): transl_table=11
atgggcgtgacacgccgcgcaaagattgtttgcacacttggccccgccacctcctcgccggagcgtattcgcggcctcgttgaggccggaatggatgtggcgaggctcaacttcagccacggcagccatgccgaccacgaggcggtctgccggctggttcgggaggcggccgaggcggcggggaggccggtcgcggtcctcgccgatctccagggccccaagatccggcttggccggttcgccgacggcccgcacgagtggcgcaccggtgactcggtggtgatcaccagtgatgacatcctcggtacccgggatcgggttgcctgcacctaccgcaagcttccccaggaggtgaagcccggcgaccggctgctcatcgacgacggccgagtcgcggtcgaggtcaccgacgttaccggcaacgacatccgttgcctggtcaccgagggcggaccggtctccaacaacaagggtgtgtcgctgccaaacgtagcggtcagtgtccccgcgctctcggacaaggacgccgaggacctgcggttcgccctcggcctcggtgccgacctggtggcgctctccttcgtccgttccgccgacgacatcaagcaggtccactccatcatgtccgaggagggcgtgcaccggccggtgctggccaaggtggagaagccggaggcagtggagcagcttggggcgatcgtcctggccttcgacggggtcatggtggcccgtggtgacctcggcgtggagatgccgctggaccaggtgcccctggtgcagaagcgcgcggtgcagctctgccgagagaacgccaagccggtcatcgtcgccacccagatgctcgactccatgattgagaactcccggcccacccgtgctgaggcctccgatgtggccaacgccgtgctcgacggcgcggacgcggtgatgctctccggcgagaccagcgtcgggaagtacccggtgctcaccgtgagcaccatggcaaagatcgtggcgacgacggaggccggctcgatcgcggtgcctcggctccagcacgatccacgtacccacgggggcgcgcttaccatcgccgcgtcgtcgatcgcccgggcgatcgacgccaaagccctggtggcgttctcgcagaccggcgacaccgtccggcggctctcccgactgcactgtgacctgccgctactcgctttcaccccggtgccggaggtgcgtaaccagctcgccctctcctggggtgtgcagaccttcctgatgcccttcgttgagcacaccgacgccatgttccggcaggtcgacgaggcgctgctcggcctcggtcgggccaaccccggcgattacgtcgtgatcgtcgccggtagtccgcccggaactcccggctcgaccaacacccttcgcgtgcaccagctcgggtcgctggtcgacctcgccgcggcccgggcgctccagtga

SEQ ID NO: 343 - protein, 482 aa, Salinispora tropica CNB-440
MGVTRRAKIVCTLGPATSSPERIRGLVEAGMDVARLNFSHGSHADHEAVCRLVREAAEAAGRPVAVLADLQGPKIRLGRFADGPHEWRTGDSVVITSDDILGTRDRVACTYRKLPQEVKPGDRLLIDDGRVAVEVTDVTGNDIRCLVTEGGPVSNNKGVSLPNVAVSVPALSDKDAEDLRFALGLGADLVALSFVRSADDIKQVHSIMSEEGVHRPVLAKVEKPEAVEQLGAIVLAFDGVMVARGDLGVEMPLDQVPLVQKRAVQLCRENAKPVIVATQMLDSMIENSRPTRAEASDVANAVLDGADAVMLSGETSVGKYPVLTVSTMAKIVATTEAGSIAVPRLQHDPRTHGGALTIAASSIARAIDAKALVAFSQTGDTVRRLSRLHCDLPLLAFTPVPEVRNQLALSWGVQTFLMPFVEHTDAMFRQVDEALLGLGRANPGDYVVIVAGSPPGTPGSTNTLRVHQLGSLVDLAAARALQ

SEQ ID NO: 344 - DNA, 1422 bp, Enterobacter sp. 638
  CDS (1)..(1422): transl_table=11
atgaaaaagacgaaaattgtttgcaccatcggcccgaaaaccgaatctgaagagatgctgagcaaaatgttggacgccggcatgaacgtaatgcgtctgaacttctctcacggcgactatgctgaacacggtcagcgtattcagaacttgcgcaacgtgatgagcaagtctggtaaaaaagcagccatcctgctggataccaaaggcccagaaatccgcaccattaaactggaaggcggcaacgacgtctccctgaaagccggtcagaccttcactttcaccacggataaaaccgttgtgggtaacagcgacatcgtggctgtgacttatgaaggcttcaccagcgatctgtctgttggcaacaccgtactggtagacgatggtctgatcggtatggaagttaccgcgatcgaaggcaaaaacgttgtttgtaaagtgctgaacaacggcgacctgggcgaaaacaaaggcgttaacctgccaggcgtttctatcgctctgccagcgctggctgaaaaagacaaacaggacctgatctttggttgcgaacaaggcgttgactttgttgcggcttccttcatccgtaagcgttctgacgttgtcgaaatccgtgaacacctgaaagcccacggtggcgagaacatccagatcatctccaagattgaaaaccaggaaggcctgaacaacttcgacgaaatcctcgaagcgtcagacggcatcatggttgcacgtggcgacctgggcgttgagatcccggttgaagaagttatcttcgcgcagaagatgatgatcgagaaatgtgttcgtgcgcgtaaagtggttatcaccgcgacacagatgcttgattctatgatcaaaaacccgcgtcctacccgtgctgaagccggcgatgtcgcgaacgccatcatcgatggcaccgacgcagtgatgctgtctggtgaatccgcgaagggtaaatacccgctggaagctgtgaccatcatggccaccatctgcgagcgtactgaccgcgtgatgaccagccgtctggacagcaacaacgacagccgtaagatgcgcatcaccgaagccgtttgtcgtggcgctgtagaaactgctgaaaaactggacgctccactgatcgttgtggcgactcagggcggtaaatctgcgaaagccgtgcgtaaatacttcccaagcgcgaccatcctggcgctgaccaccaacgaaaccactgcgcgtcagctggttctgagcaaaggcgtgattccacacctggtgaaagagatcgcgtctaccgacgatttctaccgtctgggtaaagaagttgctctgcagttagttgatcgtggtctggcacgtaaaggcgacgttgttgtgatggtttctggtgcactggttccaagcggcaccaccaatacggcatctgttcacgtgctgtaa

SEQ ID NO: 345 - protein, 473 aa, Enterobacter sp. 638
MKKTKIVCTIGPKTESEEMLSKMLDAGMNVMRLNFSHGDYAEHGQRIQNLRNVMSKSGKKAAILLDTKGPEIRTIKLEGGNDVSLKAGQTFTFTTDKTVVGNSDIVAVTYEGFTSDLSVGNTVLVDDGLIGMEVTAIEGKNVVCKVLNNGDLGENKGVNLPGVSIALPALAEKDKQDLIFGCEQGVDFVAASFIRKRSDVVEIREHLKAHGGENIQIISKIENQEGLNNFDEILEASDGIMVARGDLGVEIPVEEVIFAQKMMIEKCVRARKVVITATQMLDSMIKNPRPTRAEAGDVANAIIDGTDAVMLSGESAKGKYPLEAVTIMATICERTDRVMTSRLDSNNDSRKMRITEAVCRGAVETAEKLDAPLIVVATQGGKSAKAVRKYFPSATILALTTNETTARQLVLSKGVIPHLVKEIASTDDFYRLGKEVALQLVDRGLARKGDVVVMVSGALVPSGTTNTASVHVL

SEQ ID NO: 346 - DNA, 1752 bp, Caldicellulosiruptor saccharolyticus DSM 8903
  CDS (1)..(1752): transl_table=11
ttgagaaagacaaagataatatgtacattagggccggcaaccaattcagaagagattataagaaagctcattgaaaatggaatggatgttgcaaggcttaatttttcacatggcacccacgaagaacataaaaagaagattgatatgataaaaaagatacgagaagagcttgataagccaattccaattctgcttgatacaaaaggtccagagattaggattggttttttcaaagacggtaaggttgagctaaaagaaggacagagattcacactcacaaccgaagaaatattaggaaatgaagagattgtgagcataacttacaaagaacttgttaaagatgttaagccgggtgataaaatattaattgacgatggactaattgagcttgttgttgaagacaagacagacaaaaatataatctgcaaggtaaaaaatggtggtattttgacaaatcaaaagggagtaaacgtaccaggaataccaataagactacctgcactgacccaaaaagacaaagaagacatcctctttggaattgaaaacgatgttgactttgtggcagcttcttttataagaaaagcaagtgatgtagttgaaataagagaatttttaaataaacacaatggcaaagacattttgataatagcaaagatagaaactcaagaaggtgttgcaaactgtgatgagataataagagttgctgacggaattatggttgcgagaggagatttgggagttgaacttccatttgaggaagtgccgcttgtgcaaaagatgctcattgaaaaatgttataaagcaggaaagccagtaataactgcaacccaaatgttagagtcaatgataagaaacccacgcccaacaagagcagaagtcagcgatattgcaaatgcaatttttgatggaacatctgcaataatgctctctggcgagacagctatgggcaagtatcctgttgaaagtgttgctacaatggcaaagattgccgaaagggtagaaagtcaaatagactatgtcaaaagattccaatcccaagtatttgacatgccagtaaatgttacaaatgctatatctcatgctacctgtacaactgcgcatgatcttggagcaaaggcaatcatcactgtgacaaagtcaggcaacacagcaagaatggtgtcaaaattcagacctgcctgcccaattatagcaacaacaccgtgcgagaaggtaagaagacagctcaatctttcatggggtgtttatccttttttggcagagtataaagactctacagatgatatctttgaccattcggtggagattgctgttaaatcaaagattgttaaaaatggtgatttggttgtaataacagcaggtgtgccagttggtgtaagtggcactacaaatattctcaaagttcatgttgttggtcatgtgcttgttgaaggaagaggctggggaagtgggaaggtgacagcaagagtatgtgttgcaaaaaatcttaatgagctcaagcaaaattttgaagatggagatattattgtcacaacgcagacaaccaatgagtttattccttatatgaaaagagcagctggaataataacagaagaaggcgggcaaaattctcatgcggtgattgttggggcagctttggatattcctgttataaccgatgctaaaaacgctttagagatacttaaaaatggtattgttgttacgatggatgcacaaaaaggacttgtctttagtggagaacttaaaaattaa

SEQ ID NO: 347 - protein, 583 aa, Caldicellulosiruptor saccharolyticus DSM 8903
MRKTKIICTLGPATNSEEIIRKLIENGMDVARLNFSHGTHEEHKKKIDMIKKIREELDKPIPILLDTKGPEIRIGFFKDGKVELKEGQRFTLTTEEILGNEEIVSITYKELVKDVKPGDKILIDDGLIELVVEDKTDKNIICKVKNGGILTNQKGVNVPGIPIRLPALTQKDKEDILFGIENDVDFVAASFIRKASDVVEIREFLNKHNGKDILIIAKIETQEGVANCDEIIRVADGIMVARGDLGVELPFEEVPLVQKMLIEKCYKAGKPVITATQMLESMIRNPRPTRAEVSDIANAIFDGTSAIMLSGETAMGKYPVESVATMAKIAERVESQIDYVKRFQSQVFDMPVNVTNAISHATCTTAHDLGAKAIITVTKSGNTARMVSKFRPACPIIATTPCEKVRRQLNLSWGVYPFLAEYKDSTDDIFDHSVEIAVKSKIVKNGDLVVITAGVPVGVSGTTNILKVHVVGHVLVEGRGWGSGKVTARVCVAKNLNELKQNFEDGDIIVTTQTTNEFIPYMKRAAGIITEEGGQNSHAVIVGAALDIPVITDAKNALEILKNGIVVTMDAQKGLVFSGELKN

SEQ ID NO: 348 - DNA, 1755 bp, Pelotomaculum thermopropionicum SI
  CDS (1)..(1755): transl_table=11
atgcgccggaccaaaatcgtctgcaccattgggcctgccagcgacgatgtggaggtaatcaagaaacttttgcgcgccgggatgaacgtggcgcgcctgaatttttcccacggcacgcatgaagagcacgggcggcgcattgcctccatccgccgcgccgccggcgaggtggggaaaaatgtggccatcatgctggacaccaaagggccgcaaatccgcctgggctatttcaaggaagagcccgtcatcctttcgcaaggcgacatggtaagcctgaccacgcaagacgtgaaaggtgataaagagcggataccggttaactatcccggcctgcccggcgatgtgcggcccggggacaccgttcttgtggccgacggtctgatagctttaaaggttctgtccactaatgaaacggaaatacgctgccgcgtcgaaaacggcggcgagctgaccagccagaagggggtcaacgtgcccggggtgccggtaaacctgccggccgttacggataaggacgtggaagacataaggttcggcattgagcagcgggttgactttattgccgcttcttttatccgaaaaaaggccgatgttctggccatccgccagcttctcgaagaggccggggccgatatcgacatcatttccaaaattgaaagcagggaagcggtcgataatctggacgacatcatcaaggtatcggacgggattatggtggccaggggggatctgggcgtggaaattcccgcggaggaggtccccctggtgcagaaaatcatcatagaaaaatgcaatcgcgccggcaagccggtagttaccgccacccagatgctggagtccatgatccacaaccccaggccgaccagggctgaagccagcgatgtggccaacgccatctttgacggtaccgatgccgttatgctttccggcgaaacggcggcggggaaatacccggtggaggcggtggaaaccatggcccgcatagctgaacgggctgaagctgccctgcgctacgaggaaatactggttaaaaaaagggctttttcctcccggcggaacgtgaccgacgccatcagctacgccacctgcgccaccgcgcaggacctcggcgctgccgccataatcaccgcaacggagtcaggctataccgccaagaatgtctctaaataccggccgcaggcgcctgttgtggcggttacgccccacgccagggtgatgcggaagctggccctggtctggggggtccagccgcttttagccggggccggaaggagcaccgacgagatgatggccgccgccgtggaggtttctttaagcgccggactgatcaaggcgggagatctggtggtaataaccgccggagtgccggccggggttcgcggcacgaccaacctgatccgggtccacacggtcggcgaaatcattgccaggggaaccggcttagggcagcgggcggtaaccggacccgtgcgggtggcccgcaccgccagggaagcgctggagaaggtgaggcagggcgatgtgcttgtgactgttgctaccgacagcgactatgttccggcaatggaaaacgccgccgccgttattaccgaggttggcgggctgacctcccatgccgccatcgtctgcctggagttcggcattccagtggtcgtgggggtggagggggctacttccatcttgaaggacggggatacggttaccgtggacggccagcgggggctgatctacaggggaacggccagagtgctttaa

SEQ ID NO: 349 - protein, 584 aa, Pelotomaculum thermopropionicum SI
MRRTKIVCTIGPASDDVEVIKKLLRAGMNVARLNFSHGTHEEHGRRIASIRRAAGEVGKNVAIMLDTKGPQIRLGYFKEEPVILSQGDMVSLTTQDVKGDKERIPVNYPGLPGDVRPGDTVLVADGLIALKVLSTNETEIRCRVENGGELTSQKGVNVPGVPVNLPAVTDKDVEDIRFGIEQRVDFIAASFIRKKADVLAIRQLLEEAGADIDIISKIESREAVDNLDDIIKVSDGIMVARGDLGVEIPAEEVPLVQKIIIEKCNRAGKPVVTATQMLESMIHNPRPTRAEASDVANAIFDGTDAVMLSGETAAGKYPVEAVETMARIAERAEAALRYEEILVKKRAFSSRRNVTDAISYATCATAQDLGAAAIITATESGYTAKNVSKYRPQAPVVAVTPHARVMRKLALVWGVQPLLAGAGRSTDEMMAAAVEVSLSAGLIKAGDLVVITAGVPAGVRGTTNLIRVHTVGEIIARGTGLGQRAVTGPVRVARTAREALEKVRQGDVLVTVATDSDYVPAMENAAAVITEVGGLTSHAAIVCLEFGIPVVVGVEGATSILKDGDTVTVDGQRGLIYRGTARVL

SEQ ID NO: 350 - DNA, 1443 bp, Geobacter uraniireducens Rf4
  CDS (1)..(1443): transl_table=11
atgaatagaccattgcgcaaaacaaagattatcgccactctcgggccggccagcggatcgccggaaatggtcgggcgactcatggatagcggggtggacgtttttcgcctcaatttttcccacggctcccacgaagaaaaaacccgccttatcgaaacgatccgcgccctgtctgaacagaaggaaaagaccatcggcattctcgcagatctgcaagggccgaaaatcaggaccggtcggatgacggagggagcgatcccgctcgttaggggtgaactgctcgacataaccactgacgacattctcggccgccccggcctgatatccaccatctaccaggcattgcccaaggacgtgaaacagggatcgaggattctgctcgatgacggcatgatcgagttgaaggtcctttcagtctccggcaacacggttcactgcacggttgtcgaaggtggcgtgctgaaggatcttaaagggatgaatcttcccggtgtcgacgtttccgccccttccctgtcggaaaaggataaggcagacctggatttttgcctcgggatgggggtggattatatcgccctttcctttgtgcgcagagcttctgacgtggaaagccttaaggagatcatctacaagcggggggagaacatcccggtaattgccaagattgaaaagcctgaagcgctgcgcaattttaaaagtattcttgcagccgccgatgctgtaatggtggcaagaggggatctgggagtcgaattgagcgccgagcgggttccacttgtgcagaaaaaaatcatccgggcatgcaatgaagccggcaaaccggtcatcaccgccacgcagatgctggaatcgatgattctccacgccaggccgaccagggcggaaacttccgacgttgccaacgccattctcgatggtacggacgccgtcatgctttccggagaaaccgcttccggcggttatccggttgaagcggtgcggaccatggccaagattgcgttggacattgagcgttcggaactatggcgactaccgccgatcagatcactgcacagcaacaatatccccgaggctgtggcggaagccgcatgtcacgcggcgtccaccctcaaggcaaaagccctggtggtattcacccaatcgggcggcacggctgccctgatctccaagttccggccacaactacccatcatcgcttttactccatttccagacattcagcgccgtctttctctcttttggggggtaaacagctgtccgatcggctccatggggggaacgaaccagcagatcaaagttggagaaatggcgctccttgccgccggcttcaaaaaaggggatgtgatcgtcatcaccatgggggtgccgatcgaagccaagggatctaccaacctgatgaagatccatatactgggaacggaaggattttatccgcttttctga

SEQ ID NO: 351 - protein, 480 aa, Geobacter uraniireducens Rf4
MNRPLRKTKIIATLGPASGSPEMVGRLMDSGVDVFRLNFSHGSHEEKTRLIETIRALSEQKEKTIGILADLQGPKIRTGRMTEGAIPLVRGELLDITTDDILGRPGLISTIYQALPKDVKQGSRILLDDGMIELKVLSVSGNTVHCTVVEGGVLKDLKGMNLPGVDVSAPSLSEKDKADLDFCLGMGVDYIALSFVRRASDVESLKEIIYKRGENIPVIAKIEKPEALRNFKSILAAADAVMVARGDLGVELSAERVPLVQKKIIRACNEAGKPVITATQMLESMILHARPTRAETSDVANAILDGTDAVMLSGETASGGYPVEAVRTMAKIALDIERSELWRLPPIRSLHSNNIPEAVAEAACHAASTLKAKALVVFTQSGGTAALISKFRPQLPIIAFTPFPDIQRRLSLFWGVNSCPIGSMGGTNQQIKVGEMALLAAGFKKGDVIVITMGVPIEAKGSTNLMKIHILGTEGFYPLF

SEQ ID NO: 352 - DNA, 1422 bp, Lactobacillus reuteri DSM 20016
  CDS (1)..(1422): transl_table=11
atgaagaaaaccaagattgtaagtacacttggtcctgcaagtactgatgttgatacgatcgttaagttgatcaatgcgggagctaacattttccgtttcaacttctcacacggtgaccacccagaacacttgggtcggatcgaaaacgtacacaaggctgaagaaattactggcaagcacgttggtcttatgcttgatactaagggtgccgaaattcggactactgttcaaaaagaaggtaagatcaactttgaaattggcgacaaggttcgcatttcaatggatccttcaattgaaggtactcatgacaagattgctgttacctacccaggcttatacgatgatactcatgttggtggccatgttctttttgatgatggtttaattgacatggttattgatgaaaaagacgatgcaaacaaggaacttgtatgtcacgtcttaaaccatggtgttcttggttctcggaagggtgttaacgcccctggtgtatcaatcaacttaccaggtattactgaaaaggacagtagcgatattcggtttggtttggaaaacaagatcaactacattgctgcatctttcgttcgtaaggctcaagatgttcttgacattcgcgaattacttaaggaaaagaacatggaagatgttcaaattttccctaagattgaatctcaagaaggtatcgacaactttgaagaaatcattgctgtttctgacggtttaatggtacctcgtggtgacatgggtgttgaaattcctgcccaaaatgtgccaattgttcaaaagcacatgatcaagcgttgtaacgaattaggtaagccagttattactgctacccaaatgcttgactcaatgcaagaaaacccacgtccaacccgtgccgaagtatcagacgttgctaacgccgtatttgacggtactgatgctactatgctttctggtgaaagtgctaacggtgactacccagttgaatctgttgcaatgatgaacgacattgacatcaaggctgaaaaccacctttgggaattcggtactgaaaagttcgattgggacaagtctgacgtaactgaaactatcggttctgctgttgctaacgcagctaaagacttagacattcacacaattgttgcttacactgcttcaggctacactgctaagatgatttctaagtaccgtcctaatgctgatatcgttgcattaactccaaacgaacgtgtagaacgtggacttatgatcaactggggtgttcaaccatacgttgttgatgaaatgaagaacactgatacaatgttcgacttagctgctaagaaggctgttgaacttggctttgctaagaagggcgacaagatcatcatcgttgctggtgttcctttgggtgtaccaggtgcaactaacatgatgcgtgttaagactatcgactaa

SEQ ID NO: 353 - protein, 473 aa, Lactobacillus reuteri DSM 20016
MKKTKIVSTLGPASTDVDTIVKLINAGANIFRFNFSHGDHPEHLGRIENVHKAEEITGKHVGLMLDTKGAEIRTTVQKEGKINFEIGDKVRISMDPSIEGTHDKIAVTYPGLYDDTHVGGHVLFDDGLIDMVIDEKDDANKELVCHVLNHGVLGSRKGVNAPGVSINLPGITEKDSSDIRFGLENKINYIAASFVRKAQDVLDIRELLKEKNMEDVQIFPKIESQEGIDNFEEIIAVSDGLMVPRGDMGVEIPAQNVPIVQKHMIKRCNELGKPVITATQMLDSMQENPRPTRAEVSDVANAVFDGTDATMLSGESANGDYPVESVAMMNDIDIKAENHLWEFGTEKFDWDKSDVTETIGSAVANAAKDLDIHTIVAYTASGYTAKMISKYRPNADIVALTPNERVERGLMINWGVQPYVVDEMKNTDTMFDLAAKKAVELGFAKKGDKIIIVAGVPLGVPGATNMMRVKTID

SEQ ID NO: 354 - DNA, 1437 bp, Roseiflexus sp. RS-1
  CDS (1)..(1437): transl_table=11
atgaagcaggagcatatgcgccgtacaaaaatagtagcgacgattggaccggtcagcagcaccccagaggtgatcgaacgcctgctcaacgctggcatggatgtggcgcggcttaatttttcgcatgggacccaggatgagcatgctcgacggatcgagatgttgcgcgaggttgctgtgcgcaaaggacgaccgctggcactgctgcaagacctgcaaggaccgaagattcgcaccggttcgctggttgatcgcacgccggtcatgcttcagcccggcgcccgtttcaccatcacaacgcgcaatgttgcgggaactgcgagtctcgtgagcacaacctatgctgcccttccccgcgatgttcgtcccggcgaccgcatcctgatctccgatggcttgatcgaagcacgggtcgtgcgcgtttctggcgatgacgtggaaaccgagatcgtcgtcggcggcgaactgcgtgaacatcagggcataaacctccccggcgtcgcggtcagtgcgccagcgctgaccgacaaagatcgcagtgatctgctcttcggtctggcgcagggagtggactatgtagcgctctcatttgtgaggcgcgcgtcggatctggtggaaatcaaggcgcagatcgctgcggctggcgcatcgacgccggtcattgcaaagatcgagaagccggaagcgctgcacgaattcgaagccattctggaagcggcggacggcatcatggttgcgcgcggcgatctgggggtcgaaatgccacccgaacaggtgcctatcgtccagaaacaggtgatcgaggcgacgaacatggcgggcaagccggtcattacagccacgcaaatgctcgactcgatgattcgcaacccgcgcccaacacgcgccgaggcgagcgatgtcgccaatgcgatcatcgatggcacagatgcggtgatgctcagcggcgaaaccgccaccggcgcgtatccggtcgaagcggtgcagatgatggggcgcatcgctgaagtgaccgaagccagcggacggcgcggcgaccacagtcatgagatcatctggcgtttccatgagcagccgacggtcgcagcggcgatcagttccgctgtgcatgcgatcgtgcaggtgctgccggtgactgcgattgtcgcattcacgatgagcggcagcaccgcccgtctggtggcgcggcagcgcccaaagacgccgatctttgcgctgacgccatctgaagcggtctatcggcgactgaacctggtatggggcgttacgccgctcctgtgtccctacgttgatcgactggacgatctggaggatgcggtacgcaatgtgctgatcggtcaggggtacgcccgtcctggcgatcagatcgtgatgaccggcgggcatccgattgccacgcgcggcgcaacgaatttcgtgaaggtgatgcggttgtag

SEQ ID NO: 355 - protein, 478 aa, Roseiflexus sp. RS-1
MKQEHMRRTKIVATIGPVSSTPEVIERLLNAGMDVARLNFSHGTQDEHARRIEMLREVAVRKGRPLALLQDLQGPKIRTGSLVDRTPVMLQPGARFTITTRNVAGTASLVSTTYAALPRDVRPGDRILISDGLIEARVVRVSGDDVETEIVVGGELREHQGINLPGVAVSAPALTDKDRSDLLFGLAQGVDYVALSFVRRASDLVEIKAQIAAAGASTPVIAKIEKPEALHEFEAILEAADGIMVARGDLGVEMPPEQVPIVQKQVIEATNMAGKPVITATQMLDSMIRNPRPTRAEASDVANAIIDGTDAVMLSGETATGAYPVEAVQMMGRIAEVTEASGRRGDHSHEIIWRFHEQPTVAAAISSAVHAIVQVLPVTAIVAFTMSGSTARLVARQRPKTPIFALTPSEAVYRRLNLVWGVTPLLCPYVDRLDDLEDAVRNVLIGQGYARPGDQIVMTGGHPIATRGATNFVKVMRL

SEQ ID NO: 356 - DNA, 1464 bp, Bacteroides vulgatus ATCC 8482
  CDS (1)..(1464): transl_table=11
atgatgttgaaacaaacaaaaatcgtagcgtccatctcagatcagcgttgcgaggtagagtttataagagatcttttcaaggccggtatgaatgtggtccgtatgaatacggctcacgcttcacgtgaaggttttgaaaaattgataaccaatgtacgtgaggtttccaaccgtattgccatattgatggacacaaaagggcccgaagtgcgtactactgctattgcgggcggcgagcctattccttatcagattggtgacaaagtgaagattgtaggcaatcctgcacaagaaacgacccgtgaatgtattgctgtatcttatcccggttttgtgcatgatctccaggtggatggcgatattctgattgatgatggtgatctggagctgcgtgtgattgagaagacagacgagtatttgttgtgtgaggtgcagaatgaagctactttgggtaaccgtaagagtgtaaatgtaccgggtgtgcgcatcaatctcccttctttgacagaaaaggaccgtaacaatatactgtatgctattgaaaaggacattgatttcatagcacattcgtttgttcgtaataagcaggatgtgctggatatccgtcagatactggatgcatacggcagtgacattaagattatcgccaagatcgaaaatcaggaaggagtggacaatattgatgaaatattggaagtggccgacggagtcatggtggctcgtggtgacttgggtattgaggttcctcaggaacgaattcccggcattcagcgtctgttgatcaaaaaatgtattctggcaaagaaaccggtgattgttgctacccagatgttgcataccatgattaataatccgcgtcctacccgtgctgaagtgaccgatattgccaatgctatttactaccgcacggatgcattgatgctgagtggggaaacggcatacggcaagtatccggtggaagccgtgaagacgatggccaagattgcagcgcaggccgagaaagataaactggccgagaatgacatccgtattcctttggatgaaaactccaatgatgtaaccgctttcctggcaaaacaggcagtaaaggctaccagcaaactgaatatccgcgccattattaccgacagtttcagcgggcgtaccgcacgtaatattgctgctttccgtggcaaatatcctgtattggccatctgttataaagaaaaaacgatgcgtcatctggctttgtcatatggggtggaagctatctatatgcccgaaaaggctaacggacaggcatattatttcgctgctttgcgtaaattgctggatgatggtgtcttgagtgaaagcgacatggtggcttacctgagcagcggcaagcaaggtactcagacttctttccttgaaatcaatgtagtgggagatgtgttgaagtatgctatggactatgtgctgcccaaccgcaaccgttacctataa

SEQ ID NO: 357 - protein, 487 aa, Bacteroides vulgatus ATCC 8482
MMLKQTKIVASISDQRCEVEFIRDLFKAGMNVVRMNTAHASREGFEKLITNVREVSNRIAILMDTKGPEVRTTAIAGGEPIPYQIGDKVKIVGNPAQETTRECIAVSYPGFVHDLQVDGDILIDDGDLELRVIEKTDEYLLCEVQNEATLGNRKSVNVPGVRINLPSLTEKDRNNILYAIEKDIDFIAHSFVRNKQDVLDIRQILDAYGSDIKIIAKIENQEGVDNIDEILEVADGVMVARGDLGIEVPQERIPGIQRLLIKKCILAKKPVIVATQMLHTMINNPRPTRAEVTDIANAIYYRTDALMLSGETAYGKYPVEAVKTMAKIAAQAEKDKLAENDIRIPLDENSNDVTAFLAKQAVKATSKLNIRAIITDSFSGRTARNIAAFRGKYPVLAICYKEKTMRHLALSYGVEAIYMPEKANGQAYYFAALRKLLDDGVLSESDMVAYLSSGKQGTQTSFLEINVVGDVLKYAMDYVLPNRNRYL

SEQ ID NO: 358 - DNA, 1413 bp, Thermosipho melanesiensis BI429
  CDS (1)..(1413): transl_table=11
atgagaaaaacgcgaatagtatccacaatagggccagctactgaatctgaggaaatgcttgaaaaacttattaaagcaggagttaatgtatttagattaaattcttctcatgatgatttagaaacacacagaattagaattaaaaggttaaagaaacttagggaaaaattaaatgcggtttttgcaatattaattgatttgtcaggaccaaagattaggacgggaaaattgaaaaaggaatatattacattaaaagaagatagtatcattgaaattacaacggaagatgtactaggagatgaaaaagtcctatctgtaaattacatgagatttccatttgaagtaaaaaaaggggataaagttttgattaatgatggtgcaattgaactggaggttttgggaacaaaagataatatagtagaggccaaagtagttagagggggtaaaataactcaccatagaggtgttaaccttccaggtgttgatttatcaatatctgcaataactgaaaaagataaggaattcataagacttgctatagaagagaatatagattttattgcactttcttttgttagaaaaccagaagatgttaaacttgcaaagtctttaagtaatggaataccaattattgcaaaaattgaaacagcacaagctttggaatatttacaagaaattatattagaatcagatggggttatggtagcaaggggagatttaggtgtcgaaatacctctttctaaggttccaattgttcaaaagcagattattgaaatagcaaatagatttgcaaaaccagttattacagcaactcaaatgcttgaaagtatgataaaaaaaccaacaccaacaagggcagaagtatctgatattgccaatgcaatacttgatgggacagatgctataatgctttctgcggaaacttccattggaaattatccaatagaggcggtaaatgtaatgaatgaggttgctcaaaatacggaaaagtttatacttgattacgaatctatagaattagaatggataagaagctattatatttctgaggatatagaagcggcaatatcacatgcggtttacaatttatcaaaagatgttgatgccaggcttataataaccgcaacgggtactggtagaacggctataaacgttgcgagattaagaccaagtgttccaataatggctgccactccaaatgtttctacgctatacaaattaagtcttgtatggggggtaatgcctgtacttattaaccaaactctctccacggatgaaatgattaacgaagtaatgaaaaaagcaaaagaattagatttggctaagaaagggaatagagtaataattactgcgggtattccttgggggaaaccaggcacaacaaatactttacaaattcaggaaattatttag

SEQ ID NO: 359 - protein, 470 aa, Thermosipho melanesiensis BI429
MRKTRIVSTIGPATESEEMLEKLIKAGVNVFRLNSSHDDLETHRIRIKRLKKLREKLNAVFAILIDLSGPKIRTGKLKKEYITLKEDSIIEITTEDVLGDEKVLSVNYMRFPFEVKKGDKVLINDGAIELEVLGTKDNIVEAKVVRGGKITHHRGVNLPGVDLSISAITEKDKEFIRLAIEENIDFIALSFVRKPEDVKLAKSLSNGIPIIAKIETAQALEYLQEIILESDGVMVARGDLGVEIPLSKVPIVQKQIIEIANRFAKPVITATQMLESMIKKPTPTRAEVSDIANAILDGTDAIMLSAETSIGNYPIEAVNVMNEVAQNTEKFILDYESIELEWIRSYYISEDIEAAISHAVYNLSKDVDARLIITATGTGRTAINVARLRPSVPIMAATPNVSTLYKLSLVWGVMPVLINQTLSTDEMINEVMKKAKELDLAKKGNRVIITAGIPWGKPGTTNTLQIQEII

SEQ ID NO: 360 - DNA, 1419 bp, Clostridium beijerinckii NCIMB 8052
  CDS (1)..(1419): transl_table=11
atgcaaaaaacaaaaatgatttttactattggtccagcaagcgataatgaggagactttaagaaagttcattgaaattgggatgagcgctgcaagattaaacttttctcatggtacacatgaaacacacaaagaaaaaatcgaactaatccaacgcctaagtaaagaaatgaattctgcaacagctatagttcttgatattaaaggtccaaaaatcagaactcataactttgtaaacgatggtgtaactcttaatgacggtgacgatttcgatttcatatgtggtgaagaaattcttggtgatgagaaaagatgctcaatctcatatgatgtactttatcaagatataaaagttggcggaaaaattcttgttgatgatggccttctaaaatttaaagttactggtgttgaaggcaaaacaattcatacaaaagttgttgtaggtggtgaaattaaaaatcataagggcgtaaatgtacctaatgtagttattaaattaccatcaattacagaaaaagatatagaagatataaaattcggatgcaaaatgggcgttgattttattgctgcatctttcataagaaaagccagtgatatcttagatgtaaagaaagttctaaaagaaaaccatggggaacatataaaagtaatagctaaaatcgaaaaccaagaaggtgtagataatatagattctatcatcgaagtaactgacgctgtaatggttgccagaggagatatgggtgttgaaattccaattcaaaaagtgcctataatacaaaaaatgataattagaaaatgtaatgaagctggtaaagttgttataactgcaactcaaatgcttgattcaatgattagaaattcacttccaactagagctgaagctagtgatatttgtaacgctatttttgatggaactgatgcaatcatgttaagtggagaaagtgcttctggttgtttccctatagaagcagcaaagacaatgtcaaaaattgctcaagaagctgaagaatacttagattataatcacttaactgcaagacttagagaaccatcacttactgactacgcagctgcaataagttattcagcatgtagaacagctaacatcttacatgcaaaagctatagtggcagcaacaaagagcggtgctactgcaagactactttcaagatacagatcaaaggctccaatcatagctataacaccttacgaacaagtaagaaaaggattaagcttaaactttggaatcttcccaatgccttgtaaaatgtttaactcaacagatgaaatattaacagaagctaaaaacacagtatttagtctaaatttcacacaaccaggagacgatataatagttgctgcaggaatgccaacaactcaaactggcggaactaatatgttaaaaatagaaaagatttaa

SEQ ID NO: 361 - protein, 472 aa, Clostridium beijerinckii NCIMB 8052
MQKTKMIFTIGPASDNEETLRKFIEIGMSAARLNFSHGTHETHKEKIELIQRLSKEMNSATAIVLDIKGPKIRTHNFVNDGVTLNDGDDFDFICGEEILGDEKRCSISYDVLYQDIKVGGKILVDDGLLKFKVTGVEGKTIHTKVVVGGEIKNHKGVNVPNVVIKLPSITEKDIEDIKFGCKMGVDFIAASFIRKASDILDVKKVLKENHGEHIKVIAKIENQEGVDNIDSIIEVTDAVMVARGDMGVEIPIQKVPIIQKMIIRKCNEAGKVVITATQMLDSMIRNSLPTRAEASDICNAIFDGTDAIMLSGESASGCFPIEAAKTMSKIAQEAEEYLDYNHLTARLREPSLTDYAAAISYSACRTANILHAKAIVAATKSGATARLLSRYRSKAPIIAITPYEQVRKGLSLNFGIFPMPCKMFNSTDEILTEAKNTVFSLNFTQPGDDIIVAAGMPTTQTGGTNMLKIEKI

SEQ ID NO: 362 - DNA, 1422 bp, Clostridium beijerinckii NCIMB 8052
  CDS (1)..(1422): transl_table=11
atgagaaaaactaaaatgatttgtactattggccctgcaagtgaagatatggaaatattagagaaggttgttctttcaggaatgaatgcttcaagacataacttttcacatggagaccatgaagaacacggtggaagaattaagaaagttaaagaactatcaaagaagttaaatagagaaattgcaataattcttgatacaaaaggaccagaaataagaactggtaaatttgaaccaaagaaagttgaattagctaagggttctgaatttacagtatatgctggagatatggatatagttggtgatactactaaatgttcagttacatatgcaggactagcaaatgatgttaagccaggaaatacaattttaatagatgatggtttagtaggattaactgttaaatctgttgaaggtaacgctattaagtgtgaagttcaaaacactggattcgttggaactcataaaggagttaacgtaccaggagtatcaatccaattaccagctcttactgaaaaagataaatcagatttaatcttcggttgtgaagttggagttactatgatagctgcttcattcataagaaaagcatctgatgtaaagactatcagagaaatacttgatgcaaatggtggagaaagaatccttatctgttcaaagatagaaaaccaagaaggtgttgataacttagatgaaatcttagaagcttcagaccttataatggtagctagaggagatcttggtgttgaaattccaatagaacaagttccagcagttcaaaagatgatcatcaaaaaatgtaaagcagctggtaaaccagttgtaactgcaactcaaatgttagattctatgatgagaaatccaagaccaacaagagcagaagtttcagacgttgctaatgctatcttagatggtactgatgcaatcatgttatcaggagaaagtgctaatggagattatccagtagaagctgtagctacaatggctaagattgctgaagaaactgaaaaatctttagaatataaagtagcagtttctcaagctaaaacacatattccagctatagcaggagttatttcaagagcagctagtaatgcagctaatgaattagaagcagcagcagtaattacttcaactcaaactggtgcaactgctaagagaatttctcaatgtagaccagaatgcccaattatagctgttactccagatccaatagttgctagacaattagcattctcatggggagtatatccagtagttgctgataaaatggaatctactgatgaaatgttagaaagatcagttgaaatagctaaaaataatgaatttgttaaatcaggagatatagttgtattagcagctggagttcctgtagaccaagttggtgcaacaaatcttttaaagattagcgaagtaaaataa

SEQ ID NO: 363 - protein, 473 aa, Clostridium beijerinckii NCIMB 8052
MRKTKMICTIGPASEDMEILEKVVLSGMNASRHNFSHGDHEEHGGRIKKVKELSKKLNREIAIILDTKGPEIRTGKFEPKKVELAKGSEFTVYAGDMDIVGDTTKCSVTYAGLANDVKPGNTILIDDGLVGLTVKSVEGNAIKCEVQNTGFVGTHKGVNVPGVSIQLPALTEKDKSDLIFGCEVGVTMIAASFIRKASDVKTIREILDANGGERILICSKIENQEGVDNLDEILEASDLIMVARGDLGVEIPIEQVPAVQKMIIKKCKAAGKPVVTATQMLDSMMRNPRPTRAEVSDVANAILDGTDAIMLSGESANGDYPVEAVATMAKIAEETEKSLEYKVAVSQAKTHIPAIAGVISRAASNAANELEAAAVITSTQTGATAKRISQCRPECPIIAVTPDPIVARQLAFSWGVYPVVADKMESTDEMLERSVEIAKNNEFVKSGDIVVLAAGVPVDQVGATNLLKISEVK

SEQ ID NO: 364 - DNA, 1761 bp, Alkaliphilus metalliredigens QYMF
  CDS (1)..(1761): transl_table=11
atgaaaaaaacaaaaattgtctgtacaatagggccagccagtgaatctaaggaagtgttcactgagttagtaaagcagggtttaaacgtagctaggttaaacttttcccatggaaaccatgaagagcatggtgagcgaattaaaatgattaaagaagtgagacgagagcttgaacaatctgtagcaattttactagatactaagggaccagaaattcgcacaggaaagtttaaagatccagaggtcctgctagcggaagggcaggtattcactgtgaccacacgtgatgtcgtaggggatcaaaatatgtgtagtgttagctatgaagggttggctagagatgttaagcctggagatgaaatattgattgatgatggactagtgggacttagggtgcaaaaaatcatccaaggaacagatgttgaatgcatcgttgaaaatgcaggaatcgtgaaaaatcacaaaggagtcaatgttccaggggtacaaattaatttacctgccattacagaaaaagatgaaggtgatattgtatttggaatccagatggatattgattttattgcggcttccttcgtcagaaaagcatctgatgtattggctatcaaaaggatattagaggaaaataatgcagatcatattcaaattatctctaaaatagagaatcaagaaggaatggataatttagatgaaatcatagaagtctcagatgggattatggtagctcgaggagatttaggtgtagaaataccaacagaagatgttcccctagctcaaaaagaaatgattctaaaatgtaacaaggttggaaaaccagtgatcacagctactcagatgttggattctatgatgcgtaatcctagacccactcgtgcagaggtaacggatgtggccaatgcaatatttgatggaaccgatgcaatcatgctttcgggggaaaccgcagcaggaaaatatccgatagaatctgtgaaaacaatggcgagaatcgcattaagaactgaaggggccattgattaccgtagcctattgaacaaaaaggcccaagaacgggaattgacaatcaccgatgcaattagtcatgctacctgcagtacagcaagtgacttacaggcatctgcaattttaatagctacgtcctcaggacataccgcaaggatggtctctcgatttaaacctcaggcaccaattattgcagccacaaccagtgagcgtgtgatgagaaagctgagtttaacttggggtgcttattgtctattagtagatgaatttcaatcaaccgatgatattattgatgcaacagtggaacatgccttggagaaagagtatattaagagaggcgacttgatcgttatgacggcaggagtgcctgtaggcatagcaggaacaacaaacctattgaaggtacatattgttggggatgtattggtaaatggaaccggggtaggcaaaattcccgccactggaaaagtggttgtgatccatcagcatgatgagctaggacaagaaacattcaatgagggtgacattttagtggtttcttgtacagataaggatctgattccattgatggagaaagcaggggctatgattgtagaagaaggtggcatcacaagtcatgcagctattgtagggttaaaccttcataagcccacagtggttggagccataggcgcaacagagaagctgaaaaccggagatattgtcactgtagataccattcggggattgatatatagtggaaagacacgtgtcttgtaa

SEQ ID NO: 365 - protein, 586 aa, Alkaliphilus metalliredigens QYMF
MKKTKIVCTIGPASESKEVFTELVKQGLNVARLNFSHGNHEEHGERIKMIKEVRRELEQSVAILLDTKGPEIRTGKFKDPEVLLAEGQVFTVTTRDVVGDQNMCSVSYEGLARDVKPGDEILIDDGLVGLRVQKIIQGTDVECIVENAGIVKNHKGVNVPGVQINLPAITEKDEGDIVFGIQMDIDFIAASFVRKASDVLAIKRILEENNADHIQIISKIENQEGMDNLDEIIEVSDGIMVARGDLGVEIPTEDVPLAQKEMILKCNKVGKPVITATQMLDSMMRNPRPTRAEVTDVANAIFDGTDAIMLSGETAAGKYPIESVKTMARIALRTEGAIDYRSLLNKKAQERELTITDAISHATCSTASDLQASAILIATSSGHTARMVSRFKPQAPIIAATTSERVMRKLSLTWGAYCLLVDEFQSTDDIIDATVEHALEKEYIKRGDLIVMTAGVPVGIAGTTNLLKVHIVGDVLVNGTGVGKIPATGKVVVIHQHDELGQETFNEGDILVVSCTDKDLIPLMEKAGAMIVEEGGITSHAAIVGLNLHKPTVVGAIGATEKLKTGDIVTVDTIRGLIYSGKTRVL

SEQ ID NO: 366 - DNA, 1413 bp, Klebsiella pneumoniae subsp. pneumoniae MGH 78578
  CDS (1)..(1413): transl_table=11
atgaaaaagaccaaaattgtttgcaccatcggtccgaaaaccgaatctgaagagatgctgaccaaaatgctggaagccggcatgaatgtgatgcgtctgaacttctcccacggtgactatgcggaacacggtcagcgcatccagaacctgcgcaatgtgatgagcaaaaccggtaagaaagccgctattctgctggacaccaaagggccggaaattcgtaccatcaagctggaaggcggcaacgacgtctccctgaaagcaggccagaccttcaccttcactaccgataaatccgtcatcggcaacaacgaaatcgttgcggtaacctatgaaggcttcacctctgacctcgccgtcggcaacaccgtcctggtggacgatggcctgatcggcatggaagtcacggctatcgaaggcaacaaagttatctgtaaagtgctgaacaatggcgacctcggcgagaacaaaggcgttaacctgccgggcgtctccatcgccctgccggcgctggctgagaaagacaaacaggatctgatcttcggttgcgaacagggcgtggacttcgtcgcggcctccttcatccgtaaacgttccgacgtcgtcgagatccgtgagcacctgaaagcccacggcggcgaaaacatccagatcatctccaaaatcgaaaaccaggaaggcctgaacaacttcgacgaaatcctcgaagcgtctgacggcatcatggttgcgcgtggcgacatgggcgtggagatcccggttgaagaagttatcttcgcccagaaaatgatcatcgaaaaatgtatccgcgcgcgtaaagtggttatcaccgccacccagatgctggactccatgatcaagaacccgcgtccgacccgcgctgaagccggcgacgtggctaacgccatcctcgacggcaccgatgcggtgatgctgtccggcgaatccgcgaaaggtaaatacccgctggaagcggtcaccatcatggcgaccatttgcgaacgtaccgaccgcgtgatgaccagccgtctggacttcaacaacgacaaccgtaaactgcgcatcaccgaagcggtgtgccgcggcgcggtagaaaccgctgagaaactggaagcgccgctgatcgtggtcgccacccagggcggtaaatccgcacgcgctgtgcgcaaatacttcccggatgccaccatcctggcgctgaccaccaacgaaaccaccgctcgtcagctggtgctgagcaaaggcgtggtaccgcagctggtggaagagattgcctctaccgatgatttctatcatctgggcaaagacctggcgctgaagagcggcctcgcgcgtaaaggcgacgtagtggtgatggtttccggcgcattagtgccgagcggcacgactaataccgcttccgtacacgtgctgtaa

SEQ ID NO: 367 - protein, 470 aa, Klebsiella pneumoniae subsp. pneumoniae MGH 78578
MKKTKIVCTIGPKTESEEMLTKMLEAGMNVMRLNFSHGDYAEHGQRIQNLRNVMSKTGKKAAILLDTKGPEIRTIKLEGGNDVSLKAGQTFTFTTDKSVIGNNEIVAVTYEGFTSDLAVGNTVLVDDGLIGMEVTAIEGNKVICKVLNNGDLGENKGVNLPGVSIALPALAEKDKQDLIFGCEQGVDFVAASFIRKRSDVVEIREHLKAHGGENIQIISKIENQEGLNNFDEILEASDGIMVARGDMGVEIPVEEVIFAQKMIIEKCIRARKVVITATQMLDSMIKNPRPTRAEAGDVANAILDGTDAVMLSGESAKGKYPLEAVTIMATICERTDRVMTSRLDFNNDNRKLRITEAVCRGAVETAEKLEAPLIVVATQGGKSARAVRKYFPDATILALTTNETTARQLVLSKGVVPQLVEEIASTDDFYHLGKDLALKSGLARKGDVVVMVSGALVPSGTTNTASVHVL

SEQ ID NO: 368 - DNA, 1518 bp, Kineococcus radiotolerans SRS30216
  CDS (1)..(1518): transl_table=11
atggcggtgcggtggacgtcgcggtcgtggcgcgccccacccgccggtcccggggcggggcccaataggctcggggtcatgcgcagagcgaagatcgtctgcaccctcgggcccgcggtcgcgggtcacgacgggttgcggtcactggtggacgccgggatggacgtcgcccgactgaacttgagccacggctcccacgacgaccaccgcgcgaacttcgagggggtgcgggcggcggcggccgccaccggacggtcggtggcgatcctcgcggacctgcagggccccaagatccgcctcgggaggttcgccgacgggccccacgacctcgcggtcggtgacgtgttcacgatcaccaccgaggacgtggtggggacccgggagatctgctccacgacctacgccggcctgccgggggacgtgtcggtgggtgacgcgatcctcatcgacgacggcaaggtgggtctcgtggtcaccgccgtcgagggcccgcgggtcaccacgctggtgaccgtccccggcccggtcagcaacaacaagggcatcaacctgcccggggtcgcggtgagcgtcccggcgctgtcggagaaggacgtcgaggacctccgcttcgccctccggctcggcgtcgacatggtcgcgctgtcgttcgtccgctccgccgcggacgccgacgacgtgcacaaggtcatggacgaggaggggatcaccgtccccgtcatcgccaaggtcgagaagccgcaggccgtgcagaacctgcgcgaggtcgtcgccgccttcgacggcatcatggtcgcccgcggcgacctcggcgtcgagctgccgctggaggaggtgccgctggtccagaagctggccatcgagctggcccgccgccaggccaagccggtcatcgtcgccacccagatgctcgagtcgatgatcaccgctccgcgcccgacccgcgcggaggcctccgactgcgccaacgccgtcctcgacggcgccgacgcgctcatgctctccggcgagaccagcgtgggggcgttcccctacgaggccgtccggacgatggcccgcatcatcgagaacaccgagacccacggcgccgagcggatcgccgccctgggcaccgtgccgcacaccaagggcggggccatcaccctggccgccgccgaggtcggcaagcagctcgacgccaagctgctggtgacgttcacccagtccggcgactccgcgcgccggctgtcccggctgcgctcgggcatcccgctgctggccttcacccccgacgaggcgacccgccggcgcctggccctgtcctggggcatcgagccggagttcgcggccttcatctccaccaccgacgagatggtcaaggaggtggaccgccgcctgcaggagatgggccgctgcgccgtcggcgacctcgtcgtcatcgtggccggtgcccccccggggatcgtcggctccaccaacgccctgcgcgtgcaccgcatcggcgacgcgacgtcggggatgtcggcggcctacgcctga

SEQ ID NO: 369 - protein, 505 aa, Kineococcus radiotolerans SRS30216
MAVRWTSRSWRAPPAGPGAGPNRLGVMRRAKIVCTLGPAVAGHDGLRSLVDAGMDVARLNLSHGSHDDHRANFEGVRAAAAATGRSVAILADLQGPKIRLGRFADGPHDLAVGDVFTITTEDVVGTREICSTTYAGLPGDVSVGDAILIDDGKVGLVVTAVEGPRVTTLVTVPGPVSNNKGINLPGVAVSVPALSEKDVEDLRFALRLGVDMVALSFVRSAADADDVHKVMDEEGITVPVIAKVEKPQAVQNLREVVAAFDGIMVARGDLGVELPLEEVPLVQKLAIELARRQAKPVIVATQMLESMITAPRPTRAEASDCANAVLDGADALMLSGETSVGAFPYEAVRTMARIIENTETHGAERIAALGTVPHTKGGAITLAAAEVGKQLDAKLLVTFTQSGDSARRLSRLRSGIPLLAFTPDEATRRRLALSWGIEPEFAAFISTTDEMVKEVDRRLQEMGRCAVGDLVVIVAGAPPGIVGSTNALRVHRIGDATSGMSAAYA

SEQ ID NO: 370 - DNA, 1758 bp, Bacillus cereus subsp. cytotoxis NVH 391-98
  CDS (1)..(1758): transl_table=11
atgcgcaaaacaaaaattgtatgtactataggtcctgctagtgaaagtattgaaaaattagaacagttaattgaggctggtatgaacgttgctcgtttaaacttctctcatggtagccatgaagagcacggagcacgtattaaaaacattcgtgaagcgtctaaaaagactggtaaaacagttgccatcttgcttgatacaaaaggtccagaaattcgtacacatgacttcgtagacggacaagctgagctaacaactggttcagaagtagttatttctactgagcaagtattaggaactgcagaaaagttctcagtaacttatgctggtttatatgacgatgtaaatccaggttctcgcattctaatcgatgatggtttaatcgagctagaagtaatcgagaaagttgatggaaatattcgtacaaaagtactaaacagtggtattgtaaaaaataaaaaaggtgtaaacgtaccaaacgtaagcattaagcttcctggtattactgaaaaagacgtaaaagatatcatcttcggtatcgagcaaaacgttgacttcatcgcagcatctttcgttcgtaaagcggctgacgtgttagaaattcgtgaattattagaagaacataatgcacagcatatccaaatcgtaccaaaaattgaaaaccaagagggtatcgataatatcgattcaatcttagaagtttctgatggcttaatggtagctcgtggtgacatgggtgtagaaattccaccagaagaagtgccattagtacaaaaacgtctaatcaaaaaatgtaacgtattaggcaaaccagttattactgcaacacaaatgttagattctatgcaacgtaacccacgtccaactcgtgcggaagcaagtgacgtagcaaatgcaatctttgacggtacagatgcaatcatgctttcaggtgaaactgcagcagggcaatatccagtagaagcagtaacaatgatggcgaatattgcaacacgcgttgagaagtcattacaatataaagatatatttaagaaacgtattaaagagcttacaccaacaattacagatgcgattagtcaatctgttgcacatacagcaatcgctcttgatgtagctgcaatcattgctccaactgaaagtggctatactgcaaaaatgatctcgaaataccgtccaaaatctccaatcgtagctgtaacatctgatgagcaagtatgtcgtcgtcttgcacttgtttggggtgtacaagcgtttatggctagtaaacgtgcggcgtctactgatgaaatgttagatactgctattcaaacaggtatggatgctggtctaattggacttggtgatactgtagttattacagctggtgttccagttgctgaaacgggtacaacaaacttaatgaaaattcatgttgttggcgaagaaatcgcgaaaggacaaggaattggtcgtaaagcggcaaaaggtaaagtggttgtagcgaaaacagcaactgaagctgttgcgaacgtaaaagaaggagatattctagttacaacaagtactgataaagatatgattcctgcaattgaaaaagcggcagctttagttgtagaagaaggcggtttaacaagccatgcagctgtcgtaggtgtttcaattggtattccagttatcgttggcgtaaatggtgtaacagaaactttaaaaaatggccaagaagtaacagttgatgcagctcgcggaattgtttataatggacatgcggaagtgctataa

SEQ ID NO: 371 - protein, 585 aa, Bacillus cereus subsp. cytotoxis NVH 391-98
MRKTKIVCTIGPASESIEKLEQLIEAGMNVARLNFSHGSHEEHGARIKNIREASKKTGKTVAILLDTKGPEIRTHDFVDGQAELTTGSEVVISTEQVLGTAEKFSVTYAGLYDDVNPGSRILIDDGLIELEVIEKVDGNIRTKVLNSGIVKNKKGVNVPNVSIKLPGITEKDVKDIIFGIEQNVDFIAASFVRKAADVLEIRELLEEHNAQHIQIVPKIENQEGIDNIDSILEVSDGLMVARGDMGVEIPPEEVPLVQKRLIKKCNVLGKPVITATQMLDSMQRNPRPTRAEASDVANAIFDGTDAIMLSGETAAGQYPVEAVTMMANIATRVEKSLQYKDIFKKRIKELTPTITDAISQSVAHTAIALDVAAIIAPTESGYTAKMISKYRPKSPIVAVTSDEQVCRRLALVWGVQAFMASKRAASTDEMLDTAIQTGMDAGLIGLGDTVVITAGVPVAETGTTNLMKIHVVGEEIAKGQGIGRKAAKGKVVVAKTATEAVANVKEGDILVTTSTDKDMIPAIEKAAALVVEEGGLTSHAAVVGVSIGIPVIVGVNGVTETLKNGQEVTVDAARGIVYNGHAEVL

SEQ ID NO: 372 - DNA, 1476 bp, Anaeromyxobacter sp. Fw109-5
  CDS (1)..(1476): transl_table=11
atgtaccccatgcgccgcgccaagatcgtcgccaccctcggtcccgcctcctccgatcccgacgtgctgcagcgcatgctggccgccggggtggacgtggcgaggctcaacttctcccacggccgtcacgaggaccacgcccagatgctggatcgcatccggacggcctcgcgccatctcggccgcgccgtcgccgtcctccaggacctccagggccccaagatccgcaccggccccttggcggccggacgggagggcgtccgcctcgaggcgggggcggagctcgtcatcgccaccgacgcggaggtgaagggcgacgcgaagctcgtctccaccacctacccgcacctcgccgaggacgttcgcccgggggaccgcctcctcgtcgacgacgggctcatcgagctgcgcgtcctcgagaccgacggcgtccgcgcgcgctgccaggtggtcgaggggggcgtgctgcgcgagcacaaggggatcaacctccccggcgtggcgctccgcgccgaggcgctctccgagaaggaccgggcggacatcgccttcggcctcgcgcacggcgtggacgcggtggcgctctcgttcgtgcgctccgcggaggacatccgggcctgccgcgacgagatggagcgggtcggccgggtcgtcccggtgatcgccaagatcgagaagcccgaggcgctcgacgccatcgacgcgatcatcgaggccgccgacgggatcatgatcgcgcgcggcgacctcggcgtggagatcctgcccgagcgcgtgccgctgctgcagaaggacatctgccggcgcggcaacgcggccggcaagccggtggtcatcgccacccagatgctcgagtcgatgatcgagcacccccggccgacccgcgccgaggcctccgacgtggcgaacgccgtctgggacggcgccgacgcggtgatgctctccgcggagagcgcgagcggccgcttccccctgaacgccgtgcagatgatggaccgcatcgtgcgcgaggcggagacgagccccgccccgtccgtgggcatccccgacgtccgctctcgcccggccgcgttcaacctcgtcaccgccgcggccgcctgcgaggcggccgacgccgccggcgcggtggccatctgctgcttcaccctctccggcacgaccgcgcggctcctctcgcacttccggccgcgcgtgcccgtcatcgccttctcgcccgaccagtcgatccggcgccgcctcgcgctgtactggggcgtcgtcccgcgggtcctcgagccggtgaagaacgccgacctcatggcggagctcgtctcggacgtgctcctcggcgacggcgtcgtgaagccgggcgaccgggtcgtcctggtccacggctcgccgctcggcatcccgggccagacgaactccatccgcctgcacgagatcacccacccctcggagcgcgggcccgcgcagcgctaccgcgttcccatctga

SEQ ID NO: 373 - protein, 491 aa, Anaeromyxobacter sp. Fw109-5
MYPMRRAKIVATLGPASSDPDVLQRMLAAGVDVARLNFSHGRHEDHAQMLDRIRTASRHLGRAVAVLQDLQGPKIRTGPLAAGREGVRLEAGAELVIATDAEVKGDAKLVSTTYPHLAEDVRPGDRLLVDDGLIELRVLETDGVRARCQVVEGGVLREHKGINLPGVALRAEALSEKDRADIAFGLAHGVDAVALSFVRSAEDIRACRDEMERVGRVVPVIAKIEKPEALDAIDAIIEAADGIMIARGDLGVEILPERVPLLQKDICRRGNAAGKPVVIATQMLESMIEHPRPTRAEASDVANAVWDGADAVMLSAESASGRFPLNAVQMMDRIVREAETSPAPSVGIPDVRSRPAAFNLVTAAAACEAADAAGAVAICCFTLSGTTARLLSHFRPRVPVIAFSPDQSIRRRLALYWGVVPRVLEPVKNADLMAELVSDVLLGDGVVKPGDRVVLVHGSPLGIPGQTNSIRLHEITHPSERGPAQRYRVPI

SEQ ID NO: 374 - DNA, 1758 bp, Clostridium botulinum F str. Langeland
  CDS (1)..(1758): transl_table=11
atgcaaaagactaaaatgatatttacaataggtcctgcaagctcgacagaagaaatcgtatcaaaattaatagaagctggaatgagtgtatcaagacacaatttttctcacggatcacatccagaacacaaagaaagaatgatgatgattaagaaattaagagaaaaacataacaaacacatagctattatgttagacaccaaaggaccagaaataagaacaggtaatttttcagtggataaagtggaattaaaagaaggggcagagtttacaatatattgtagagaagacatagtaggtgatgaaacaaaatgttctattacttatgatgaactatataaagatgtagttaaaggaaataaaatactgatagatgatggattagtagagctagaggttcagtcagtagaagataataaaatccatacagtagttaaaaattcaggaactgtttcaaatcacaagggagtaaatgttccaggagtttcagtatcacttccagcagttactgaaaaagatatagaagatttaaaatttggatgtgaagtaggagtagatttaataagtgcatcttttataagaaaagcctctgatgtattagctataagaaaaatattggaagaaaatggtggaaatgaaatacagataatctctaagatagaaaaccaagagggcgttgacaatatagatgagataataaaattttctgatggaataatggtagctagaggagatatgggagtcgaaattcctatagaagaagttccaatagtacaaaaaagaataatagaaaaatgtaataaggcaggtaagcctgtaattacagcaactcaaatgttagattctatgatgagaaaccctagaccaacaagagctgaagcctcagacatagccaatgcaatatttgatggaacagatgccataatgttaagtggagaatcagcaaatggaaaatatccagtagaagctgcaagaactatgtctagaatagctaaaacagcagaagcaaaattaaattatgatgctatattaaataaaatgagagaaagtcatatattaaatgttcctaatgctataagcttatcagcgtgtactacagcatcagaattaaatgctacagctataatcacagcaactcaaagtgggcatactgcaaaaatggtatcaaaatatagaccacaatgccctattatagcagtaacaccaaatgaaatagttgctagaaagttagcattaaattgtggagtagtaccactattaacggaaacatttaattctacagatgagcttatagataaatctgttaataaatctttagaagaaggatatgttaaaaatggcgacttagttgttatagcaggaggaataccagtgtcttactcaggaacaactaatatgctaaaagttcatatagtgggagatatactagcccaaggaagaggttcaggaactagaccaacttatgggaatgtaaagatagtaaaaagccctgcagaagcggaaaatatagttgaaagagatgacatattagtagttaaaaatttagatagaagatatatgactattttagatagagtatcaggtatagtggctgaagaaggtggaataacatcacacttagctatagaatgtatagcaagagatattccatttatatgtaatgcaggtggagctatggatgttttaaaaacaggaacatatgtaacacttgatacagtaagaggaatagtatacaacggaagagctaatatagtttaa

SEQ ID NO: 375 - protein, 585 aa, Clostridium botulinum F str. Langeland
MQKTKMIFTIGPASSTEEIVSKLIEAGMSVSRHNFSHGSHPEHKERMMMIKKLREKHNKHIAIMLDTKGPEIRTGNFSVDKVELKEGAEFTIYCREDIVGDETKCSITYDELYKDVVKGNKILIDDGLVELEVQSVEDNKIHTVVKNSGTVSNHKGVNVPGVSVSLPAVTEKDIEDLKFGCEVGVDLISASFIRKASDVLAIRKILEENGGNEIQIISKIENQEGVDNIDEIIKFSDGIMVARGDMGVEIPIEEVPIVQKRIIEKCNKAGKPVITATQMLDSMMRNPRPTRAEASDIANAIFDGTDAIMLSGESANGKYPVEAARTMSRIAKTAEAKLNYDAILNKMRESHILNVPNAISLSACTTASELNATAIITATQSGHTAKMVSKYRPQCPIIAVTPNEIVARKLALNCGVVPLLTETFNSTDELIDKSVNKSLEEGYVKNGDLVVIAGGIPVSYSGTTNMLKVHIVGDILAQGRGSGTRPTYGNVKIVKSPAEAENIVERDDILVVKNLDRRYMTILDRVSGIVAEEGGITSHLAIECIARDIPFICNAGGAMDVLKTGTYVTLDTVRGIVYNGRANIV

SEQ ID NO: 376 - DNA, 1758 bp, Clostridium kluyveri DSM 555
  CDS (1)..(1758): transl_table=11
atgcaaaaaactaaaatgatttttacaattggacccacaagtgattcagaagaagttttgtcaaaacttattgaagctggcatgaatgtaactagacataatttttctcatggagactatccaagtcatgaaaagagaataaatacagtgaagaaactcagagaaaagtacagtaaacctatagcaattatgctggatactaaagggcctgaaataagaacgggaaattttgaaaatgataaagctcagttaaaagagggagataaatttactatctactgtagagataatatcataggggataatactagatgctccataacctatgacgggttaagcagtgacttgaaaaaaggagacagtatattaattgatgatggattagttgctttggaagtggatgatattgaaaataataaaatatactgcatagttaaaaataatggaacaatcagtaatcataaaggggtaaatgtaccaggagtttctacttcgctgccagcattaacagaaaaggataaaggggatttgatatttggatgcaagattggcgtagatatggtagctgcttcttttataagaaaagctgctgatatacttaccataagaaaggtactggaggcaaatggaggacaagatatacagatattctctaagattgaaaatcaagaaggggttgacaatatagatgaaataataaagttttctgatggaataatggtggcaagaggagatatgggagtggaaattctcatagaacaagtacctttaatacaaaaaactataatacaaaagtgtaataaagcaggtaaacctgttataactgcaactcagatgcttgattctatgataaggaatccaagacctaccagggctgaagcatcagatatagccaatgccatatttgatggaacagatgccataatgttaagtggtgaaactgccaatggaaaatatcctgtagaagcagcacggactatgtcaagaatagcccaggcagcagaagaaaaaatcgactacgattccttattaaaaaaaagaagggaagttcatatacaaaatgtaccaaatgccataagtcttgctacctgcagcactgcttcagaattaaaagcttctgctataataactgctacacagagtggacacacagctagaatggtttcaaagtatagaccacaatgtcatattatagctgtaactccaagtggtaaagtggcaagaaggcttgcattaaattggggggtatttcccatacttactaaaagggtggattctacggatgaattaatagaagattcagttaagatagcattaaaaagtggctatgttaaaaaaggagatctggtaattatagcagcaggcataccggttagttattctggcactactaatatgttaaaggttcatatagttggagatatattagttcaggggagaggggcaggagttagacccggttatggaaatgcaaaaatagtttataatcctaaggatgcccgggagataatagaagatggggatattttagtagttaaagatctagatatagaatatatggatgtattggatagagtttcaggaattgtagcggaaaatggaggattaacatcccatcttgctattgaatgccttacaagggaaatacctattatctgtggagctggaggagccactgaaatattgaaaacaggtacatttataactatggatattataagaggaatagtgtataatggcagagccaatataatgtaa

SEQ ID NO: 377 - protein, 585 aa, Clostridium kluyveri DSM 555
MQKTKMIFTIGPTSDSEEVLSKLIEAGMNVTRHNFSHGDYPSHEKRINTVKKLREKYSKPIAIMLDTKGPEIRTGNFENDKAQLKEGDKFTIYCRDNIIGDNTRCSITYDGLSSDLKKGDSILIDDGLVALEVDDIENNKIYCIVKNNGTISNHKGVNVPGVSTSLPALTEKDKGDLIFGCKIGVDMVAASFIRKAADILTIRKVLEANGGQDIQIFSKIENQEGVDNIDEIIKFSDGIMVARGDMGVEILIEQVPLIQKTIIQKCNKAGKPVITATQMLDSMIRNPRPTRAEASDIANAIFDGTDAIMLSGETANGKYPVEAARTMSRIAQAAEEKIDYDSLLKKRREVHIQNVPNAISLATCSTASELKASAIITATQSGHTARMVSKYRPQCHIIAVTPSGKVARRLALNWGVFPILTKRVDSTDELIEDSVKIALKSGYVKKGDLVIIAAGIPVSYSGTTNMLKVHIVGDILVQGRGAGVRPGYGNAKIVYNPKDAREIIEDGDILVVKDLDIEYMDVLDRVSGIVAENGGLTSHLAIECLTREIPIICGAGGATEILKTGTFITMDIIRGIVYNGRANIM

SEQ ID NO: 378 - DNA, 1758 bp, Bacillus amyloliquefaciens FZB42
  CDS (1)..(1758): transl_table=11
ttgaaaaaaacaaaaatcgtttgtacaatcggtccggccagtgaaagtgtagaaatgctgacaaaattgatggaagcgggtatgaacgttgctcgtctgaatttttcacacggtgatttcgaagagcacggcgcaagaatcaaaaacatcagagaagcaagcaaaaagctcggcaaaaacgtggggattctcctcgatacgaaaggtccggaaatccgcacgcacgatatggaaaacggcgcgcttgagcttcaggcgggaaatgaaattatcgtttctacgaaacaggtgctgggaacacttggaaaattctcagtttcttatgaaggcctggcagacgacgtgtcagcagggtctatcatcctgttggatgacggtttaatcggattggaagtgctagaatcaaatccggaaaaacacgaaatcaaaacaaaaatcttaaacagcggcacgctgaaaaataaaaaaggcgtaaacgttcccggcgtcagcgtcaaccttcccggaattactgaaaaagacgccaaagacatcgtattcggtatcgagcaaggcgttgatttcatcgctgcgtcatttgtacgccgttctacggatgtcctggaaatccgcgaactgcttgaagagcataacgcgtctgacattcaaatcattcctaagatcgagaaccaggaaggcgtggacaacctggatgcgatcctggaagtatctgacggcttaatggtagcgcgcggagacctcggcgtagagattccggccgaagaagtgccgctcgtgcaaaaagaaatgatcaaaaaatgcaacgcgctcggcaaaccggttattactgcgacacaaatgcttgacagcatgcagcgcaaccctcgtccgacacgcgctgaagcaagtgacgttgccaacgccattttcgacggcacagatgctatcatgctttccggtgagacggctgcgggacaatatcctgtcgaggcggttcaaacaatgtttaacatcgccacacgcacggaagaatctctgaactacaaagaaattctgtctaaacgcagagatcaggtcggcatgacgattaccgatgcgatcggccaatcagttgcgcacacggcgatcaatctgagtgcggcagctatcgttacgcctacagaaagcggccatacggcgcgtatgatcgcgaaataccgtccgcaggctccgattgtagccgttacggttaatgagtctgtgtcacgcaaactcggccttgtattcggtgtattcccgtcaagcggccaaaacgcgaattcaaccgatgaaatgcttgaagacgcggttcaaaaatcacttgacagcggcatcgtgaaacgcggtgatctgattgtcattacagcaggttctgtcggtgaatcaggcacgacaaatctgatgaaagtccacactgtcggcagcattatcgcgaaagggcaaggcatcgggcgcaaatctgcattcggtccggtcgttgttgcaaaaaatgcgaaagaagctgaacaaaaaatgacagacggcgcggtattggttgcctcaagcactgaccgcgacatgatcgcttcacttgaaaaagcatcagcgctcatcactgaagaaggcggtctgacaagccatgcagccgttgtcggtttaagcttgggcattccggttatcgtcggtctggagaacgcaacttcagttttaacagaaggacaggttatcacagttgacgctgcccgcggcgctgtgtatgaaggccgcgcaagcgttctttaa

SEQ ID NO: 379 - protein, 585 aa, Bacillus amyloliquefaciens FZB42
MKKTKIVCTIGPASESVEMLTKLMEAGMNVARLNFSHGDFEEHGARIKNIREASKKLGKNVGILLDTKGPEIRTHDMENGALELQAGNEIIVSTKQVLGTLGKFSVSYEGLADDVSAGSIILLDDGLIGLEVLESNPEKHEIKTKILNSGTLKNKKGVNVPGVSVNLPGITEKDAKDIVFGIEQGVDFIAASFVRRSTDVLEIRELLEEHNASDIQIIPKIENQEGVDNLDAILEVSDGLMVARGDLGVEIPAEEVPLVQKEMIKKCNALGKPVITATQMLDSMQRNPRPTRAEASDVANAIFDGTDAIMLSGETAAGQYPVEAVQTMFNIATRTEESLNYKEILSKRRDQVGMTITDAIGQSVAHTAINLSAAAIVTPTESGHTARMIAKYRPQAPIVAVTVNESVSRKLGLVFGVFPSSGQNANSTDEMLEDAVQKSLDSGIVKRGDLIVITAGSVGESGTTNLMKVHTVGSIIAKGQGIGRKSAFGPVVVAKNAKEAEQKMTDGAVLVASSTDRDMIASLEKASALITEEGGLTSHAAVVGLSLGIPVIVGLENATSVLTEGQVITVDAARGAVYEGRASVL

SEQ ID NO: 380 - DNA, 1509 bp, Enterobacter sakazakii ATCC BAA-894
  CDS (1)..(1509): transl_table=11
gtggcatcacaactttcgcaacacaagtttacccaaacggcagagtacgccgcagggcatgatttccatatccttcaactaaagattaagactgtcatgaaaaagacgaaaattgtttgcaccatcggcccgaaaaccgaatccgaagaaatgctgaccaaaatgctcgacgcgggcatgaacgtgatgcgccttaacttctcccacggcgattacgaagaacacggtcagcgcatcaaaaacctgcgcaatgttctcgcgaaaaccggcaagcaagccgccattctgctggacacgaaaggcccggaaatccgcaccatcaaactggaaggcggcaacgatgtctccctgaaagcgggccagacctttacctttaccaccgacaaatccgttgtcggcaacagcgaaatcgttgcggtgacctacgaaggcttcaccaaagacctttccgtcggcaacaccgtgctggtggatgacggcctgatcggcatggaagtcacagccatcgaaggcaacaaagtcatctgtaaagtgctgaacaacggcgatctgggtgaaaacaaaggcgttaacctgccgggcgtttccatcgcgctgccggcactggctgaaaaagacaagaaagacctgattttcggctgcgagcagggcgtcgactttgtggcggcctcctttattcgtaaacgctctgacgtcgaagaaattcgccagcacctgaaagcgcacggcggcgagcacatccagatcatctccaaaatcgaaaaccaggaaggcctgaacaacttcgacgatatcctcgaagcgtctgacggcatcatggtcgcgcgtggcgacctgggcgtggaaatcccggtagaagaagtgatcttcgcgcagaagatgatgatcgaaaaatgtatccgcgcgcgtaaagtcgttatcaccgcaacgcagatgctggattccatgattaagaacccgcgtccgacccgcgctgaagcaggcgacgtggcgaacgccattctcgacggcaccgatgctgtgatgctgtccggcgaatccgcgaaaggcaaatacccgctggaagcggtaaccatcatggcgaccatctgcgagcgtaccgaccgcgtgatgaccagccgtctggagtttaacaacgacagccgtaaactgcgtatcactgaagccgtctgccgcggtgcggtagaaacggccgagaagctggaagcgccgctgatcgtggtggcgaccgaaggcggtaaatccgcgaaatccgttcgtaaatacttcccggacgcgactatcctcgcgctgaccaccaacgaactgaccgcgcgtcagctggtgctgagcaaaggcgtggtgccgcagctggtgaaagagatctcttctacggatgatttctatcgtctgggtaaagatgccgcactggaaagtggtctcgcgaagaaaggcgatgtggtggtaatggtctctggcgcactggtaccgagcggtacgaccaataccgcgtctgtacacgtcctgtaa

SEQ ID NO: 381 - protein, 502 aa, Enterobacter sakazakii ATCC BAA-894
MASQLSQHKFTQTAEYAAGHDFHILQLKIKTVMKKTKIVCTIGPKTESEEMLTKMLDAGMNVMRLNFSHGDYEEHGQRIKNLRNVLAKTGKQAAILLDTKGPEIRTIKLEGGNDVSLKAGQTFTFTTDKSVVGNSEIVAVTYEGFTKDLSVGNTVLVDDGLIGMEVTAIEGNKVICKVLNNGDLGENKGVNLPGVSIALPALAEKDKKDLIFGCEQGVDFVAASFIRKRSDVEEIRQHLKAHGGEHIQIISKIENQEGLNNFDDILEASDGIMVARGDLGVEIPVEEVIFAQKMMIEKCIRARKVVITATQMLDSMIKNPRPTRAEAGDVANAILDGTDAVMLSGESAKGKYPLEAVTIMATICERTDRVMTSRLEFNNDSRKLRITEAVCRGAVETAEKLEAPLIVVATEGGKSAKSVRKYFPDATILALTTNELTARQLVLSKGVVPQLVKEISSTDDFYRLGKDAALESGLAKKGDVVVMVSGALVPSGTTNTASVHVL

SEQ ID NO: 382 - DNA, 1413 bp, Vibrio harveyi ATCC BAA-1116
  CDS (1)..(1413): transl_table=11
atgaaaaagaccaaaatcgtttgtacgattggccctaaaactgaatctgtagagaagctaactgaactagtaaacgcaggcatgaacgtaatgcgtcttaacttctctcacggtgactacgcagagcacggcactcgtatcgcgaacttccgccaagtaatggaagctacaggcaagcaacttgcaatccttttagacactaaaggtccagaaatccgcacaatcaaactagatgacggcaacgacgttgatctagtagctggtcaagaattcactttcacaactgacatctcagttgtaggtaacaaagacaaagttgcagtaacttacgctggttttgctaacgacctaaacgttggtaacaccatcctagtagacgacggtctaatcgaaatggaagtgcttgcaacttctgaaactgaagttaagtgtaaagttcttaacaacggtgctctaggcgaaaacaaaggtgttaaccttcctggcgtttctgtaaacctacctgcactatctgaaaaagataagaacgaccttaaattcggttgtgagcaaggcgttgacttcgtagctgcttctttcatccgtaaagcttctgacgttcaagaaatccgtgaagtacttgctgcaaacggcggcgagaacatccacatcatctctaagatcgaaaaccaagaaggtgttgataacttcgacgagatcctagagctttctgacggcatcatggttgctcgtggtgacctgggtgttgaaatcccagctgaagaagtaatcttcgctcagaaaatgatgatcgagaagtgtaaccgtgcacgtaagatggttatcactgcaactcaaatgcttgattctatgatcaacaacccacgtcctactcgtgcggaagcaggcgacgttgccaacgctataatggacggtactgacgcagtaatgctttctggtgaaactgctaaaggtaagtacccagttgaagcggtaactatcatggctcaaatcgcgaaccgtactgattcagcgctaaaagctgagctaggttctcgtctagacagcccacgtctacgcatcactgaagcagtatgtaaaggcgcagtagatacagctgagaaactagctgctccacttatcgttgttgcaactgaaggcggtaaatctgcacgttcagtacgtaagtacttcccaactgcaaacatcctagcactaacgactaacactaagactgctgcacagctagttctaactaaaggtgttactccagtagttgttgattcaatcgacagcactgacgcattctacgtagcaggtaaagaacttgctctagaatcaggtctaggtaacaaaggcgacatcgttgttatggtttctggtgctctagtagcttcaggtacaacgaacacagcttctgtacacgttctataa

SEQ ID NO: 383 - protein, 470 aa, Vibrio harveyi ATCC BAA-1116
MKKTKIVCTIGPKTESVEKLTELVNAGMNVMRLNFSHGDYAEHGTRIANFRQVMEATGKQLAILLDTKGPEIRTIKLDDGNDVDLVAGQEFTFTTDISVVGNKDKVAVTYAGFANDLNVGNTILVDDGLIEMEVLATSETEVKCKVLNNGALGENKGVNLPGVSVNLPALSEKDKNDLKFGCEQGVDFVAASFIRKASDVQEIREVLAANGGENIHIISKIENQEGVDNFDEILELSDGIMVARGDLGVEIPAEEVIFAQKMMIEKCNRARKMVITATQMLDSMINNPRPTRAEAGDVANAIMDGTDAVMLSGETAKGKYPVEAVTIMAQIANRTDSALKAELGSRLDSPRLRITEAVCKGAVDTAEKLAAPLIVVATEGGKSARSVRKYFPTANILALTTNTKTAAQLVLTKGVTPVVVDSIDSTDAFYVAGKELALESGLGNKGDIVVMVSGALVASGTTNTASVHVL

SEQ ID NO: 384 - DNA, 1506 bp, Streptococcus gordonii str. Challis substr. CH1
  CDS (1)..(1506): transl_table=11
atgaacaaacgcgtaaaaattgttgcaacactaggtccagcggttgaaatccgtggtggtaaaaaattcggtgaagacggatactggggagaaaaacttgacgttgaagcttcagctaaaaacattgctaaattgattgaagcaggagcaaacactttccgttttaacttctcacacggtgaccaccaagagcaaggtgaacgcatggcaactgttaaacttgctgaagaaattgctggtcaaaaagttggtttccttcttgatactaaaggacctgaaatccgtacagaattgtttgaaggtgacgcaaaagagtactcttacaaaactggtgaaaaaatccgtgttgcaactaaacaaggtatcaaatcaactcgtgatgtgattgctttgaacgttgctggtgcccttgacatctacgatgatgttgaagttggtcaccaagttttggttgacgatggtaaacttggtcttcgtgttttcgcaaaagacgatgcaactcgtgaatttgaagtagtcgttgaaaatgacggtatcattgctaagcaaaaaggtgtaaacatccctaacactaaaattcctttcccagcacttgctgagcgcgataacgatgatatccgtttcggtttggaacaaggtatcaacttcatcgcgatttcatttgtacgtactgcaaaggacgttgacgaagttcgtgctatctgtgaagaaactggtaatggtcacgttcaattgtttgctaaaatcgaaaaccaacaaggtattgataacttggacgaaatcattgaagctgctgacggtattatgattgctcgtggtgacatgggtattgaagtaccatttgaaatggttccagtttaccaaaaaatgatcatcactaaagtgaacgcagcaggtaaagttgttatcacagcaacaaacatgcttgaaacaatgactgaaaaaccacgtgcaactcgttcagaagtatcagacgtatttaacgctgttattgacggtactgacgctacaatgctttcaggtgagtctgcaaatggtaaatacccacttgagtcagtaacaacaatggctacaattgacaagaatgcacaaactcttcttaacgaatacggacgtttgaactcagatactttcgaacgtaattctaaaacagaagttatggcttcagctgttaaagatgctactaactcaatggatatcaaattggtagttactcttactaagactggacacacagcccgcttgatctctaaataccgtccaaatgctgatatcttggcattgacatttgacgaattaacagagcgtggattgatgttgaactggggtgttatcccgatgttgacagacactccatcatcaactgatgacatgtttgaaattgctgaacgtaaagcagttgaagcaggtcttgtacaatctggtgatgatatcgttatcgttgctggtgtaccagttggagaagctgttcgtacaaacacaatgcgtatccgcacagttcgctaa

SEQ ID NO: 385 - protein, 501 aa, Streptococcus gordonii str. Challis substr. CH1
MNKRVKIVATLGPAVEIRGGKKFGEDGYWGEKLDVEASAKNIAKLIEAGANTFRFNFSHGDHQEQGERMATVKLAEEIAGQKVGFLLDTKGPEIRTELFEGDAKEYSYKTGEKIRVATKQGIKSTRDVIALNVAGALDIYDDVEVGHQVLVDDGKLGLRVFAKDDATREFEVVVENDGIIAKQKGVNIPNTKIPFPALAERDNDDIRFGLEQGINFIAISFVRTAKDVDEVRAICEETGNGHVQLFAKIENQQGIDNLDEIIEAADGIMIARGDMGIEVPFEMVPVYQKMIITKVNAAGKVVITATNMLETMTEKPRATRSEVSDVFNAVIDGTDATMLSGESANGKYPLESVTTMATIDKNAQTLLNEYGRLNSDTFERNSKTEVMASAVKDATNSMDIKLVVTLTKTGHTARLISKYRPNADILALTFDELTERGLMLNWGVIPMLTDTPSSTDDMFEIAERKAVEAGLVQSGDDIVIVAGVPVGEAVRTNTMRIRTVR

SEQ ID NO: 386 - DNA, 1413 bp, Citrobacter koseri ATCC BAA-895
  CDS (1)..(1413): transl_table=11
atgaaaaagacgaaaattgtttgcaccatcggtccgaaaaccgaatctgaagagatgttaaccaaaatgctggacgcaggcatgaacgttatgcgtctgaacttctctcacggtgactatgcagaacacggtcagcgcatcaagaatttgcgcaacgtaatgagcaaaaccggtaaaaaagccgcaatcctgctcgataccaaaggcccggaaatccgtaccattaagctggaaggtggtaatgacgtctccctgaaagcgggccagaccttcactttcacaacggacaaatccgttatcggcaacagcgaaatggttgccgtcacttatgaaggtttcacttctgacctgtccgtaggcaacaccgtactggttgacgatggtctgatcggcatggaagtcaccgcgatcgaaggtaacaaggttatctgtaaagtgctgaacaacggcgacctgggcgaaaacaaaggcgttaacctgccgggcgtttccatcgcgctgccagcactggctgaaaaagacaaacaggatctgatcttcggctgcgaacaaggcgttgactttgttgccgcgtcctttatccgtaagcgttctgacgttgttgaaatccgtgagcacctgaaagcgcacggcggcgagaacatccagatcatctccaagatcgaaaaccaggaaggcctgaacaacttcgatgagatcctcgaagcgtctgacggcatcatggttgctcgtggcgacatgggcgttgagatcccggttgaagaagttatcttcgcgcagaagatgatcatcgaaaaatgtatccgcgcacgtaaagtcgttatcaccgcgacccagatgctggattccatgatcaagaacccgcgtccgacccgcgcagaagctggcgacgtggcgaacgccatcctcgacggcaccgacgcagtgatgctgtccggcgaatccgcaaaaggaaaatacccgctggaagccgtcaccatcatggcgaccatctgcgagcgtactgaccgcgtaatgaccagccgtctggatttcaataacgacagccgtaaactgcgcatcaccgaagcagtgtgccgcggcgcggttgaaactgccgaaaaactggaagcgccggtcattgtcgttgcaactcagggcggtaaatctgctcgcgcagtgcgtaaatacttcccggacgctaccatcctggcgctgaccaccaacgaagtgaccgcgcgtcagctggtgctgagcaaaggcattgtgccgcagctggtgaaagaaattaactctactgacgacttctaccgtctgggtaaagaagtcgctctacagagcggtctgggccagaaaggcgacgttgtggtcatggtttccggcgcgctggtaccgagcggcacgaccaacaccgcatctgttcacgtcctgtaa

SEQ ID NO: 387 - protein, 470 aa, Citrobacter koseri ATCC BAA-895
MKKTKIVCTIGPKTESEEMLTKMLDAGMNVMRLNFSHGDYAEHGQRIKNLRNVMSKTGKKAAILLDTKGPEIRTIKLEGGNDVSLKAGQTFTFTTDKSVIGNSEMVAVTYEGFTSDLSVGNTVLVDDGLIGMEVTAIEGNKVICKVLNNGDLGENKGVNLPGVSIALPALAEKDKQDLIFGCEQGVDFVAASFIRKRSDVVEIREHLKAHGGENIQIISKIENQEGLNNFDEILEASDGIMVARGDMGVEIPVEEVIFAQKMIIEKCIRARKVVITATQMLDSMIKNPRPTRAEAGDVANAILDGTDAVMLSGESAKGKYPLEAVTIMATICERTDRVMTSRLDFNNDSRKLRITEAVCRGAVETAEKLEAPVIVVATQGGKSARAVRKYFPDATILALTTNEVTARQLVLSKGIVPQLVKEINSTDDFYRLGKEVALQSGLGQKGDVVVMVSGALVPSGTTNTASVHVL

SEQ ID NO: 388 - DNA, 1413 bp, Serratia proteamaculans 568
  CDS (1)..(1413): transl_table=11
atgaaaaagaccaaaattgtttgtaccatcggtccaaaaaccgaatcggaagaaatgctgaccaacctgctgaatgcaggcatgaacgtaatgcgccttaacttctcccacggcgattatgaagagcacggcaaccgcatcaagaacatgcgcgccgtgatggcgaaaaccggtcagaacgccggcatcctgttggataccaaaggcccggaaattcgcaccatgaaactggaaggcggtaaagacgcggcgctggttgccggtcagaccttcactttcaccaccgatcagagcgttatcggcaacaacgaacgcgttgcggtaacctacgccggctttagcgctgacctgaaaatcggcaacaccgtattggtggatgacggcttgatcggcatggaagtcaccaacgtgaccgaaagcgaagtgatctgtaaggtgctgaacagcggcgacctgggcgaaaacaaaggcgttaacctgccgggcgtttccatccaactgcctgcactggccgaaaaagacaaacgcgacctgattttcggctgcgaacagggcgtggacttcgttgccgcttccttcatccgcaagcgttctgacgtgctggaaattcgtgagcacctgaaagcgcacggcggctcgcagatccaaattatctccaaaatcgaaaaccaggaaggcctgaacaacttcgacgaaatcctcgaagcttctgacggcatcatggttgctcgtggcgatctgggcgttgaaatcccggtagaagaagttatcttcgctcagaagatgatgatcgaaaaatgtaaccgtgcacgcaaagtggtgatcaccgccacccaaatgctcgattccatgatcaagaacccacgccctacccgtgcagaagccggcgacgtagctaacgccattttggacggtaccgacgccgtgatgctgtctggtgagagcgccaagggcaagtacccactggaagccgttaccatcatggcgaccatctgtgagcgcaccgaccgcgtgatgccaagccgtatcgacagcctgcatgacaaccgcaagctgcgcatcaccgaagccgtatgccgtggtgctgttgaaaccgcagagaaactggatgcaccactgatcgtagtggccaccagcggcggcaagtcagccaaatccgtgcgtaaatacttccctaacgctgtgatcctggcgctgaccaccaacgaaactaccgctcatcagcttattctgaccaagggcgtgatcccacagatggtcaaggaaattgcctctaccgacgacttctatcgcatcggtaaagaagcggcattggccagcggtttggctcaaaaaggcgacgttgtagtgatggtttctggtgcactggtaccaagcggcactaccaatactgcctcggtgcacgtactctaa

SEQ ID NO: 389 - protein, 470 aa, Serratia proteamaculans 568
MKKTKIVCTIGPKTESEEMLTNLLNAGMNVMRLNFSHGDYEEHGNRIKNMRAVMAKTGQNAGILLDTKGPEIRTMKLEGGKDAALVAGQTFTFTTDQSVIGNNERVAVTYAGFSADLKIGNTVLVDDGLIGMEVTNVTESEVICKVLNSGDLGENKGVNLPGVSIQLPALAEKDKRDLIFGCEQGVDFVAASFIRKRSDVLEIREHLKAHGGSQIQIISKIENQEGLNNFDEILEASDGIMVARGDLGVEIPVEEVIFAQKMMIEKCNRARKVVITATQMLDSMIKNPRPTRAEAGDVANAILDGTDAVMLSGESAKGKYPLEAVTIMATICERTDRVMPSRIDSLHDNRKLRITEAVCRGAVETAEKLDAPLIVVATSGGKSAKSVRKYFPNAVILALTTNETTAHQLILTKGVIPQMVKEIASTDDFYRIGKEAALASGLAQKGDVVVMVSGALVPSGTTNTASVHVL

SEQ ID NO: 390 - DNA, 1761 bp, Bacillus pumilus SAFR-032
  CDS (1)..(1761): transl_table=11
atgagaaagacaaaaatcgtttgtacaatcggtccagcaagtgaaaccattgaaaagctgactgaattgattgaagcaggaatgaatgtagccagactaaacttctctcatggagattttgaagagcatggtgcacgcatcgaaaacattcgtaaagcagggaaaacattaggcaaggacattgcgatccttcttgatacaaaaggtccagagatccgtacacgtacagttgaaaacggctcaattgagctagtcgctggtgcagatctcatcgtaagtatggaagacattgttggaaatacggaaaaaattagtgtgacatatgaagatttgattcatgatgtagaagtgggttcaacaatccttttagatgatggtctcattggtttagaagtgaaagaactgaacatggatgagaaagaaatcgtcacaaaggtcatgaatacaggcacgctcaaaaacaaaaaaggtgtaaacgtaccaggtgtaagtgtgaacttgccaggtattacagaaaaagatgccaatgatattctgttcggaattgaacaaggcgttgatttcatcgcagcttcttttgtgagacgagcttctgatgttcttgaaattcgtgagcttcttgaaaagaataatgcggctgacattcaaatcatccctaagattgaaaaccaagagggtgttgataacattgatgaaatccttgaggtatcagacggtttgatggttgcgcgtggagatcttggtgtagagatcccagcagaagaagtaccgcttgttcaaaaaatgctcatcaaaaaatgcaatcgcttgggcaaacctgtcatcacagcaacccaaatgcttgatagcatgcagcgtaatcctcgtccaactcgtgcggaagcaagtgacgtggcaaatgctatttttgatggcacagatgcgattatgctttctggtgaaacagcagcaggaacgtatccagtggaagctgtacaaacaatgcataacattgcatcacgttcagaagatgcactcaactataaagccattctttctcgcagaagcgaagaagtagatgtcagcattactgatgccattggtcaatctgttgcacatacagcgatgaagcttgacgttgcagcgattgtgacacctacggaaagcggtcatacagcgagaatgatttcaaaatacagaccaaaagcaccaatcgtagcagtcacagcaaacgaatcagttgcaagaaagctatctcttgtattcggtgtatttgcaaagagtggatcaaaaacgacgtctacggatgaaatgcttgagaatgcagttgagaaatcgattgaaacaggctacgtgagacatggcgatttaatcgttattacagctggtgtgccagttggtgaaacaggtacaacaaacttaatgaaagtgtatgttgtcggtgacatcattgcgaaaggtcaaggaattggccgtaaatctgcatttggaccggttgtcattgcacaaagcggaaaagaagcagaagaaaaaatgtacgatggggcgattcttgtcgcaaactgtacagatcgtgatatgatgagtgctttagagaaagcatctgccttgatcactgaagaaggcggcttaacaagccatgcagcagtcgttggactcagccttggcattccagtgattgtaggtcttgatggagctacaacactcctaaaagaaggcgaagaaattacagtagatccggcacgcggagcgatctacaaaggccgtgcaagcgtcctataa

SEQ ID NO: 391 - protein, 586 aa, Bacillus pumilus SAFR-032
MRKTKIVCTIGPASETIEKLTELIEAGMNVARLNFSHGDFEEHGARIENIRKAGKTLGKDIAILLDTKGPEIRTRTVENGSIELVAGADLIVSMEDIVGNTEKISVTYEDLIHDVEVGSTILLDDGLIGLEVKELNMDEKEIVTKVMNTGTLKNKKGVNVPGVSVNLPGITEKDANDILFGIEQGVDFIAASFVRRASDVLEIRELLEKNNAADIQIIPKIENQEGVDNIDEILEVSDGLMVARGDLGVEIPAEEVPLVQKMLIKKCNRLGKPVITATQMLDSMQRNPRPTRAEASDVANAIFDGTDAIMLSGETAAGTYPVEAVQTMHNIASRSEDALNYKAILSRRSEEVDVSITDAIGQSVAHTAMKLDVAAIVTPTESGHTARMISKYRPKAPIVAVTANESVARKLSLVFGVFAKSGSKTTSTDEMLENAVEKSIETGYVRHGDLIVITAGVPVGETGTTNLMKVYVVGDIIAKGQGIGRKSAFGPVVIAQSGKEAEEKMYDGAILVANCTDRDMMSALEKASALITEEGGLTSHAAVVGLSLGIPVIVGLDGATTLLKEGEEITVDPARGAIYKGRASVL

SEQ ID NO: 392 - DNA, 1476 bp, Arcobacter butzleri RM4018
  CDS (1)..(1476): transl_table=11
atgaaaaaaagaacaaaaattttagcaactttaggcccagcaagtcacactatagagatgattgaaggtttaataaaagctggtgcaaatatgtttagattgaacttttctcatggaagtcacgaatatcacttagaaactttaaataatattaaaacagctatgaaaaacactggaaaaacagttggtattttacaagatatttcaggaccaaaagtaagaattggtgatttaaaagagccattttctttaacaagaggagatattttaacttttgtaaaagatgagatagttggttataaaaaagcagataaagaatatattgtatctataaactatccagatattttagggaaaataaaagttgatgaatatatatatttgtatgatggaacaattagagcaaaagttataaaagttggagatgaagtacaagctagaattgaaaataatggaacattatcatctaaaaaaggtgtaaatttcccgaatactgtaattgacattgatgtaattacaaaaaaagatgaaaaagatatagcttggggaattgaaaatgaagtagattattttgcgatttcatttgttcaaaatgcaagagatatgagaagagctagaagccttttaaatggatatagaggaaaattaattgcaaaaattgaaaaatttgatgcagttgcaaatatcgatgaaattatagaagcaagtgatggattgatggttgcaagaggagatttaggaattgaagttccatattatgatgttccaactattcaaaaaatgcttattaaaaaagcaaacttaaaaggaattccagttatcacagcgactcaaatgcttttatcaatgactcaaaatgaaagagctacaagagcagaaatttctgacgttgctaatgctgttttagatggaactgatgtagtaatgttaagtgaagagagtgctgttggagaagatccagtaaatgttgttgatacaatgcataatattattgcaaaaactgaaggtatttatgattatgacaaacaatataaaatgtcatatttagatgaatttgatgttattcaagcaacagttacaaaacttgcagatgacttaggagctgatggaattttagcacttacaagttcaggaaaatcggctgttaaaatgtcaagatatagaccaaaaacacctatttatacatttactcataagaaaaaagtgcttaactctttaactgctatttggggaatagaaccagttgcagtaataaaagaagctcaagcatctaaaatgtttcaaaaaatgttaaaaaaccttgatcaaaaaggtattttaaatagaaaaggtatttatgtagctactgttggttatccagttggaatgccaagaagtacaaatactattaaaattttaactccaagtgaaatagaatattactttaactttgaagcaaatagaaaaaaagagaaagaagagaaaaaatctaaataa

SEQ ID NO: 393 - protein, 491 aa, Arcobacter butzleri RM4018
MKKRTKILATLGPASHTIEMIEGLIKAGANMFRLNFSHGSHEYHLETLNNIKTAMKNTGKTVGILQDISGPKVRIGDLKEPFSLTRGDILTFVKDEIVGYKKADKEYIVSINYPDILGKIKVDEYIYLYDGTIRAKVIKVGDEVQARIENNGTLSSKKGVNFPNTVIDIDVITKKDEKDIAWGIENEVDYFAISFVQNARDMRRARSLLNGYRGKLIAKIEKFDAVANIDEIIEASDGLMVARGDLGIEVPYYDVPTIQKMLIKKANLKGIPVITATQMLLSMTQNERATRAEISDVANAVLDGTDVVMLSEESAVGEDPVNVVDTMHNIIAKTEGIYDYDKQYKMSYLDEFDVIQATVTKLADDLGADGILALTSSGKSAVKMSRYRPKTPIYTFTHKKKVLNSLTAIWGIEPVAVIKEAQASKMFQKMLKNLDQKGILNRKGIYVATVGYPVGMPRSTNTIKILTPSEIEYYFNFEANRKKEKEEKKSK

SEQ ID NO: 394 - DNA, 1437 bp, Shewanella pealeana ATCC 700345
  CDS (1)..(1437): transl_table=11
atgttccgcagaaccaaaattgtaacaactttgggtccagccacagaccgtgatgacaacttacgccgcattattgctgccggtgctaacgttgttcgcttaaacttctctcacggtgcaccagaagatcataagaaacgcgcagacgatacacgagcgattgcaaaagagctcggcgttcatgttgccgttttaggcgatctacagggccctaaaatccgaatctcaactttcaaagacaacagaaaggttatgttagtgcttggtcaagcctatacccttgatgccgatctagcgaaaggtgaaggtgatgaaaaccaagtcggtatcgattataaagagttaccacaggacgttagtcttggtgatatcttaatgctcgatgacggccgcgttcaactacgcgttgaaagcgtcgaaggtaacaaggttcataccatagtgacggttgccggtcctttatcaaacaataaaggtatcaacaagcaaggcggtggcctttctgcggcggctctaacagaaaaagacaagcaagacatcatcaccgcagctgagattaaagttgattatctcgccgtctctttcccaagaagtggtgcagatcttaactacgctcgtgatttagcacgtcaagccggtagtaatgcgttaatcgtctctaaagttgagcgcgcagaagccgttgcaactgacgaagcgatggacgatgtcatcatggcgtctgatgccgttatggttgctcgtggtgatctcggtgttgaaattggtgatcctgctcttgttgcagttcaaaagagactgattagccgttcacgtcaattgaataagcctgttattacagcaactcaaatgatggaatcgatgatctctagcccaatgccaactcgtgcagaagtgatggacgtagcaaacgcggttctagatggtaccgatgcggtaatgctaagcgccgaaactgctgccggtgacttcccagaagaaaccgttaaagccatggctgaagtctgtttaggtgcggagtctcatcctagtgttcaagtttctaagcacagattggatcagcagttcaccaccatcgaagagacgattgcattatcgactatgtatgcagcaaaccacctagaaggtatcaaggccattatcgcccttaccgaatctggtgcaacgccgcagatgatgtctcgcatcagctctgctctgccaatttttgccttgtcacgtcatgagtcgactttggctaagatggcgctttaccgcggtgttcagcctgtgtattttgattcgactgcacatgctccagaagcggtagctcaaaaagcactagagacgctttctcaagctggttaccttgtaaaaggcgacatggcgatgatgactaagggtgatgcaatggaaaccgttggtggcactaacaccagcaaggttgttgttgtttaa

SEQ ID NO: 395 - protein, 478 aa, Shewanella pealeana ATCC 700345
MFRRTKIVTTLGPATDRDDNLRRIIAAGANVVRLNFSHGAPEDHKKRADDTRAIAKELGVHVAVLGDLQGPKIRISTFKDNRKVMLVLGQAYTLDADLAKGEGDENQVGIDYKELPQDVSLGDILMLDDGRVQLRVESVEGNKVHTIVTVAGPLSNNKGINKQGGGLSAAALTEKDKQDIITAAEIKVDYLAVSFPRSGADLNYARDLARQAGSNALIVSKVERAEAVATDEAMDDVIMASDAVMVARGDLGVEIGDPALVAVQKRLISRSRQLNKPVITATQMMESMISSPMPTRAEVMDVANAVLDGTDAVMLSAETAAGDFPEETVKAMAEVCLGAESHPSVQVSKHRLDQQFTTIEETIALSTMYAANHLEGIKAIIALTESGATPQMMSRISSALPIFALSRHESTLAKMALYRGVQPVYFDSTAHAPEAVAQKALETLSQAGYLVKGDMAMMTKGDAMETVGGTNTSKVVVV

SEQ ID NO: 396 - DNA, 1755 bp, Alkaliphilus oremlandii OhILAs
  CDS (1)..(1755): transl_table=11
atgaaaagaacgaaaatcgtatgtaccattggacctgcaagtgaaagtaaagaggtttttaggaaattagttatgcggggactgaatgttgcaagattaaatttttcccatggtagccatgaagagcacggtgaaagaattcgggtaatcaaggaagtaagagaagaattaaacgagcctgtagcaattctattggataccaaaggacctgaaattagaacgggtaagtttaaagacacggaagtagagcttctggaaggacaagaattcaccattacgacgagagatgttcttggagataataccatctgtaatgtaagctatgaagggcttgcaagagatgtaaaggtaggggacagtatcctaatcgacgatggtctagttggtttaaaagttcagaatatcgtaggagatacagatatccaatgtatcgttgagaatgcagggattgtaaagaataataaaggtgtcaacgtaccaggcgtaaaaattaatttacctgctattacagaaaaggatgaatccgatattaaattcggtatcgaaatggacattgactttatcgcagcttccttcgttagaaaggcagcagacgttttagctattcgaaagattttagaagataataacggaagccatattcagattatttctaaaatagagaatcaagaggggatggacaatctggatgaaatcattgaagtttcagacggattgatggttgcaaggggcgatttgggtgtagaaatccctacggaagaaattcctttggctcaaaaagaaatgatcagaaaatgtaatagagctggaaagcctgttattacagcgacacaaatgctggattccatgatcagaaacccaagaccaactcgcgcagaggtaacggatgttgccaatgctatctttgacggaaccgatgcaatcatgctttccggagaaactgcggctgggaagtatccagcagaggcagtcgaggtgatgagcaacattgccaagcgtgcagaagctgccatcgactataggggacttctaaaaacgaaagccatagaaatggaaacctctgtgacggatgctatcagccatgctacctgcacaacagcagcagatttagatgcatctgccattgttacagctacatcttcgggatatactacaagaatggtatctaaatttagaccatcagcaccgattattgcaacgactacaagcgaaagtgtaagaagaagattgagcttaatctggggggtttactctgttattacagagcaacttcattccacagacgatatcattgatatctctgtaagcaaggccctagaagcggagctaattcgtaatggagatttaattgtaatcacagcaggcgttccagtaggagtttccggtacgaccaacctaatcaaagttcatatcgtaggagaagtcatcctatctggaactgggattggaaaaaaagctgccactggaaaggttgttattgtaaatagtgtcgaagatggacataaggttgaagaaggcgatatcttagtagcaaaagcaacggacagagatttaatgcctttcatagaaaaagctgctgcaatcatcacagaagaaggcggcttgactagccacggcgctattgttggattgaacctggggaaagcaaccttagttggagcagatatggcaaccataaagctaaaagagggagaaatcgttacggtagatgccttaagaggcttggtatacagcggagaaacaaaagttctttaa

SEQ ID NO: 397 - protein, 584 aa, Alkaliphilus oremlandii OhILAs
MKRTKIVCTIGPASESKEVFRKLVMRGLNVARLNFSHGSHEEHGERIRVIKEVREELNEPVAILLDTKGPEIRTGKFKDTEVELLEGQEFTITTRDVLGDNTICNVSYEGLARDVKVGDSILIDDGLVGLKVQNIVGDTDIQCIVENAGIVKNNKGVNVPGVKINLPAITEKDESDIKFGIEMDIDFIAASFVRKAADVLAIRKILEDNNGSHIQIISKIENQEGMDNLDEIIEVSDGLMVARGDLGVEIPTEEIPLAQKEMIRKCNRAGKPVITATQMLDSMIRNPRPTRAEVTDVANAIFDGTDAIMLSGETAAGKYPAEAVEVMSNIAKRAEAAIDYRGLLKTKAIEMETSVTDAISHATCTTAADLDASAIVTATSSGYTTRMVSKFRPSAPIIATTTSESVRRRLSLIWGVYSVITEQLHSTDDIIDISVSKALEAELIRNGDLIVITAGVPVGVSGTTNLIKVHIVGEVILSGTGIGKKAATGKVVIVNSVEDGHKVEEGDILVAKATDRDLMPFIEKAAAIITEEGGLTSHGAIVGLNLGKATLVGADMATIKLKEGEIVTVDALRGLVYSGETKVL

SEQ ID NO: 398 - DNA, 1776 bp, Acaryochloris marina MBIC11017
  CDS (1)..(1776): transl_table=11
atgtccttgcctgagaccgaccgtcgtaccaaaattgtggccaccgtagggccagccatctccaagccagatatgctgcgggcggtcattgaagcaggggccaccaccctccgcctcaacttctcccacggcacccatgacgatcatctgcgatccattcgtctgattcggcaactctcttatgagatgaaccagcccgttgccattctgcaagacctgcaagggcctaaaatccgccttggtaaattcgcggacggccccatcaccctcaaaaacggtgatccctttgccttgacgagtcaggctattcccggcacgcaaaccagcagcatggtcacctattccaaactggctgacgaagtgtctgcaggagccaccattcttctcgatgatggccgagtcgagatgatcgttgaatctgtagatcaatcttctaagaccttgaattgccgcgtcgttgtgggaggcaagctctcggactctaaaggtgtgaactttccaggagtctatttatccgtcaaagcgctcaccgataaagatcgcgaagatttacaattcggtctgacccatggtgtcgattgggttgccctcagcttcgtccgcaatccagcagacgtgatcgagattaaagaaatcattgctaacgcaggcaaatccatccccgtcattgccaagatcgaaaaacatgaagccattacccaaatggaagagattctcagcctatgtgatggggtaatgatcgctcggggtgacttaggggttgagctgcctgcagaggatgtcccgattctgcaaaagcggttgattgccacggcaaaccgtctcggcattcctgtgattacggccacgcaaatgctggatagcatggtcaattcccccagacccacgcgggcagaggtctctgacgtggccaacgccattttggacggcactgatgcggtgatgctgtccaatgaagccgccgtcggcaactatcctgtggaagcggtggcgaccatggccaaaatcgcagagcggattgattatgaaaaaaatattcaaaatcgtactgccctagacacctcagaaactgccattcccagtgccattagccaagcggttgggcatatcgccactcagctcaaagccaaagcgattctcacctttaccaaaactggatcgaccggacgcaacgtttccaaatatcggcccaatattcccattctggctgtgacgccccatgtagaggtcgctcgccaactgcaaatggtttggggtgtacagccgttgctggttctcaatttgccctccattgatgaaaccctacaagcctcactcaatgtggcccaggagaaaggcttagtggaagaaggcgacttagtagtggtgaccgcaggcactctccagggggtcgcggggtccacagactttatcaaagtcgagattgtcaccgctgttatgggtcagggcactggcattggcaatggctctgtgagcggcttagctcgcgtcattacagcatccaacggtgttaaaggctttaatcggggcgatattttagtagcgaaggaaactgacgctagccatgtcgatgcgattcgcaaagccgctggcatcattactgaagtcggcggtatggacagtcacgctgccgtattagggctgcggttgcgaattccagtcatcgtcggggttgaaaatgcaactcggatgattcgggatggcacccaccttacgttagatatgaaaaaagggttggtctactcgggcaccatgacgtcgcaagcccaaagctaa

SEQ ID NO: 399 - protein, 591 aa, Acaryochloris marina MBIC11017
MSLPETDRRTKIVATVGPAISKPDMLRAVIEAGATTLRLNFSHGTHDDHLRSIRLIRQLSYEMNQPVAILQDLQGPKIRLGKFADGPITLKNGDPFALTSQAIPGTQTSSMVTYSKLADEVSAGATILLDDGRVEMIVESVDQSSKTLNCRVVVGGKLSDSKGVNFPGVYLSVKALTDKDREDLQFGLTHGVDWVALSFVRNPADVIEIKEIIANAGKSIPVIAKIEKHEAITQMEEILSLCDGVMIARGDLGVELPAEDVPILQKRLIATANRLGIPVITATQMLDSMVNSPRPTRAEVSDVANAILDGTDAVMLSNEAAVGNYPVEAVATMAKIAERIDYEKNIQNRTALDTSETAIPSAISQAVGHIATQLKAKAILTFTKTGSTGRNVSKYRPNIPILAVTPHVEVARQLQMVWGVQPLLVLNLPSIDETLQASLNVAQEKGLVEEGDLVVVTAGTLQGVAGSTDFIKVEIVTAVMGQGTGIGNGSVSGLARVITASNGVKGFNRGDILVAKETDASHVDAIRKAAGIITEVGGMDSHAAVLGLRLRIPVIVGVENATRMIRDGTHLTLDMKKGLVYSGTMTSQAQS

SEQ ID NO: 400 - DNA, 1743 bp, Clostridium phytofermentans ISDg
  CDS (1)..(1743): transl_table=11
atgaggaaaacaaaaattgtttgtaccttaggcccggcaaccgaagatgatgctgtattgcgtcagctgatgattgaggggatggatgtagccagatttaatttctcgcatggtgattatgaacagcatacaagaaattatgaacgtattcgccgacttagtgcggaattgaaattaccgattgctacgttacttgataccaaaggaccagaaatccgtattggtacatttgaaaacggaaaaattgaattaaaaaagggtcaaatctttaccctaacaacaaatgatattgttggagatgaaacacaggtttcaattacatataaaaacttaatacgtgacataaaaaatggagttaaaatactgattgatgatggtcttatagagcttaaagtatttaatatcactgatacagatattatttgtgaagttctaaatggtggtatgatttcaaatcataagggtgtaaatgtacctggagttgaattatccatgccttttattagtaaacgtgattatgaggatatcgtatttggtattgggcagggttttgactttattgcagcttcgtttacaagatgtgcagatgacataatccagatacgtaaaatattgaatgagtataactgtaatacagtcaatataattgcaaaaattgaaaatttacaaggtgtaaacaatattgatgagataattcgtgtgtctgatggtattatggttgcccgtggtgacatgggtgttgaaattccgttagaagaagttcctgtcattcaaaaaatgattattaaaaaggtttacaatgcagagaagcaagtaatcacagcgactcagatgcttgattctatgatgaagaatccaagaccaacaagagctgaggcgacggatgttgcgaatgctatttacgatggaactagtgccattatgctttccggtgaaacagcagcaggtttatatcctgttgaggcattaaggacaatggttaaaatcgcaaagcgaaccgaagcagatatcgattatacatcacgatttagaaagagagatagtcttacgaatccggatgtcaccaatgcaatctcacatgcgaccgttacaacagcgatagaccttaatgcagctgcgataataaccgtaacaaaatccggtaaaactgcaagaatgatttcaaagtatcgtccaccaagttctatcattgcatgtaccacctacgaacatatatgccgtcagatgaatctttcctggggtgttgtaccgttgttaatcgaagaggaagtggatgcaaatacattgtttgaacatgcggtggaagcagcagaaaaggcaggttttgttaagtcaggtgaattagctgttatcactgctggagtaccacttggaatttccggtactaccaatcttatcaaggttcaagtcgtaggtcatatcttagtaaaaggaagaggcttaattgaccgtgaggtatgctcaagtctttgcgtatgtaatgatactgaggaattaagagaaacttttaagccaggggatattatcgttgtgaaagaaaccaataacgagatgatggagcaattaaaacaagcagctggtattattgttgagcaggaggggattaattcccatgcttcaatcgttgggttaagccttgatattccagtaattcttggtgctgaaaatgcaacaaagatattacgtactggttcaatcgtaacactagatggtaaagaagggaatgtatctggtaatcgataa

SEQ ID NO: 401 - protein, 580 aa, Clostridium phytofermentans ISDg
MRKTKIVCTLGPATEDDAVLRQLMIEGMDVARFNFSHGDYEQHTRNYERIRRLSAELKLPIATLLDTKGPEIRIGTFENGKIELKKGQIFTLTTNDIVGDETQVSITYKNLIRDIKNGVKILIDDGLIELKVFNITDTDIICEVLNGGMISNHKGVNVPGVELSMPFISKRDYEDIVFGIGQGFDFIAASFTRCADDIIQIRKILNEYNCNTVNIIAKIENLQGVNNIDEIIRVSDGIMVARGDMGVEIPLEEVPVIQKMIIKKVYNAEKQVITATQMLDSMMKNPRPTRAEATDVANAIYDGTSAIMLSGETAAGLYPVEALRTMVKIAKRTEADIDYTSRFRKRDSLTNPDVTNAISHATVTTAIDLNAAAIITVTKSGKTARMISKYRPPSSIIACTTYEHICRQMNLSWGVVPLLIEEEVDANTLFEHAVEAAEKAGFVKSGELAVITAGVPLGISGTTNLIKVQVVGHILVKGRGLIDREVCSSLCVCNDTEELRETFKPGDIIVVKETNNEMMEQLKQAAGIIVEQEGINSHASIVGLSLDIPVILGAENATKILRTGSIVTLDGKEGNVSGNR

SEQ ID NO: 402 - DNA, 1425 bp, Clostridium phytofermentans ISDg
  CDS (1)..(1425): transl_table=11
atgcagaaaaaaacgaaaattgtttgtaccttagggccagcgacttcaaccgaagagatgattaaggaattgtgtttaagtggaatggatattgcgagattgaatttctcacacggaaatcatgaaggtcatggtgaaatgattgctaaaattaagaaggttcgtgaagaattaggtcttccaatcgcgattcttcttgacacaaaaggaccagagattcgtaccggacttgcggaaaatggtagagagtttaccctagaaaaaggcgaacaggtaattgtaacaacagaggatgttccttgtaatagttcaattatcagtgttacttataaaaaccttccagaggacgttgtggtgggaggatcaatcttaatcgcagatggtctgattgagttaaaagttaaaaaagtagaagacgacgaaaaagtaatctgtgaagttgttaatggtggtgagcttggtagtagaaaaggtgtaaaccttccaaacgtaaagcttaagcttccagcaatcactgagcaggatagagcagatatcatctttggtatcaatgaaggagttgactttatcgcagcttcttttatccgtaatgcagaagcgattcgtgaaattcgtggtatcattcatgactgcaattctgatatcgcaattattgcgaaaatcgagaatatggaaggtatggaaaacctagacgaaattattgcagaaacagacggaattatggttgctcgtggtgaccttggtgtagaagtagagccagaaactcttccatacatccaaaagaccatgattcaaaaatgtaatgcggcatttaagccagttattacagcaactcagatgttagattctatgattcgtaatccacgtccaactcgtgcagaggttacagacgttgcgaatgcgatctatgatggaacagatgctatcatgttatctggagaaacagctgctggtaaatatcctattgaagcagtacagatgatggcgaagattgcaaaagaaacagaaacacattacgagtctattacatgtaacgagagtgaatttgtaccaggcagcgaagatgtttcatgcgcaattagctattccgcagttgcaacagctggacgccttgatgctaaattaatcattgcttctagcttctctggttataccgctcgtttggtttcaaaataccatccaaagtgtccaatcattggattatctcctttagatcgtacacttcgtaagatgcagatttaccgtggtgttcagccattaaaggtagatgaagtgaattctactgaccatcttttagatgaagcagtgaagacggtaagtaaacatggctatgtaaatgttggtgatgttgtgattttaacagcaggtgtaccagctggtaagtcaagcgtaactaatatgataaaagcggttattattgactaa

SEQ ID NO: 403 - protein, 474 aa, Clostridium phytofermentans ISDg
MQKKTKIVCTLGPATSTEEMIKELCLSGMDIARLNFSHGNHEGHGEMIAKIKKVREELGLPIAILLDTKGPEIRTGLAENGREFTLEKGEQVIVTTEDVPCNSSIISVTYKNLPEDVVVGGSILIADGLIELKVKKVEDDEKVICEVVNGGELGSRKGVNLPNVKLKLPAITEQDRADIIFGINEGVDFIAASFIRNAEAIREIRGIIHDCNSDIAIIAKIENMEGMENLDEIIAETDGIMVARGDLGVEVEPETLPYIQKTMIQKCNAAFKPVITATQMLDSMIRNPRPTRAEVTDVANAIYDGTDAIMLSGETAAGKYPIEAVQMMAKIAKETETHYESITCNESEFVPGSEDVSCAISYSAVATAGRLDAKLIIASSFSGYTARLVSKYHPKCPIIGLSPLDRTLRKMQIYRGVQPLKVDEVNSTDHLLDEAVKTVSKHGYVNVGDVVILTAGVPAGKSSVTNMIKAVIID

SEQ ID NO: 404 - DNA, 1413 bp, Salmonella enterica subsp. arizonae serovar 62:z4,z23:--
  CDS (1)..(1413): transl_table=11
atgaaaaagacgaaaattgtttgcactatcggtccgaaaaccgaatccgaagagatgttaaccaaaatgctggacgcgggcatgaacgtgatgcgtctgaacttctctcatggcgattatgcagaacacggtcagcgtatccagaacttgcgcaacgtgatgagcaagaccggtaaaaaagccgctattctgctcgatactaagggaccagaaatccgcactattaaactggagggcggcaacgacgtttcattgaaagcgggtcagacctttacttttaccaccgacaaatccgtggtcggtaataatgaaatcgttgctgtcacctatgaaggctttacctccgatctgtcagtcggcaacaccgtactggttgacgatggtctgatcggtatggaagtgaccgctatcgaaggcaataaagtggtttgtaaggtgctgaacaatggcgatctgggcgaaaataaaggcgttaacctgccaggcgtttccatcgcactgccagcgctggctgaaaaagataaacaggacctgatcttcggttgcgaacaaggcgttgattttgttgcggcttcttttattcgcaaacgttctgacgtagtcgaaattcgcgagcatctgaaagcccacggcggcgaaaacatccagattatctccaagatcgaaaaccaggaaggcctgaacaacttcgatgaaattctcgaagcttccgacggcatcatggttgcgcgtggcgacctgggcgtagaaatcccggttgaagaagtgatcttcgcgcagaagatgatgatcgaaaaatgtattcgcgcacgtaaagtggttatcactgcaacccagatgctggattccatgatcaaaaacccgcgtccgacccgcgcggaagctggcgacgttgcgaacgctatcctcgacggtacggatgcggtcatgctgtccggcgagtccgcaaaagggaaatacccgctggaagccgtttctatcatggcaactatctgcgaacgtactgaccgcgttatgaacagccgtctggactaccacaacgatagccgtaaattgcgtattacagaagcggtatgccgtggcgcggtagaaactgccgagaaactggaagcgccgctgatcgtggtagcgacccagggcggtaaatccgctcgcgctgtccgtaaatacttcccggacgccaccatcctggcgctgaccaccaatgaagtgaccgcccgtcagttagtgctgagtaaaggcgtggtttcgcaactggttaaagaaatcaattctactgatgatttctaccgtctcggcaaagatgtcgccctgcaaagcggccttgcccagaaaggcgacgttgtggttatggtctccggcgcgctggttccaagcggcaccactaacaccgcctctgttcacgtactgtaa

SEQ ID NO: 405 - protein, 470 aa, Salmonella enterica subsp. arizonae serovar 62:z4,z23:--
MKKTKIVCTIGPKTESEEMLTKMLDAGMNVMRLNFSHGDYAEHGQRIQNLRNVMSKTGKKAAILLDTKGPEIRTIKLEGGNDVSLKAGQTFTFTTDKSVVGNNEIVAVTYEGFTSDLSVGNTVLVDDGLIGMEVTAIEGNKVVCKVLNNGDLGENKGVNLPGVSIALPALAEKDKQDLIFGCEQGVDFVAASFIRKRSDVVEIREHLKAHGGENIQIISKIENQEGLNNFDEILEASDGIMVARGDLGVEIPVEEVIFAQKMMIEKCIRARKVVITATQMLDSMIKNPRPTRAEAGDVANAILDGTDAVMLSGESAKGKYPLEAVSIMATICERTDRVMNSRLDYHNDSRKLRITEAVCRGAVETAEKLEAPLIVVATQGGKSARAVRKYFPDATILALTTNEVTARQLVLSKGVVSQLVKEINSTDDFYRLGKDVALQSGLAQKGDVVVMVSGALVPSGTTNTASVHVL

SEQ ID NO: 406 - DNA, 1770 bp, Lactobacillus helveticus DPC 4571
  CDS (1)..(1770): transl_table=11
atgaagaaaactaagattgttagtactttaggaccagcttcagacgatattgaaactattactgctttagctaaagctggtgcaaacgtattccgtttcaacttctcacacggtaatcacccagaacaccttgctcgtatgaagatggttcgtcaagtggaaaaggatactggcatgcttcttggcatcgaccttgacactaagggtgctgaaatcagaaccactgaacaagaaggcggtaagtttactattaataccggtgatatgatccgtgtatcaatggacgacaccaagaagggtaacaaggacatgatccacgttacctacgaaggtttgtacgatgatactcacgttggtggtcacgtattaatcgacgatggtttggttgaccttttgattaaggaaaaggatgacgctaagagagaattagtttgtgaagctcaaaacactggtgttatcggctcaaagaagggtgttaacgctcctggtgttgaaatccgccttccaggtatcactgaaaaggatactgacgacattaagttcggtttacaatacggtattaacttcattactgcttcatttgcacgtaaggctcaagatatcttagaaatccgtaagctttgtgaagaagctggcgcagattacgttaagatcttccctaagattgaatcacaagaaggtattgacaacgctgacgaaatcttacaagtttcagatggtttgatggtagctcgtggtgacatgggtgttgaaattccatttatggaagttccatttgtacaaaagagcttaatccgcaaggctaacgcacttggtaagccagttattactgctactcaaatgcttgactcaatgcaagaaaacccacgtccaactcgtgccgaagtttctgacgttgctaacgctgttcttgatggtactgacgcaactatgctttcaggtgaatcagcaaacggtctttacccagttaaggctgttaaggcaatggctgaaattgacgaacgtactgaaaaacaaatgcttaagcgtaacactttagcacttcaaagattcgaagcttacaagggttcaaacgtaactgaagctatcggtgaatcagttgtacgtactgctcaagaattaggtgttaagactatcattactgctactaactcaggttacactgcacgtatgatttctaagtaccgtccaaacgcagacatcattgctttgactttcgatgaaaagatccaacactcattgggtatcgtttggggtgtacaaccattattgattgaaaagcctaagtcaactgatgacatgtttgaagtagctgctaaggtagctaaggaaaagggctttgttaaggatggcgaccttgtaatcatcgttgctggtgttccagttggtgactcaggtacaactaacttgatgaagttacaaattatcggtaacaagcttgttcaaggtttaggtgttggtaacggttcagttatcggcaaggctgttgtagcaaactcagctgaagaagctaacagcaaggttaaggaaggcgacatcttagttgctaagactactgacccagactacaacccagctatcaagaaggcttcaggcttagttgttgaagcttcaggtttgacttcacacgctgcagttatcggtttatcattaggtatcccagttgttgttggtactactaacgctactgaaaagatttctgatggttcaactattactgttgacgctcgtcgtggtgctatctaccaaggcgaaatctcaaacctttaa

SEQ ID NO: 407 - protein, 589 aa, Lactobacillus helveticus DPC 4571
MKKTKIVSTLGPASDDIETITALAKAGANVFRFNFSHGNHPEHLARMKMVRQVEKDTGMLLGIDLDTKGAEIRTTEQEGGKFTINTGDMIRVSMDDTKKGNKDMIHVTYEGLYDDTHVGGHVLIDDGLVDLLIKEKDDAKRELVCEAQNTGVIGSKKGVNAPGVEIRLPGITEKDTDDIKFGLQYGINFITASFARKAQDILEIRKLCEEAGADYVKIFPKIESQEGIDNADEILQVSDGLMVARGDMGVEIPFMEVPFVQKSLIRKANALGKPVITATQMLDSMQENPRPTRAEVSDVANAVLDGTDATMLSGESANGLYPVKAVKAMAEIDERTEKQMLKRNTLALQRFEAYKGSNVTEAIGESVVRTAQELGVKTIITATNSGYTARMISKYRPNADIIALTFDEKIQHSLGIVWGVQPLLIEKPKSTDDMFEVAAKVAKEKGFVKDGDLVIIVAGVPVGDSGTTNLMKLQIIGNKLVQGLGVGNGSVIGKAVVANSAEEANSKVKEGDILVAKTTDPDYNPAIKKASGLVVEASGLTSHAAVIGLSLGIPVVVGTTNATEKISDGSTITVDARRGAIYQGEISNL

SEQ ID NO: 408 - DNA, 1353 bp, Acholeplasma laidlawii PG-8A
  CDS (1)..(1353): transl_table=11
atgagaaaaacaaaaattgtttgtacattaggacctgcatcagaagataaagcagtcatgacacaacttgttaaagctggtatgaacgtagcacgctttaacttttcacacggagactatgaagaacacgggaaccgtttaaaaacgattcaatcaattaacgaggagttaggcacacacgttgcttacttacttgatactaaaggaccagaaattcgtacacacgaatttgatggtaaagtagaaatccaaaaaaattcaatcgttagaatcggatttacaccagtattaggaaacaaagaaagattctctgtttcatacccaggtttatttgacgatatgaaagtaggagaattcgtttctgttgatgatggttacctaacattagaagtgattgaaaaagatactaaaaataatgaattagtaactaaagctttaaacacacatacagtaaaatcaagacgtggtgtaaacattccaggtgttgttctaaatatgcctttcatttccgaaaaagatgcaagtgatattaaatttgctgcaactatgggttatgactttgttgctgcaagttttgtaagacgtggcgaagatgctcaagctgttcgtgatatcttggataacaacggtggtaaagacgttcaaattattgctaaaattgaaaaccaagaaggtatggataacctagatgacattttagatgttgttgatggtatcatggttgcacgtggagacttaggtatcgaagttgaaggtgaattagtaccaatgtaccaatcagaaatgatcgacaaatgtttagaattaggtaaagtagtaatcgttgctactcaaatgcttgaatctatgcaaaaaaacccacgcccaacaagagctgaagtatctgacgtatttaacgcagttagagaaggaacttctgcaacaatgttaagtggtgaatcagcagctggtgattacccaattgaatcagttaaaaaaatggcaagtattgatgcaaaagctgaatcaacattagactatgaagtgttcttagatggttacttcatgggagattctaatattgatgcaatcgctcaatcagcagctaaattagtattagagtatgaagtagatgttgtaattacaacaggcgttgatgtagctaaatcatttgcagcataccatacacaagcaattaacattgctgttgtaaaaaatgctaaagaagctagagcgttagcacttcactttggtgtatacccagtattaagtaaagatgaagcgtctaagttcttagataaattaggtttggttgaaggtgacttcgtattagaagtaactaatagttcaactaaattattagaaatcaaataa

SEQ ID NO: 409 - protein, 450 aa, Acholeplasma laidlawii PG-8A
MRKTKIVCTLGPASEDKAVMTQLVKAGMNVARFNFSHGDYEEHGNRLKTIQSINEELGTHVAYLLDTKGPEIRTHEFDGKVEIQKNSIVRIGFTPVLGNKERFSVSYPGLFDDMKVGEFVSVDDGYLTLEVIEKDTKNNELVTKALNTHTVKSRRGVNIPGVVLNMPFISEKDASDIKFAATMGYDFVAASFVRRGEDAQAVRDILDNNGGKDVQIIAKIENQEGMDNLDDILDVVDGIMVARGDLGIEVEGELVPMYQSEMIDKCLELGKVVIVATQMLESMQKNPRPTRAEVSDVFNAVREGTSATMLSGESAAGDYPIESVKKMASIDAKAESTLDYEVFLDGYFMGDSNIDAIAQSAAKLVLEYEVDVVITTGVDVAKSFAAYHTQAINIAVVKNAKEARALALHFGVYPVLSKDEASKFLDKLGLVEGDFVLEVTNSSTKLLEIK

SEQ ID NO: 410 - DNA, 1482 bp, Renibacterium salmoninarum ATCC 33209
  CDS (1)..(1482): transl_table=11
atgagacgcgcaaagattgttgcaaccttcggaccggctatttccggatacgagcaggctctggccgtgcttgaggccggagtggatgtagctcggatgaatatgagccacggtgattacaccgtgcacaacgaaacgtatgaaaacgttcgcaaggcggcgggcgtattgggcaagcccgttgccatcatggctgacctgcagggacccaagattcgcttgggccgcttcgttgatggcccgcatgcgctggcgcccggtgacgtcttcacgattactaccgaagatgtgcctggcaccaaggacatctgctctacaacgctcaagagcttgactgaagacgtcaaagtcggcgacagcttgctgatcgatgacggcaaagtgtcgctgcgggcaaccgcagtagacgcgatcaaagtggttactgaggttgttgttggtggtttggtttcaaacaacaagggcatcaacttgcccggtgttgcggtcaacgtgccggcattgagtgaaaaagacgaatcagatttgcgttgggccatgggccgtggcgttgattggatagcgctgtcattcgtccgcgatgcgtcggacattgttcgagtgcacgagattatggatgaggaaggccgccgcgtgccggcgatcgcgaagatcgagaagccgcaggcagtagacaatctttccgaaatcattgactccttcgatgccatcatggtggctcgcggcgatttgggcgtcgagcttccgctcgaagaggttccgattgtgcagaagaaggccatcgagttggctcgtcgctgggctaaaccagttatcgtggccactcaggttcttgagtcaatgattgagaatccgaggccgactcgtgctgaggcttcggattgtgccaatgcggtgttggacggcgcggacgcggtaatgctttccggcgaaactagtgtgggtaaatacccgatcgaaaccgtcaaaacgatggccagaatcatcgaatcgaccgaagagcacggcctggagcgggtaccggctctgggtactagcccgaagactcgcggtggtgccattacgcgtgctgccgtggttattgcggatcagctcaatgctaaatatgtttgtgctttcacgcagtcgggtgactcggctcgtcggctttcgcgcttgcgcccgaccaagccggtagtcgctttcacccctgatgagcgagtctggaaccagctttcgctgacttggggcatccagccgattatggtgccgatggtgcaccacacggatgagatgactcagcaggttgaccacatgctgctggagaagggcttggttgaggtggacgacgtcgtcgtcatcgcggccggttcgcctccaggacaggctggttcaaccaactcggttaaggttcaccgggtaggcgaccttgctgatttctctgaaaccggtcgttcaaaccaggaaaaggtcggcccgtggccggtcgttgaggctaactag

SEQ ID NO: 411 - protein, 493 aa, Renibacterium salmoninarum ATCC 33209
MRRAKIVATFGPAISGYEQALAVLEAGVDVARMNMSHGDYTVHNETYENVRKAAGVLGKPVAIMADLQGPKIRLGRFVDGPHALAPGDVFTITTEDVPGTKDICSTTLKSLTEDVKVGDSLLIDDGKVSLRATAVDAIKVVTEVVVGGLVSNNKGINLPGVAVNVPALSEKDESDLRWAMGRGVDWIALSFVRDASDIVRVHEIMDEEGRRVPAIAKIEKPQAVDNLSEIIDSFDAIMVARGDLGVELPLEEVPIVQKKAIELARRWAKPVIVATQVLESMIENPRPTRAEASDCANAVLDGADAVMLSGETSVGKYPIETVKTMARIIESTEEHGLERVPALGTSPKTRGGAITRAAVVIADQLNAKYVCAFTQSGDSARRLSRLRPTKPVVAFTPDERVWNQLSLTWGIQPIMVPMVHHTDEMTQQVDHMLLEKGLVEVDDVVVIAAGSPPGQAGSTNSVKVHRVGDLADFSETGRSNQEKVGPWPVVEAN

SEQ ID NO: 412 - DNA, 1425 bp, Chloroflexus aurantiacus J-10-fl
  CDS (1)..(1425): transl_table=11
atgcgtcgcacaaagattgttgccactctagggccggcgaccagcacccctgaacggatcgccggactgattcgggccggtatgaacgtcgctcggctcaacttctcgcatggtacccatgccgagcacgcagcacggattgcaatggtgcgacgggcagcggcggaggctggacggcatgtagcgattctgcaggacttgcaaggcccgaagattcgtaccgggccacttgaaaatgggcaaccggttgaactggttgccggacagcggtttgtgattacgactgagccgatcgttggcgatgcgcatcgagtcagtaccacctatcgtgcgttgccactcgatgttcgtccgcgggatcggattcttctctcagatggcctgatcgagctggttgtgaccggccataccgacaccgaagtggagacggaagtcgttcacggtggtcggctccgcgaacatcaagggattaacctgccgggagtgcgggtcagtgctccggctgcaaccgagaaagacctggccgatctggcgtttggtctcgaacagggagtagattatgtcgcgctctcgtttgttcggcgcgccagtgatgtgcgtgaggtgaaagagtttatccggcgggcaggtaaacaaacaccggtcatcgccaagatcgagcgtccggaggcgcttgacgtgttgccggagattctggctgaagctgacgggatcatggtggcgcgtggtgatctgggcgtcgagatgccaccggagcgggtgccgattgtgcagaaacagattattgccgccgccaatcaggcgctgcttccggtcattacggcgacccagatgctcgagtcgatgatccacaacccgcgaccgacacgggctgaggccagtgatgtggcgaatgccatcattgacggcactgatgccgttatgctcagtggcgaaaccgctgctggggcctatccgattgaagcggtgcagatgatggcattaattgctgatgcggttgaagcatcgtataccggtggccagcactcgacaacaccgcggtggtcgattgcgccggcgcaatcgacgccgcgtgccattgccgcagcagcatgcacaatcgccaactcattgccggtacgtttcattgtcgttctcacccaaagcggtgcgagtgcccgtctggtatcgcactaccggcctgaagtgccaattctggcattctgtcccagtgaagagaccgcccgccgtaccagtctctactggggtgtcacccccattgtgatcgaggcgcgtgatcgcctcgacgaacttgaacaacagattgtgcgcatgatgcgcgaaaccggaatggttcgaaaaggcgatttgatcgtactgagcggcggccatccggtttaccgctacgggccgaccaatttcctaaaggtgatcacgatagagtag

SEQ ID NO: 413 - protein, 474 aa, Chloroflexus aurantiacus J-10-fl
MRRTKIVATLGPATSTPERIAGLIRAGMNVARLNFSHGTHAEHAARIAMVRRAAAEAGRHVAILQDLQGPKIRTGPLENGQPVELVAGQRFVITTEPIVGDAHRVSTTYRALPLDVRPRDRILLSDGLIELVVTGHTDTEVETEVVHGGRLREHQGINLPGVRVSAPAATEKDLADLAFGLEQGVDYVALSFVRRASDVREVKEFIRRAGKQTPVIAKIERPEALDVLPEILAEADGIMVARGDLGVEMPPERVPIVQKQIIAAANQALLPVITATQMLESMIHNPRPTRAEASDVANAIIDGTDAVMLSGETAAGAYPIEAVQMMALIADAVEASYTGGQHSTTPRWSIAPAQSTPRAIAAAACTIANSLPVRFIVVLTQSGASARLVSHYRPEVPILAFCPSEETARRTSLYWGVTPIVIEARDRLDELEQQIVRMMRETGMVRKGDLIVLSGGHPVYRYGPTNFLKVITIE

SEQ ID NO: 414 - DNA, 1758 bp, Bacillus weihenstephanensis KBAB4
  CDS (1)..(1758): transl_table=11
atgcgtaaaactaaaattgtatgtactataggtcctgctagtgaaagtattgagaaattagaacaattaatggaagcgggtatgaacgttgctcgtttaaacttctctcatggtagccatgaagagcatggagctcgtattaaaaatattcgtgaagcttcaaagaaaactggtaaaacagttggtatcttacttgatacaaaaggtccagaaatccgtacacatgacttcgtagacggacaagctgagcttgtaacaggtgcagaagtaattctttctactgaacaagtattaggaactgcagagaagttctctgtatcttatgctggcctttatgatgatgttgatccaggctctcgtattctaatcgatgacggtcttatcgaactagaagtaatcgagaaagctgacggaaacatccgtacaaaagtattaaacagcggaactgtaaaaaataaaaaaggtgttaacgtaccaaacgtaagcattaagcttcctggtatcactgaaaaagacgtgcaagatatcgttttcggtatcgagcaaaaagttgatttcatcgcagcatctttcgtacgtaaagcatctgacgtattagaaattcgtgaattattagaagggcataacgctcaatacatccaaatcgtaccaaaaatcgaaaaccaagaaggtatcgacaacatcgattcaatcttagaagtttctgacggtttaatggttgctcgtggtgatatgggtgtagaaattccaccagaagaagtaccattagtacaaaaacgtctaatcaaaaaatgtaacgtattaggcaaaccagttattactgcaacacaaatgttagattctatgcaacgtaacccacgtccaactcgtgcggaagcaagtgacgtagcaaacgcaatcttcgatggaacagatgcaatcatgctttcaggtgaaactgctgcgggtcaataccctgtagaagctgtaacaatgatggctaacattgcggtacgtgttgaaaaatcattacaatatgaagatatgttcaaaaaacgtattaaagagttcacgccaacaattacagatgcaattagccaatctgttgcgcacacagcacttgctcttgatgtagctgcaatcgtagctccaacagaaagtggacatactgcgaaaatgatctctaaataccgtccgaaatctccaatcgtagctgtaacatctgacgagcaagtaggacgtcgtcttgcacttgtttggggtgttcaagcatttatgtctgagaaacgtgcagcttctactgacgaaatgttagatacagcaattcaaacaggtatggatgcgggtctaatcggacttggagatactgtagtaatcactgctggtgttccagttgctgaaactggtacaacaaacttaatgaaaatccacgttgttggtgaaaaagttgctaaagggcaaggaatcggtcgtaaatctgcaaaaggtaaagtagttgtagcgaaaacagctgctgaagctgtagcgaacgtaaacaaaggtgatatccttgttacaacaagcacagataaagatatgattcctgcaattgaaaaagctgctgctctagttgtagaagaaggcggtctaacaagccatgcagctgttgtaggtgtatcaatcggtattcctgttatcgttggtgtaaacggcgtaacaacaactttaaaaaatggccaagaagtaacagttgatgcagcacgcggaattgtttataatggacatgcggaagtgctataa

SEQ ID NO: 415 - protein, 585 aa, Bacillus weihenstephanensis KBAB4
MRKTKIVCTIGPASESIEKLEQLMEAGMNVARLNFSHGSHEEHGARIKNIREASKKTGKTVGILLDTKGPEIRTHDFVDGQAELVTGAEVILSTEQVLGTAEKFSVSYAGLYDDVDPGSRILIDDGLIELEVIEKADGNIRTKVLNSGTVKNKKGVNVPNVSIKLPGITEKDVQDIVFGIEQKVDFIAASFVRKASDVLEIRELLEGHNAQYIQIVPKIENQEGIDNIDSILEVSDGLMVARGDMGVEIPPEEVPLVQKRLIKKCNVLGKPVITATQMLDSMQRNPRPTRAEASDVANAIFDGTDAIMLSGETAAGQYPVEAVTMMANIAVRVEKSLQYEDMFKKRIKEFTPTITDAISQSVAHTALALDVAAIVAPTESGHTAKMISKYRPKSPIVAVTSDEQVGRRLALVWGVQAFMSEKRAASTDEMLDTAIQTGMDAGLIGLGDTVVITAGVPVAETGTTNLMKIHVVGEKVAKGQGIGRKSAKGKVVVAKTAAEAVANVNKGDILVTTSTDKDMIPAIEKAAALVVEEGGLTSHAAVVGVSIGIPVIVGVNGVTTTLKNGQEVTVDAARGIVYNGHAEVL

SEQ ID NO: 416 - DNA, 1776 bp, Microcystis aeruginosa NIES-843
  CDS (1)..(1776): transl_table=11
atgcactctctgtctttcccccgtcgcactaaaattgtggccacgattggcccagcctcgcaaaataaggaaacattacgtcagatgatcaaggcgggggcgacgacatttagattaaacttttcccatggcgatcacgattaccatcgtcacagcattaacctgatccgtcagttagcctttgaactcaatcaaccgattggcatccttcaggatctacaggggccaaaaattcgtttaggtaaatttgcctgtgggtcgattaccctgaaaccgggggaaccctttacccttacttctagggatgtggaatgtaatcaggacataagttccattagctatccctctctggcccaagaagtcccagaaggttcaagaattctcctcgatgatggtaaagtcgaaatgcgggtggaagcggtggatcgtttgaaaggtgatctttcctgtcgcgtagtggttgggggtgtcttatccagtaataaaggggtaaattttcccaacgtttatctgtcggtaaaagctttaaccgataaggacaaaaaagatttaatgttcggactgttgtgggatgtggattggatcgccctcagttttgtgcgtaatccccaagatatcctcgaaattaaagaattaatcgccagtgcggggaaatctatccccgtgatcgctaaaattgaaaaacacgaagcgatcgaggaaatggaggcaattttatccctctgtgatggtgtgatggtggctaggggagatttaggagtagaattaccagccgaagacgtgccaatcctgcaaaaacgcctgattaataccgctaatcagctaggcatcccgattattaccgccactcaaatgcttgacagtatggccagtaatcctcgtcccacccgcgccgaggtttctgacgtagctaatgcgattttagatggcactgatgcggtcatgctttccaatgaaacggctgtgggtcattatcccatcgaagcggtggcaaccatggcccgcattgccgaaaggatcgaacgggaacagatcaatagtgccgctcgctctaacaataaacaatcgattcctaacgctatttcctcggcagttagtcaaattgccgaacaattgggggcagcggcaattattaccctgacaaaaaccggctctactgcccgtaatgtctcccgatttcgccccaaaaccccgattttagccgttactccccatcgagaagtggcacagcagttacagctagtttggggcgtaaaaccgatgttattactcgatttaccctccaccagccaaacttttcaagtggcgatgaatcttgcccaggaaaataacctcctcgcggatggtgatttagtggtgatgacggcgggaactctgcaaggggtggccggttccacggatttaattaaggtggaagtggtaaaatcccttttgggcaaaggtacgggtatcggccagggcgtggctagtggccgggcgcgagtggcccataatgcccgcgaagtgggtagttttagcagcggggagattttagtcgttcccaccaccagcgccgaatatgtggatatgatgcggaaagctggcggaattatcaccgaggataccgcgatgaataatcacgccgctactatcggtttaaaattgggtattcctgtgattgtcggggttaaagatgccacgaaaattatccgcgaaggggtgatcattagtctcgatgctcaacggggtttgatttattctggtattggcaagggtgcggcgactatgaaaaactga

SEQ ID NO: 417 - protein, 591 aa, Microcystis aeruginosa NIES-843
MHSLSFPRRTKIVATIGPASQNKETLRQMIKAGATTFRLNFSHGDHDYHRHSINLIRQLAFELNQPIGILQDLQGPKIRLGKFACGSITLKPGEPFTLTSRDVECNQDISSISYPSLAQEVPEGSRILLDDGKVEMRVEAVDRLKGDLSCRVVVGGVLSSNKGVNFPNVYLSVKALTDKDKKDLMFGLLWDVDWIALSFVRNPQDILEIKELIASAGKSIPVIAKIEKHEAIEEMEAILSLCDGVMVARGDLGVELPAEDVPILQKRLINTANQLGIPIITATQMLDSMASNPRPTRAEVSDVANAILDGTDAVMLSNETAVGHYPIEAVATMARIAERIEREQINSAARSNNKQSIPNAISSAVSQIAEQLGAAAIITLTKTGSTARNVSRFRPKTPILAVTPHREVAQQLQLVWGVKPMLLLDLPSTSQTFQVAMNLAQENNLLADGDLVVMTAGTLQGVAGSTDLIKVEVVKSLLGKGTGIGQGVASGRARVAHNAREVGSFSSGEILVVPTTSAEYVDMMRKAGGIITEDTAMNNHAATIGLKLGIPVIVGVKDATKIIREGVIISLDAQRGLIYSGIGKGAATMKN

SEQ ID NO: 418 - DNA, 1752 bp, Thermoanaerobacter sp. X514
  CDS (1)..(1752): transl_table=11
atgcgcagaacaaaaatagtgtgtacaataggacctgccagcgaagactataatatactgagaaaattaattgagaaaggtatgaacgttgctcgattgaatttttctcatggggattttgaagagcatggggcaagaattgacaatattaaaaagataagagaagaattcgggctacctgttgctattttgttggatactaaaggtccagagataaggacaggaaagtttaaaaatggcggagtggaattaaaagaaggacaaacttttgtcattacgacaagagatgtattaggagacgaaactatatgcagtgtatcctataaagggttgcctcaagatgtggaaagaggtagccgcatactaattgacgatgggttaatttctctaaaggttactgatgttaaaggagaagatatagtttgtattgtagaaaattctggtcctgtaaaagaccataaaggagtaaatgttccaggagtaaaactcaatcttcctgctttgactcaaaaagacgtagatgatatagagtttggaattcaaaagggcattgatataattgcggcttcttttgttagaaaagcagctgatgttttggcaataagaagacttttagaagaaaataaggcagagcatattttaattattgctaaaatagaaaatcgcgaaggagtagaaaatatagacgaaattataaaggtttcagatggaataatggtagccagaggagatttaggggttgagattcctcttgaagaaataccaatcgttcaaaagatgattatacaaaaatgtaataaagcagggaaaccggtaattactgcaactcaaatgttagactctatgatgagaaatccaaggcctacaagagcagaagttacagatgtagcaaacgctattctagatgggacagatgctataatgctatcaggggagacagctcaaggtaaataccccatagaggcctttgagacaatggcaaagattgcagaaaagacagaagcttatgtgggatacagagatatcattgatagaaatattgatacaaatgtttctattacaaacgctataagccatgcaacttgtactactgcaagagatataggtgcagctgctataataacttgtactaaatctggctatacagcgagaatggtatcaaggtacagacctcaagctccgattattgctactactccaagcgaaagtgttgcaaggaaactctctatagtctggggagtatatcctttgattacagaagaggtttctactacagatgaaatgatagatgtcgcaatacaaagtgctttaactgcaggacttataagaaatggtgatatcgtagtaatttctgcaggaattcctgtagctatgacaggcaccaccaacatgttgaaggtacatatagtaggagatgttttgttgagaggaataggtataggttctaaggctactacaggtgttgtatgtgttattaatgatatcagcaaagacaaagataaatttagagaaggcgatataatagtaactgcaaagacagaaagagattttatgcctcttatagagaaagcttctgctataatcacagaagaaggagggcttacttctcacgcagctattgtgggattaaacttaggaattcctgtagttgtaggttgtgaaggagcgacttctaaattaaaagatggcatgactgtaacggttgacacagttagaggatttgtgtataaaggaattgtaaatattaaataa

SEQ ID NO: 419 - protein, 583 aa, Thermoanaerobacter sp. X514
MRRTKIVCTIGPASEDYNILRKLIEKGMNVARLNFSHGDFEEHGARIDNIKKIREEFGLPVAILLDTKGPEIRTGKFKNGGVELKEGQTFVITTRDVLGDETICSVSYKGLPQDVERGSRILIDDGLISLKVTDVKGEDIVCIVENSGPVKDHKGVNVPGVKLNLPALTQKDVDDIEFGIQKGIDIIAASFVRKAADVLAIRRLLEENKAEHILIIAKIENREGVENIDEIIKVSDGIMVARGDLGVEIPLEEIPIVQKMIIQKCNKAGKPVITATQMLDSMMRNPRPTRAEVTDVANAILDGTDAIMLSGETAQGKYPIEAFETMAKIAEKTEAYVGYRDIIDRNIDTNVSITNAISHATCTTARDIGAAAIITCTKSGYTARMVSRYRPQAPIIATTPSESVARKLSIVWGVYPLITEEVSTTDEMIDVAIQSALTAGLIRNGDIVVISAGIPVAMTGTTNMLKVHIVGDVLLRGIGIGSKATTGVVCVINDISKDKDKFREGDIIVTAKTERDFMPLIEKASAIITEEGGLTSHAAIVGLNLGIPVVVGCEGATSKLKDGMTVTVDTVRGFVYKGIVNIK

SEQ ID NO: 420 - DNA, 1791 bp, Heliobacterium modesticaldum Ice1
  CDS (1)..(1791): transl_table=11
atgcatgcctatatccaaaaggcttctctgtccggaacgccccgcacgaagatcgtctgcaccgtcggaccggctagttctgaccctaccatcctgatggagatgattcgggccggcatgcgggtggcccggctgaacttttcccacggcacctacgaggagcatgccgcccgcatcgctgccgttcgccaggcggccgatgccttagggcagcccatcgccatcctcctcgacacgaaaggcccggagatccgcctcggccaagtgtccggcggcaaaatcacccttgacgaaggcgcggaagtgaccctcttccctgacgatgggaccttggggacgaaggagcgcctgcctatcagctacgccgggctcgttgaagatgtccggcccggcgtacgggtgcttatcgacgacgggaacatcgagatggaagtgacggctgtggaggccggtgagatccgctgccgcatcaaaaacggcggcgatgtgagcagccgcaagggtgtcagcgtccccggcgtggccttgcgcatgccggccatcagcgaaaaggaagtgaaggatctcgagttcggcatcgcccaggacatggattttgtcgccatctcctttgtccgcgacgcctctgatgtgctcggcatccgcaagatcctggaagaccgcggcgcctccatgcagctgatcgccaagatcgagaaccaccagggcgttgacaacatcgacgagatcctggccgtctctgacgggatcatggtcgcccggggcgatctcggggtggccatcccgacggaagacgtccctctggtgcagaagatgatcatcgaaaagtgcaacatcgccggcaagccggtgatcacggcgacccagatgctcgattcaatgatccgcaaccctcggcccacccgggccgaagcgacggacgtggccaacgccatcttggatggaaccgatgccatcatgctctccggcgagacggcagccggtaagtaccctgtcgaggccgtcacgatgatggcccgcatcgccatacgtaccgaacaagccctccgccacgatgaggaactggatcgccgccgcaaagccggccttggctcggtcaccgattcgatcagccatgctacctgcagcatcgcggccgacttgaaggcaaaggcgatcatcaccctcacgaaagccggctcgacggctcgcatggtctcccgctaccgccctgattgccctatcatcgccgcgacgccggagacaaaagtgatgcgtcagatggccgtcgtctggggcgccgagccgatgaaggtgcgggagacggcggggacggacgagatgctcggcgacgctatcgactgcgctctgaaggaaggccgtatcgagtcaggcgacctcgtcgtcgtcacggccggcgtccctgtcggcgtatccggaacgaccaacctgctcaaggttcatgtggccggtcgggtgctggcccacggcatgggcatcagccgcaagaaagcagtcggcaaggtgcgcctctgccgatccgccgccgacgccgcgcggctggagcggggcgagatcctcgtcgcctacggcactgatcgagattacgtgccggcccttgaacgctgcgccggcatcatcaccgtggaaggcggcctcacctcccacgcggctatcgtagggctgcagttcggtatccccgtcatcgtcggcgtcgacaacgccttcgaggtccttcccgacggcgccgtggtcaccatcgacgccaccgagcgagggatgatctacgagggaacagcgcgggttttgtaa

SEQ ID NO: 421 - protein, 596 aa, Heliobacterium modesticaldum Ice1
MHAYIQKASLSGTPRTKIVCTVGPASSDPTILMEMIRAGMRVARLNFSHGTYEEHAARIAAVRQAADALGQPIAILLDTKGPEIRLGQVSGGKITLDEGAEVTLFPDDGTLGTKERLPISYAGLVEDVRPGVRVLIDDGNIEMEVTAVEAGEIRCRIKNGGDVSSRKGVSVPGVALRMPAISEKEVKDLEFGIAQDMDFVAISFVRDASDVLGIRKILEDRGASMQLIAKIENHQGVDNIDEILAVSDGIMVARGDLGVAIPTEDVPLVQKMIIEKCNIAGKPVITATQMLDSMIRNPRPTRAEATDVANAILDGTDAIMLSGETAAGKYPVEAVTMMARIAIRTEQALRHDEELDRRRKAGLGSVTDSISHATCSIAADLKAKAIITLTKAGSTARMVSRYRPDCPIIAATPETKVMRQMAVVWGAEPMKVRETAGTDEMLGDAIDCALKEGRIESGDLVVVTAGVPVGVSGTTNLLKVHVAGRVLAHGMGISRKKAVGKVRLCRSAADAARLERGEILVAYGTDRDYVPALERCAGIITVEGGLTSHAAIVGLQFGIPVIVGVDNAFEVLPDGAVVTIDATERGMIYEGTARVL

SEQ ID NO: 422 - DNA, 1737 bp, Heliobacterium modesticaldum Ice1
  CDS (1)..(1737): transl_table=11
atgcgaaggacaaaaatcgtctgcaccatcgggccggccagtgaacacccggacaccctgagagagatcatccgttccggcatgaacgtggcccgcctcaacttctctcacggctcccatgaggaacatggacgccgcatagagaacatccgccgcatcgctgccgaactcggcgccaacgtagccatcctgctggataccaagggaccggagatccgcaccggcgattttgccgctccgccgatctttttggaagcaggtcagcgcttcaccttgacgaccgatcccatcctcggcgacgcctcgcgggtctccgtcacctatgccgacctgcccaaggacgtgtcgccgggcgtccgcatcctcgtcgatgacggcctcatcgaactggaagtagaggcagtcgaaggcaacgacgtcatctgccgcgtcctcaacggcggtaaggtctccaacaaaaaaggcgtcaatgttcccggcatctccatcaacctgccctcggtcaccgaaaaggacatcgccgacatccgcttcggcatcgaacagaaggtcgatttcatcgccgcttccttcgtccgcaaggccgccgatgtgctggctatccgcaagatcctagaagagggcggcgctgacatcgagatcatctccaagatcgagagcagcgaagcggtggacaacctggacgagatcatccaggcctctgacggcatcatggtcgcccggggcgacctgggcgtggagatccccgccgaagaggtgcctatcctgcaaaaatcgatcatcgccgaatgcaaccgcctcggcaaaccggtgatcacggccacccagatgctcgactccatgatgaacaacccccggccgacccgcgccgaggccagcgacgtggccaacgccatcttcgacggcaccgacgccatcatgctctcgggcgagacggccaacggcaagtaccctgtcgtcgccgttcagacgatggaccgcatcgcccggcgcgccgaatcgtccttgcaaaggaaccagccggtccacaacggcaagaccagcgtcaccgacgccatcggtcaggccgtctgcgtcacagcgacccaattgggggcggcggccatcatcaccgcaacagcctccggttacacggcccgcatgatcgcccgctaccgtccccaggcgcccatcgtcgccgtcacccctcgaccggaagtgctgcgccgtttggccctcctctggggcgtcgttcccttgccatcggtccaattgaccgatacggaccgcatgctggcgacagccgtcgatgtggccgtcgaacatgacctgatccaaggcggcgacctcgtcgtcatcaccgccggcgtgcccgtcggcgtgcagggctcgacaaacctgctcaaggtccacaccgtcggcaaagcagcggcacggggcaccggcatcgtcgcccggtcggtcaccggcaaggcgagggttgcccgcaccgtcaccgaagctgctgacctgcaagcaggcgagatcctcatcgccatcggcaccgatgccgactacgtcccttacctgaaaaacgctgccgccatcgtctgcgaagagggcggcctcacctcccacgccgccatcatggccttagagtaccgcatccctgccatcgtcggtgtcgacaatgccctgtccctctttgagacaggggagacgatcaccgtcgacggccggcgcggcctgatctaccgggggacggcgaaagtcctctag

SEQ ID NO: 423 - protein, 578 aa, Heliobacterium modesticaldum Ice1
MRRTKIVCTIGPASEHPDTLREIIRSGMNVARLNFSHGSHEEHGRRIENIRRIAAELGANVAILLDTKGPEIRTGDFAAPPIFLEAGQRFTLTTDPILGDASRVSVTYADLPKDVSPGVRILVDDGLIELEVEAVEGNDVICRVLNGGKVSNKKGVNVPGISINLPSVTEKDIADIRFGIEQKVDFIAASFVRKAADVLAIRKILEEGGADIEIISKIESSEAVDNLDEIIQASDGIMVARGDLGVEIPAEEVPILQKSIIAECNRLGKPVITATQMLDSMMNNPRPTRAEASDVANAIFDGTDAIMLSGETANGKYPVVAVQTMDRIARRAESSLQRNQPVHNGKTSVTDAIGQAVCVTATQLGAAAIITATASGYTARMIARYRPQAPIVAVTPRPEVLRRLALLWGVVPLPSVQLTDTDRMLATAVDVAVEHDLIQGGDLVVITAGVPVGVQGSTNLLKVHTVGKAAARGTGIVARSVTGKARVARTVTEAADLQAGEILIAIGTDADYVPYLKNAAAIVCEEGGLTSHAAIMALEYRIPAIVGVDNALSLFETGETITVDGRRGLIYRGTAKVL

SEQ ID NO: 424 - DNA, 1758 bp, Finegoldia magna ATCC 29328
  CDS (1)..(1758): transl_table=11
atgttaaagaaaactaaaatagtctgtactataggtccagcatcagattctgtagagactttaaaaacattgatgcaaataggaatgaatgtgtgcagattgaacttctcacatggaagtcacgaagagcatttacaaagaataaaaaacataaaacaagcacgtgaagaattggatttaccagtagcaataatgttagatacaaaaggccctgaaattagattgggagattttggagtagaacaagttcaactttcaattggagatcaatttacattaactacaagagatgtgattggagatcaaaatatatgttctgtaagttacaaaggacttccagatgatttgagtattggaaaaaaagtattgatagatgacggattagttgagcttgaagttatagatatcaaagatacagatataatttgcaaagtcaataattacggtgttttaaagagcaaaaaaggtgttaacattcctaactcaaaggtaaaattgccagcaatcactgaaaaagatatttccgatataatatttggaattaaaaatggaattgattatattgcagcatcatttattagaaaatcacaagacgtattagatattagaaagattttggaagaaaataatggcaatgatataaaaataatttctaaaatagaatcacaagaaggtgtggataatttagatgaaataatcaacacttcagatggaattatggtggcaagaggagatttgggtgtagaaattcaaacggaaattatgcctatggttcaaaaagaaataatcaaaaaaacttctttggccggcaaaccagtaataacagcaactcaaatgttggattccatgattagaaatccgagaccaacaagggcagaagttacagatgttgcgaatgcgattttggatggtagtgatgcggtaatgctttctggagaaactgcagcaggaaattatccagtaaatgctgtaaaagttatgaacgatatagcaattaatactgaaaattctgaagaatttaaagaagctgctaataaaagattgcaatggttggacattacaacaacaaatgcaattagtatcgcaactagaagtattagtgaacaattaggagcaaatgcaattgttgtagcaacaacttcgggttcaaccgcaagaaacgtatctaaatatcgtccattatctccaatagttgcggctactacatcagaaggagtaatgagaaaattatctttgatttggggagttcatccagttctaagcgagttaagcgaaaacacagatgaagtaattgacagatcaatttctgctggaatcaaaaaagatttggttcacgaaggagatttaattatcattacagcaggacttccagtcggggtatcgggaactacaaacttattaaaagttcacacaataggagatattttgatcgaaggaactggaataggtaagaaatctgtaactgcaaaagcaagagttgccaagggagtagaggatttggcttctaaatttgaagatggcaatgcaattgtattgtatagtttggaaagagaattcgttccatatattcaaaaagcttctgcaataatcgtagaagagggaggacttacatcaccagctgcaatagttggattgcatttgggaattccaacaattgtaggatgtaaagatgctgtaagtaagataaaagatcaagaaatcttgaccatagatccaatagctggattagtttatcgtggagcagccaagattttataa

SEQ ID NO: 425 - protein, 585 aa, Finegoldia magna ATCC 29328
MLKKTKIVCTIGPASDSVETLKTLMQIGMNVCRLNFSHGSHEEHLQRIKNIKQAREELDLPVAIMLDTKGPEIRLGDFGVEQVQLSIGDQFTLTTRDVIGDQNICSVSYKGLPDDLSIGKKVLIDDGLVELEVIDIKDTDIICKVNNYGVLKSKKGVNIPNSKVKLPAITEKDISDIIFGIKNGIDYIAASFIRKSQDVLDIRKILEENNGNDIKIISKIESQEGVDNLDEIINTSDGIMVARGDLGVEIQTEIMPMVQKEIIKKTSLAGKPVITATQMLDSMIRNPRPTRAEVTDVANAILDGSDAVMLSGETAAGNYPVNAVKVMNDIAINTENSEEFKEAANKRLQWLDITTTNAISIATRSISEQLGANAIVVATTSGSTARNVSKYRPLSPIVAATTSEGVMRKLSLIWGVHPVLSELSENTDEVIDRSISAGIKKDLVHEGDLIIITAGLPVGVSGTTNLLKVHTIGDILIEGTGIGKKSVTAKARVAKGVEDLASKFEDGNAIVLYSLEREFVPYIQKASAIIVEEGGLTSPAAIVGLHLGIPTIVGCKDAVSKIKDQEILTIDPIAGLVYRGAAKIL

SEQ ID NO: 426 - DNA, 1506 bp, Streptococcus pneumoniae Hungary19A-6
  CDS (1)..(1506): transl_table=11
atgaacaaacgtgtaaaaatcgttgcaactttgggtcctgcggtagaaatccgtggtggtaaaaaattcggtgaggacggatactggggtgaaaaacttgatgttgaagcttcagctaaaaacattgctaaattgattgaagctggtgctaacacattccgattcaacttctcacacggcgaccaccaagaacaaggtgagcgtatggcaactgttaaacttgcggaaaaaattgcaggtaaaaaagttggtttccttcttgatacaaaaggacctgaaatccgtacagaattgttcgaaggtgaagctaaagaatattcatacaaaactggtgaaaaaattcgtgttgcaactaaacaaggaatcaaatcaactcgtgaagtgattgcgttgaacgttgctggtgctcttgatatctatgatgatgttgaagttggtcgtcaagttttggttgacgatggtaaacttggtcttcgtgtggttgctaaagatgatgaaactcgtgaatttgaagttgaagttgaaaacgatggtatcatcgctaaacaaaaaggtgtgaacatccctaacactaaaattcctttcccagctcttgctgaacgcgataacgacgatatccgtttcggtcttgaacaaggtatcaacttcatcgcaatttcattcgtacgtactgcaaaagatgtgaacgaagttcgtgcaatctgtgaagaaactggaaacggacatgttcaattgttcgctaaaatcgaaaaccaacaaggtatcgataacttagacgaaatcatcgaagcagctgatggtattatgattgctcgtggtgatatgggtatcgaagtaccgttcgaaatggttccagtttatcaaaaaatgattatcaagaaagtcaatgctgcaggtaaagttgttatcactgcaacaaacatgcttgaaacaatgactgaaaaaccacgtgcaactcgttcagaagtatcagacgtattcaacgctgttatcgacggaactgacgctacaatgctgtcaggcgagtctgcaaacggtaaatacccactcgagtcagtaactacaatggctacaatcgacaagaacgctcaagctcttcttaatgaatacggacgtcttgattcagattcatttgagcgtaactctaagacagaagtaatggcttctgctgttaaagatgctactagctcaatggatatcaaattggttgtaactcttactaagacaggtcatactgcacgtttgatttctaaataccgtccaaatgctgacatcttagcattgacatttgacgaattgacagaacgtggcttgatgttgaactggggtgttatcccaatgttgacagatgctccatcttcaactgacgatatgttcgaaatcgctgaacgtaaagcggtagaagcaggtctcgttgagtcaggcgatgatatcgttatcgttgctggtgtgccagtaggagaagctgttcgcacaaacacaatgcgtatccgcacagtacgttaa

SEQ ID NO: 427 - protein, 501 aa, Streptococcus pneumoniae Hungary19A-6
MNKRVKIVATLGPAVEIRGGKKFGEDGYWGEKLDVEASAKNIAKLIEAGANTFRFNFSHGDHQEQGERMATVKLAEKIAGKKVGFLLDTKGPEIRTELFEGEAKEYSYKTGEKIRVATKQGIKSTREVIALNVAGALDIYDDVEVGRQVLVDDGKLGLRVVAKDDETREFEVEVENDGIIAKQKGVNIPNTKIPFPALAERDNDDIRFGLEQGINFIAISFVRTAKDVNEVRAICEETGNGHVQLFAKIENQQGIDNLDEIIEAADGIMIARGDMGIEVPFEMVPVYQKMIIKKVNAAGKVVITATNMLETMTEKPRATRSEVSDVFNAVIDGTDATMLSGESANGKYPLESVTTMATIDKNAQALLNEYGRLDSDSFERNSKTEVMASAVKDATSSMDIKLVVTLTKTGHTARLISKYRPNADILALTFDELTERGLMLNWGVIPMLTDAPSSTDDMFEIAERKAVEAGLVESGDDIVIVAGVPVGEAVRTNTMRIRTVR

SEQ ID NO: 428 - DNA, 1758 bp, Candidatus Desulforudis audaxviator MP104C
  CDS (1)..(1758): transl_table=11
ttgcgccatactaaaataatctgcaccattggcccagcttcggaatcggtcgaggtgctaagccggatggtcgaatccgggatgaacatttcccgccacaatttctcccacggttcccgggaggaacaccgccgccgcatcaacaacgtccgcacggccgccgcgcggaccggcagaacggtcggcataatggtcgacctccggggtcccaagatcagaatcggcgatctggagcccgagccggtcgaactcaaggccggggatgaactgaccctaaccaccgaggtaatcaagggaaaccgccgccgcatttcggtcgattaccagccgttgccccgggaggtggggccgggtaacaccattttgcttggcgacggtctggtcgggctggaagtgttgcgggttgaggggagcgaggtgctctgccgggttctgaacgacgccttgctgaccagccggaagggcgtgaatctgccgggtgtgcggacatcgatccccaccgtcaccgagaaagacatcagggaccttcatttcgccttggagttgggctttgattttgtggccgcctcgttcgtgcggcgggcagaggacatcctttcggtgcgcgcaatcctggagaagttcgaatcagaagcgcacatcgtggccaagatcgagacctgggaggcggtcgagaacctggacgacatcattaaggtgacggacgcggtgatggtggcacgcggtgacttggggctggagatcgccgccgaggaagtgcccctggttcagaaaaagatcatcgcccgttgcaacctggccggcaagccggtgatcaccgcgactcagatgctggaatcaatgatccacaacccgcgtccaaccagggccgaggctagtgacgtggccaacgcgattttggacggtacggacgccgtgatgctttcggcggaaaccgcgaccggggaatacccggtggccgcggtggaaaccatggaccgcatcgcccgtcgggcggaagccgaccttccctacggaatgctgcttcaccagcggcaccgggacatctcccgccgcacggtcaccgacgccatcagctacgccacctgtgccaccgccgccgacctcgacgccgccgccatcattacggctacccagaccgggtatacggcgcggatggtggccaagtaccggccagcgaggccgattgtggccgtaacacctcgggaagacgtggtgcggcgcctgaccctgttgtggggggtgcagccggtctacgttcaagaggagatcgaggacaccgaccggatgatctcggcctccattgaagccgccctggccgccggtctcatccgcggcggcgacctggtggtgatcaccgccggcgtgccggtgggcctgcacggcagcaccaacctgctcaaagtgcacaccgtgggcaatgtcctggcccggggcatcgggatcggcaaccaggcggtgaccggcagcctgaaaatcgcgcacagcgctgcggaagccctggtcaagatcgagccgggggacatcctggtcacccgggccaccgaccgggattatgttccggcgatcgaaaagtcatccggagtgatcaccgaagtcggcgggctgacctcacacgccgccgtggtgtgcctgcagttcaacctgccggtgatcgtgggggttacgggggcgaccgagattcttgacgaaggggcgattgtgaccatcgacgcgttgcgggggttggtttacagcggcgccacccgcgtgctctag

SEQ ID NO: 429 - protein, 585 aa, Candidatus Desulforudis audaxviator MP104C
MRHTKIICTIGPASESVEVLSRMVESGMNISRHNFSHGSREEHRRRINNVRTAAARTGRTVGIMVDLRGPKIRIGDLEPEPVELKAGDELTLTTEVIKGNRRRISVDYQPLPREVGPGNTILLGDGLVGLEVLRVEGSEVLCRVLNDALLTSRKGVNLPGVRTSIPTVTEKDIRDLHFALELGFDFVAASFVRRAEDILSVRAILEKFESEAHIVAKIETWEAVENLDDIIKVTDAVMVARGDLGLEIAAEEVPLVQKKIIARCNLAGKPVITATQMLESMIHNPRPTRAEASDVANAILDGTDAVMLSAETATGEYPVAAVETMDRIARRAEADLPYGMLLHQRHRDISRRTVTDAISYATCATAADLDAAAIITATQTGYTARMVAKYRPARPIVAVTPREDVVRRLTLLWGVQPVYVQEEIEDTDRMISASIEAALAAGLIRGGDLVVITAGVPVGLHGSTNLLKVHTVGNVLARGIGIGNQAVTGSLKIAHSAAEALVKIEPGDILVTRATDRDYVPAIEKSSGVITEVGGLTSHAAVVCLQFNLPVIVGVTGATEILDEGAIVTIDALRGLVYSGATRVL

SEQ ID NO: 430 - DNA, 1422 bp, Unknown
  Unidentified
  CDS (1)..(1422)
atgaaaaagacgaaaatcgtctcaacacttggtccgtcatcatctgatgtcgaaacaatcgttaagttgatcgaggcgggcgcaaacgtattccgtttcaacttctcacacggagatcacgaggaacatttgggtcgcatgaacgcagttcatgaggcagaaaagattactggtaagacagtaggtattttgttggacacaaagggtgctgaaatccgtacaacaaagcaagtcgacggtaagattgaattccatacaggtgacacacttcgtatctcaatggatgataacattgagggtactaaagaaaagattgctgtgacttacgccggattgtttgatgacgttaatgtcaatggacaagttttgtttgacgatggtttgcttggtacgactgttcttgaaaaagatgatgccaaccgtgaacttgttgttcgcattgacaacgatggtatcttgggatcacgtaagggtgttaacgcaccaggtgtatcaattaacttaccaggtattacagaaaaagacgctgatgatattcgttttggtttagaccacgaaatcaactatattgcagcatcatttgttcgtaagccagaagacgtgttagaaattcgtgaacttttgaaagaaaagaacatggaacacgttcaaattattcctaagattgaatcacaagaaggtatcgacaacttagatgctattcttgaagtttcagacgccttgatggtaccacgtggtgacatgggtgttgaaattcctgctgaaaatgtgcctttggttcaaaaggacatgattcgcaagatgaacaagattggtttgccagttattacagcaacacagatgcttgactcaatggaagagaacccacgtccaacacgtgctgaagcttccgatgtcgccaatgccgtctttgatggtacagatgcaacaatgttgtcaggtgaatcagctaatggtgattatccggttgaatctgttgccacaatggctgctattgatgaaaaggctgaaacatcattacgtgaaaatggtcgtcatgaagaaatcgtcttcgatgaatctgattcaactgaagctgttgcttcagctgtcacacgtattgcacgcagtgttaatgccaaggcagttgttgtttcaacaaactcaggttacactgcccgcatggtatcaaaacaccgtcctgatgtgaatgttttggccgtaacgtactcagaacgcgtacaacgtggcttgactttgaattatggtgtgttgccagttgtttatgatgcaccatcaacaattgatgaaatgattgcgttagctaagacagctgttaaggaacaaggcttggcagaaagcggtgatacaatcgttatcgctgccggtgtgccaatgtcacaatctggtacaactaacatgattactgtgcaaacagtataa

SEQ ID NO: 431 - protein, 473 aa, Unknown
  Unidentified
MKKTKIVSTLGPSSSDVETIVKLIEAGANVFRFNFSHGDHEEHLGRMNAVHEAEKITGKTVGILLDTKGAEIRTTKQVDGKIEFHTGDTLRISMDDNIEGTKEKIAVTYAGLFDDVNVNGQVLFDDGLLGTTVLEKDDANRELVVRIDNDGILGSRKGVNAPGVSINLPGITEKDADDIRFGLDHEINYIAASFVRKPEDVLEIRELLKEKNMEHVQIIPKIESQEGIDNLDAILEVSDALMVPRGDMGVEIPAENVPLVQKDMIRKMNKIGLPVITATQMLDSMEENPRPTRAEASDVANAVFDGTDATMLSGESANGDYPVESVATMAAIDEKAETSLRENGRHEEIVFDESDSTEAVASAVTRIARSVNAKAVVVSTNSGYTARMVSKHRPDVNVLAVTYSERVQRGLTLNYGVLPVVYDAPSTIDEMIALAKTAVKEQGLAESGDTIVIAAGVPMSQSGTTNMITVQTV

SEQ ID NO: 432 - DNA, 1758 bp, Clostridium botulinum B1 str. Okra
  CDS (1)..(1758): transl_table=11
atgcaaaagactaaaatgatatttacaataggccctgcaagctcgacagaagaaattgtatcaaaattaatagaagctggaatgagtgtatcaagacacaatttttctcacggatcacatccagaacacaaagaaagaatgatgatgattaagaaattaagagaaaaacataacaaacacatagctattatgttagacaccaaaggaccagaaataagaacaggtaatttttcagtggataaagtggaattaaaagaaggggcagagtttacaatatattgtagagaagacatagtaggtgatgaaacaaaatgttctattacttatgatgaactatataaagatgtagttaaaggaaataaaatactgatagatgatggattagtagagctagaggttcagtcagtagaagataataaaatccatacagtagttaaaaattcaggaactgtttcaaatcacaagggagtaaatgttccaggagtttcagtatcacttccagcagttactgaaaaagatatagaagatttaaaatttggatgtgaagtaggagtagatttaataagtgcatcttttataagaaaagcctctgatgtattagctataagaaaaatattggaagaaaatggtggaaatgaaatacagataatctctaagatagaaaaccaagagggcgttgacaatatagatgagataataaaattttctgatggaataatggtagctagaggagatatgggagtcgaaattcctatagaagaagttccaatagtacaaaaaagaataatagaaaaatgtaataaggcaggtaagcctgtaattacagcaactcaaatgttagattctatgatgagaaatcctagaccaacaagagctgaagcctcagacatagccaatgcaatatttgatggaacagatgccataatgttaagtggagaatcagcaaatggaaaatatccagtagaagctgcaagaactatgtctagaatagctaaaacagcagaagcaaaattaaattatgatgctatattaaataaaatgagagaaagtcatatattaaatgttcctaatgctataagcttatcagcgtgtactacagcatcagaattaaatgctacagctataatcacagcaactcaaagtgggcatactgcaaaaatggtatcaaaatatagaccacaatgccctattatagcagtaacaccaaatgaaatagttgctagaaagttagcattaaattgtggagtagtaccactattaacggaaacatttaattctacagatgagcttatagataaatcagttaataaatctttagaagaaggatatgttaaaaatggcgacttagttgtcatagcaggaggaataccagtgtcttactcaggaacaactaatatgctaaaagttcacatagtaggagatatcttagcccaaggaagaggttcaggaactagaccaacttatgggaatgtaaagatagtaaacaatccttcagaagcagaagatatagttgaaagagatgacatattagtagttaaaaatttagatagaagatatatgactattttagatagagtatcaggcatagtggctgaagaaggtggaataacatcacacttagctatagaatgcatagcaagggatattccatttatatgtaatgcaggtggagctatggatgttttaaaaacaggaacatatgtaacacttgatacagtaagaggaatagtatacaacggaagagctaatatagtttaa

SEQ ID NO: 433 - protein, 585 aa, Clostridium botulinum B1 str. Okra
MQKTKMIFTIGPASSTEEIVSKLIEAGMSVSRHNFSHGSHPEHKERMMMIKKLREKHNKHIAIMLDTKGPEIRTGNFSVDKVELKEGAEFTIYCREDIVGDETKCSITYDELYKDVVKGNKILIDDGLVELEVQSVEDNKIHTVVKNSGTVSNHKGVNVPGVSVSLPAVTEKDIEDLKFGCEVGVDLISASFIRKASDVLAIRKILEENGGNEIQIISKIENQEGVDNIDEIIKFSDGIMVARGDMGVEIPIEEVPIVQKRIIEKCNKAGKPVITATQMLDSMMRNPRPTRAEASDIANAIFDGTDAIMLSGESANGKYPVEAARTMSRIAKTAEAKLNYDAILNKMRESHILNVPNAISLSACTTASELNATAIITATQSGHTAKMVSKYRPQCPIIAVTPNEIVARKLALNCGVVPLLTETFNSTDELIDKSVNKSLEEGYVKNGDLVVIAGGIPVSYSGTTNMLKVHIVGDILAQGRGSGTRPTYGNVKIVNNPSEAEDIVERDDILVVKNLDRRYMTILDRVSGIVAEEGGITSHLAIECIARDIPFICNAGGAMDVLKTGTYVTLDTVRGIVYNGRANIV

SEQ ID NO: 434 - DNA, 1779 bp, Cyanothece sp. ATCC 51142
  CDS (1)..(1779): transl_table=11
atgtcctttaattctatagctcgccgaaccaaaatcgtggcaaccatcggtcctgctacccaaaataaagaaattttacgtcaattaattttagcaggggcgactaccctacgacttaatttttctcatggtgatcatgactatcataaacatagtattcgtctcattcgtcaaacggcttatgagttaaatcaaccagttgccattttacaagatttacaaggacccaaaatacgtctaggtaaatttgtcaatggaccgattaccctaaaaccgggtgatccttttattttgaccagtcgtgatgtcgaatgtaatcaaaccatcagttctatcagctatgaatacctctctcaagaagttcctgaacaagccagaattttaatggatgatgggaaagtcgaaatgcgggtcgaacgggtagataaagagaataaagaccttcattgtcaggttgtggtggggggggtgttgtctgatagtaagggggtcaactttccaggggtttatttatccgttaaagcattaaccaaaaaagataaaaaagatttgctgtttggtttagatcaaggggtcgactggattgctttgagttttgtgagaaatcctcaagatattcttgaaattaaagaaatcatcgctaatgcaggaaaaaatgtgcctgtcatcgccaaaatagaaaaacatgaggcgatcgaagatatggaagaaattctttctttgtgtaacggggttatggtagcacggggagacttaggggtagagttaccccccgaagatgttcccattctgcaaaaacggttaattgcgacggccaataaattaggtattcctgtgattacagcgacccaaatgttggatagtatggccaataatcctcggcctacccgtgcggaagtttctgatgtggccaatgctatcttggacggaaccgatgcggtgatgttatccaatgaaaccgccgtgggtaaatatccggtggaagcggtggccaccatggccaccatcgctgaacgcatcgaaaaggaacccacgaccactaaaatgatgtctgaagagaaacaatccattcctaatgctatttcttcggcggtcagtcatattgcccaagaactcaatgcagcggccatcatgtctttgactaaaactggctcaacagcccgaaatgtctcaaaattccgtcctcaaattccaattttagcggtgactccccatgtagacgtggcacgacaattacagttagtatggggggtaaaacctttattggtgctggatttagcctcagccactcaaaccttccaatcggcggttaatgtcgctcaagagaatcatttactcaaagatggagatttagtggtgatgaccgccggaactctacaaggggtagcaggctcgacggatttgattaaagtagaaatggtcaaagctatcttgggaaagggggtcggcgttggccagggttcggcgagtggacgagctagaatcgcccatcatgccagagaattaggtaattttgaaccaggggatattctggtggttccaggaaccaacgccgagtttgttgacatgatgcgtaaagcttcaggtattattaccgaggaatccagtctcaccagtcatgctgctgtgattgggttgcgtttaggggttcccgttattgtgggatttaaagaagcaacccaaaagattcgagaaggggcaattattacggtggatgctcaaaaagggttagtgtattcgggtgttgtgaccagtaacagtcattatggtgccatgtaa

SEQ ID NO: 435 - protein, 592 aa, Cyanothece sp. ATCC 51142
MSFNSIARRTKIVATIGPATQNKEILRQLILAGATTLRLNFSHGDHDYHKHSIRLIRQTAYELNQPVAILQDLQGPKIRLGKFVNGPITLKPGDPFILTSRDVECNQTISSISYEYLSQEVPEQARILMDDGKVEMRVERVDKENKDLHCQVVVGGVLSDSKGVNFPGVYLSVKALTKKDKKDLLFGLDQGVDWIALSFVRNPQDILEIKEIIANAGKNVPVIAKIEKHEAIEDMEEILSLCNGVMVARGDLGVELPPEDVPILQKRLIATANKLGIPVITATQMLDSMANNPRPTRAEVSDVANAILDGTDAVMLSNETAVGKYPVEAVATMATIAERIEKEPTTTKMMSEEKQSIPNAISSAVSHIAQELNAAAIMSLTKTGSTARNVSKFRPQIPILAVTPHVDVARQLQLVWGVKPLLVLDLASATQTFQSAVNVAQENHLLKDGDLVVMTAGTLQGVAGSTDLIKVEMVKAILGKGVGVGQGSASGRARIAHHARELGNFEPGDILVVPGTNAEFVDMMRKASGIITEESSLTSHAAVIGLRLGVPVIVGFKEATQKIREGAIITVDAQKGLVYSGVVTSNSHYGAM

SEQ ID NO: 436 - DNA, 1506 bp, Streptococcus pneumoniae CGSP14
  CDS (1)..(1506): transl_table=11
atgaacaaacgtgtaaaaatcgttgcaactttgggtcctgcggtagaaatccgtggtggtaaaaaattcggtgaggacggatactggggtgaaaaacttgatgttgaagcttcagctaaaaacattgctaaattgattgaagctggtgctaacacattccgattcaacttctcacacggcgaccaccaagaacaaggtgagcgtatggcaactgttaaacttgcggaaaaaattgcaggtaaaaaagttggtttccttcttgatacaaaaggacctgaaatccgtacagaattgttcgaaggtgaagctaaagaatattcatacaaaactagtgaaaaaattcgtgttgcaactaaacaaggaatcaaatcaactcgtgaagtgattgcgttgaacgttgctggtgctcttgatatctatgatgatgttgaagttggtcgtcaagttttggttgacgatggtaaacttggtcttcgtgtggttgctaaagatgatgcaactcgtgaatttgaagttgaagttgaaaacgatggtatcatcgctaaacaaaaaggtgtgaacatccctaacactaaaattcctttcccagctcttgctgaacgcgataacgacgatatccgtttcggtcttgaacaaggtatcaacttcatcgcaatttcattcgtacgtactgcaaaagatgtgaacgaagttcgtgcaatctgtgaagaaactggaaacggacatgttcaattgttcgctaaaatcgaaaaccaacaaggtatcgataacttagacgaaatcatcgaagcagctgatggtattatgattgctcgtggtgatatgggtatcgaagtaccgttcgaaatggttccagtttatcaaaaaatgattatcaagaaagtcaatgctgcaggtaaagttgttatcactgcaacaaacatgcttgaaacaatgactgaaaaaccacgtgcaactcgttcagaagtatcagacgtattcaacgctgttatcgacggaactgacgctacaatgctgtcaggcgagtctgcaaacggtaaatacccactcgagtcagtaactacaatggctacaatcgacaagaacgctcaagctcttcttaatgaatacggacgtcttgattcagattcatttgagcgtaactctaagacagaagtaatggcttctgctgttaaagatgctactagctcaatggatatcaaattggttgtaactcttactaagacaggtcatactgcacgtttgatttctaaataccgtccaaatgctgacatcttagcattgacatttgacgaattgacagaacgtggcttgatgttgaactggggtgttatcccaatgttgacagatgctccatcttcaactgacgatatgttcgaaatcgctgaacgtaaagcggtagaagcaggtctcgttgagtcaggcgatgatatcgttatcgttgctggtgtgccagtaggagaagctgttcgcacaaacacaatgcgtatccgcacagtacgttaa

SEQ ID NO: 437 - protein, 501 aa, Streptococcus pneumoniae CGSP14
MNKRVKIVATLGPAVEIRGGKKFGEDGYWGEKLDVEASAKNIAKLIEAGANTFRFNFSHGDHQEQGERMATVKLAEKIAGKKVGFLLDTKGPEIRTELFEGEAKEYSYKTSEKIRVATKQGIKSTREVIALNVAGALDIYDDVEVGRQVLVDDGKLGLRVVAKDDATREFEVEVENDGIIAKQKGVNIPNTKIPFPALAERDNDDIRFGLEQGINFIAISFVRTAKDVNEVRAICEETGNGHVQLFAKIENQQGIDNLDEIIEAADGIMIARGDMGIEVPFEMVPVYQKMIIKKVNAAGKVVITATNMLETMTEKPRATRSEVSDVFNAVIDGTDATMLSGESANGKYPLESVTTMATIDKNAQALLNEYGRLDSDSFERNSKTEVMASAVKDATSSMDIKLVVTLTKTGHTARLISKYRPNADILALTFDELTERGLMLNWGVIPMLTDAPSSTDDMFEIAERKAVEAGLVESGDDIVIVAGVPVGEAVRTNTMRIRTVR

SEQ ID NO: 438 - DNA, 1422 bp, Lactobacillus fermentum IFO 3956
  CDS (1)..(1422): transl_table=11
atgaagaagaccaagattgtcagcactttggggccggcaagtacggatgttgacacgattgtaaagttaattaacgccggggcgaacattttccggtttaacttctcccacggtgatcacccagaacacctcgggcggattgaaaacgtccacaaggccgaagaaattactggcaagcacgttggaatcatgcttgataccaagggggctgaaattcggacgaccgttcaaaaggaagggaagatcgaattcaacatcggcgacaaggttcggatctccatggacgacagcctggaagggacgaaggaaaagatcgccgttacctacgccggtttatttgacgacgttcacgaaggcggccacgttctctttgatgatggcctgctcgacatgttggtggacgaaaaggatgaagcaaacaaggaacttgtctgccacgtcttgaaccacggaatcctcggttcccgcaagggggttaatgcaccgggcgtttccatcaacttaccagggatcaccgaaaaggatactagtgacatcaactttggtctggataacgggatcaacttcatcgccgcttccttcgttcggaagccacaagacatcgaagacattcgggtcttgctgcgcgaaaagaacatggaagacgttcaaatcttcccgaagatcgaatcccaagaagggattgacaacttcgaagcgattatcgaagtcgctgatggtctgatggttccgcgtggggacatgggggtcgaaattccggccgaaaacgttccgctggttcaaaagaacatgattcgtcgttgtaacgaactgggcaagccggtcatcaccgccacccaaatgttagactcgatgcaagaaaacccacggccaacccgggcggaagtttccgacgttgccaacgcggtctttgacggcaccgacgcaacgatgctgtctggtgaatccgctaacggggactacccagttgaatcagttgccactatgaaccggatcgacatcaaggccgaaaacaacctggacaagtttggccgggaagtctttgactttgacaagtctgacgtaactgaaacgatcggttccgccgttgccacggctgcccgtgacttaggggtaaaggcaatcgttgccgctaccgcttctggttacacggcccggatgatctctaagtaccgtccttccgctgacatcttggcgctcacctttgatgaacgcacggaacgcggcctgatgatcaactggggggttcaaccgtacgtggttgaaaagccaaccagcaccgatgaaatgtttgaattagcatccaagaaagccaaggacttaggctttgccaacgttggtgacaagatcatcgttgtggccggtttgccaatcggtcaacacgggacgaccaacatgatgcgggtacaagaagttaagtaa

SEQ ID NO: 439 - protein, 473 aa, Lactobacillus fermentum IFO 3956
MKKTKIVSTLGPASTDVDTIVKLINAGANIFRFNFSHGDHPEHLGRIENVHKAEEITGKHVGIMLDTKGAEIRTTVQKEGKIEFNIGDKVRISMDDSLEGTKEKIAVTYAGLFDDVHEGGHVLFDDGLLDMLVDEKDEANKELVCHVLNHGILGSRKGVNAPGVSINLPGITEKDTSDINFGLDNGINFIAASFVRKPQDIEDIRVLLREKNMEDVQIFPKIESQEGIDNFEAIIEVADGLMVPRGDMGVEIPAENVPLVQKNMIRRCNELGKPVITATQMLDSMQENPRPTRAEVSDVANAVFDGTDATMLSGESANGDYPVESVATMNRIDIKAENNLDKFGREVFDFDKSDVTETIGSAVATAARDLGVKAIVAATASGYTARMISKYRPSADILALTFDERTERGLMINWGVQPYVVEKPTSTDEMFELASKKAKDLGFANVGDKIIVVAGLPIGQHGTTNMMRVQEVK

SEQ ID NO: 440 - DNA, 1419 bp, Clostridium botulinum B str. Eklund 17B
  CDS (1)..(1419): transl_table=11
atgcaaaaaactaaaatgatttttactattggacctgcaagtgataatgaggagatcataaggaaatttataggaattggtatgaatgcggcaagattaaatttttcgcatggtacttatgaatcacacagagagaagatagaattaataaaaaaagtaagagaagatatgggaactccgactgcgatagtcttagacataaaaggacctaagataagaacacataactttgtaaatgatggggtagaattaaaaactggtcaagaattctgtttcgtatgcggagatgaacttcttggtgatgaagaaagatgttctattacttatgaagagctttataaagacatacaagtgggtggagaaattcttgttgatgatggtcttttaagatttaaagttatagctgttgaaggcaaatctattagatgtgctgtaacagttggtggaatgattaaaaatcacaaaggtgttaacgttcccaacgtaataataagactaccttcagtaacagaaaaagatatagctgatataaaatttggttgtgaaatgggtgtagactttatagcagcatctttcataagaaaagctagcgatgtagctgatgtaaagaagatactttctgaaaataatggtaaacatattaaagtaatagctaaaattgaaaatcaagaaggcgtagataacatagattctataatagaacaaactgacgctgtaatggttgctagaggagatatgggagttgaaattcctattcaaaaagttcctataattcaaaaaatgataattagaaaatgtaatgattcaggaaaattcgttgtaacagcaactcaaatgcttgattcaatgattagaaactctttaccaactagagcagaggcaagtgatatttgcaatgctatatttgatggaactgatgctataatgttaagtggtgaaagtgcctctggaaatttcccaattgaggcagctacaacaatgtctgagattgcgcaagaagcagaagctcatttagattatgctcacttaacagcaaggttaagagaaccctctcttactgattattctggtgcaataagttatacagcttgtagaacttcaaatttattaaatgcagctgcaatagtagctgctactaaaagtggtgctacagctactatgatttcaagatatagaccaaaatctcctgttatagcaataactccttatgaacaagtaagaagaagtttagctttaacttttggtgtattaccaatgctttgcgaaatgtataatactactgatgaaatcttagtggaagctagaagatcagtgtttgaattaaattttgctttacctggtgatgatattgtagttgctgctggaatgccaacaactcaaactggtggaacaaatatgttaaaaatagagaaattataa

SEQ ID NO: 441 - protein, 472 aa, Clostridium botulinum B str. Eklund 17B
MQKTKMIFTIGPASDNEEIIRKFIGIGMNAARLNFSHGTYESHREKIELIKKVREDMGTPTAIVLDIKGPKIRTHNFVNDGVELKTGQEFCFVCGDELLGDEERCSITYEELYKDIQVGGEILVDDGLLRFKVIAVEGKSIRCAVTVGGMIKNHKGVNVPNVIIRLPSVTEKDIADIKFGCEMGVDFIAASFIRKASDVADVKKILSENNGKHIKVIAKIENQEGVDNIDSIIEQTDAVMVARGDMGVEIPIQKVPIIQKMIIRKCNDSGKFVVTATQMLDSMIRNSLPTRAEASDICNAIFDGTDAIMLSGESASGNFPIEAATTMSEIAQEAEAHLDYAHLTARLREPSLTDYSGAISYTACRTSNLLNAAAIVAATKSGATATMISRYRPKSPVIAITPYEQVRRSLALTFGVLPMLCEMYNTTDEILVEARRSVFELNFALPGDDIVVAAGMPTTQTGGTNMLKIEKL

SEQ ID NO: 442 - DNA, 1416 bp, Clostridium botulinum B str. Eklund 17B
  CDS (1)..(1416): transl_table=11
atgagaaagactaaaatgatttgtactattggaccagcaagtgaagacagagaaatattagaacaagtaatgttagcaggaatgaatgcttcaagacataacttttcacatggtgatcacgaagaacatagaggaagaatagaaaaggttaaagaattatcaaagaaacttgataaagaaatagctatcatccttgatacaaaaggaccagaaataagaactggaaaattcgaaccaaacaaagttgaattagttaaaggtacagaatttactgtatacgcaggagatatgtcagtagttggagacactacaaagtgttcagttacttacgaaggattagctaatgatgttaaagcaggaaacacaatcttaatagatgatggtttagtaggattaacagttaaatcagtaaaaggaaacgcagttatctgtgaagttcaaaatactggattagttggaactcataaaggcgttaacgtaccaggagtttcaatccaattaccagctcttacagacaaagataaatcagatttaatatttggttgtgaaatgggagttactatgatagcagcttcattcgtaagaaaagcagctgacgtagtagctataagaaaagttcttgatgaaaatggtggaaagaacatcttaatctgccctaaaatcgaaaaccaagaaggtgttgataacatcgattcaatattagaaatctcagatgctataatggtagctagaggagatctaggtgttgaaattccaatagaacaagtaccagcagttcaaaaaatgatcattcaaaaatgtaatgcagctggaaagccagttgttactgcaactcaaatgttagattctatgatcagaaacccaagaccaacaagagcagaagtttcagatgtagctaacgctatattagatggtactgatgcaataatgttatcaggagaaagtgctaacggaacttacccagtagaagctgttagaactatggctaaaattgctgaagaaactgaaaagcaattagctcataaagttgcttactcaaatgataaatcttcaatatctgaagtaatttcaagagcagcatgtaatgcagctaatgaattagaagcaactgctataatttcttcaactcaaacaggagctactgctaagagaatatctaagtctagaccagattgtacaatcatagctgttactccagatgaagtagtagcaaaacaattagcattctcatggggagtttacccaatagttgctgataaaatgtgttcaactgacgaaatgatgataaaatcagttgaaatagcaaaagaacataactatgttaaaaatggtgatacagtagttttagctgctggagttccagttgataaaacaggaacaactaacctattaaaagttagcgtagtaggcgaataa

SEQ ID NO: 443 - protein, 471 aa, Clostridium botulinum B str. Eklund 17B
MRKTKMICTIGPASEDREILEQVMLAGMNASRHNFSHGDHEEHRGRIEKVKELSKKLDKEIAIILDTKGPEIRTGKFEPNKVELVKGTEFTVYAGDMSVVGDTTKCSVTYEGLANDVKAGNTILIDDGLVGLTVKSVKGNAVICEVQNTGLVGTHKGVNVPGVSIQLPALTDKDKSDLIFGCEMGVTMIAASFVRKAADVVAIRKVLDENGGKNILICPKIENQEGVDNIDSILEISDAIMVARGDLGVEIPIEQVPAVQKMIIQKCNAAGKPVVTATQMLDSMIRNPRPTRAEVSDVANAILDGTDAIMLSGESANGTYPVEAVRTMAKIAEETEKQLAHKVAYSNDKSSISEVISRAACNAANELEATAIISSTQTGATAKRISKSRPDCTIIAVTPDEVVAKQLAFSWGVYPIVADKMCSTDEMMIKSVEIAKEHNYVKNGDTVVLAAGVPVDKTGTTNLLKVSVVGE

SEQ ID NO: 444 - DNA, 1413 bp, Erwinia tasmaniensis Et1/99
  CDS (1)..(1413): transl_table=11
atgaaaaaaactaagatcgtttgtactatcggcccaaaaaccgaatctgaagagatgctgaccaacctgctggatgccggcatgaacgttatgcgtttaaacttttcccacggggattaccaggaacacggacagcgcattaccaatctgcgtaacgttatgagcaaaagcggtcaccaggcggccatccttctggataccaaaggtcctgagatccgtaccatgaagctggaaggtggacaggatgctgcgctcaaagcaggccaaacctttacctttaccaccgaccagagcgttgtgggtaatgcacaaaccgttgccgtgacctatcctggcttcgcaacggatctgcaagtcggcaataccgtactggttgacgatggtcttatcggcatggaagttctcgaagtgacggacagcaccgtcgtctgtaaagtgctgaacaacggcgacctgggcgagaacaaaggcgttaacttgccgggggtctcgattcagcttccggcgttggccgagaaagacaagcatgacctgatcttcggctgcgagcagggcgttgattttgtcgcggcttccttcattcgtaaacgttctgacgtgattgagatccgtgagcatctgaaagcacacggcggtgagcacattcagatcatctctaagattgaaaaccaggaaggcctgaacaacttcgacgaaatccttgatgcctctgacggcatcatggttgcccgtggtgaccttggcgttgaaatcccggtggaagaagtgatcttcgcgcagaaaatgatgatcaaaaagtgtaaccacgcacgtaaagtggtgatcaccgccacccagatgcttgattcgatgatcaagaacccgcgccctacccgtgcagaagccggcgatgttgccaacgccatcctcgatggtactgatgcagtgatgctgtcaggtgagagtgcgaaaggcaaatatccgctggaatctgtccgcatcatggcgaccatctgtgaacgtactgaccgcgtgatgaaaagccgcattgattcgcagcatgacaaccgtaaaatgcgcattactgaagccgtatgccgtggtgccgttgaaactgccgagaagttggaagccccgctgatcgttgtggcaacagaaggcggtaagtctgcgaagtcaattcgtaagtacttcccaaatgccactattcttgcgctaacgaccaacgcacagacttcccgtcagctactgctgagcaaagggattatcacctcagtcgtggaaaaaattgcgtctaccgatgatttctaccgtctgggtaaagctgccgcagaggcaagcggatatgctcataaaggcgaagtggttgtgatggtttcaggtgctttagtgcctagcggaaccactaacacttcatcagtccatgtgctctga

SEQ ID NO: 445 - protein, 470 aa, Erwinia tasmaniensis Et1/99
MKKTKIVCTIGPKTESEEMLTNLLDAGMNVMRLNFSHGDYQEHGQRITNLRNVMSKSGHQAAILLDTKGPEIRTMKLEGGQDAALKAGQTFTFTTDQSVVGNAQTVAVTYPGFATDLQVGNTVLVDDGLIGMEVLEVTDSTVVCKVLNNGDLGENKGVNLPGVSIQLPALAEKDKHDLIFGCEQGVDFVAASFIRKRSDVIEIREHLKAHGGEHIQIISKIENQEGLNNFDEILDASDGIMVARGDLGVEIPVEEVIFAQKMMIKKCNHARKVVITATQMLDSMIKNPRPTRAEAGDVANAILDGTDAVMLSGESAKGKYPLESVRIMATICERTDRVMKSRIDSQHDNRKMRITEAVCRGAVETAEKLEAPLIVVATEGGKSAKSIRKYFPNATILALTTNAQTSRQLLLSKGIITSVVEKIASTDDFYRLGKAAAEASGYAHKGEVVVMVSGALVPSGTTNTSSVHVL

SEQ ID NO: 446 - DNA, 1743 bp, Natranaerobius thermophilus JW/NM-WN-LF
  CDS (1)..(1743): transl_table=11
atgttaagaaaaaccaaaattgtggcaactataggccctgcttgtgaaaacaaagaaagtttagccaggatggcccaaaacggaatggatgtctgtcggttaaatttttcacatggtgaacaccaggagcacctggataggataaatttaatcagggaagtttatcaggaattaaagtttcccccagctattttacttgataccagaggtcctgaaatcagattgggaacttttgaaaatggtgaagtggatttggaaaaaggacaagaatttactttatcaactgaagaaatagaaggggatactacaagagtacatgtaaattatccacaagtcacttctgatataagtcccggagataaggtgcttcttgatgatggtttgattgagctattagttaatgaagtgactgaaacagaggttaaaacagtcgtcaataatgacggtaccattaaggataataaaggtgtcaatttaccaggtgtgactctatctttaccagctatgactgacaaagaccaacaagatattttatttggtatcgaaaaccaggtggattttattgcagcttcatttattagaaagccagaagatgttttagaaattagaaaattccttgaagaacatggttcagatattcccgtaatatcaaaaattgagaataaagaaggtgttgaaaatttagaaagaatcttagaagtttccgatggcctaatggtggcacgaggagacctgggtgttgatataccaccagaagaagtgcccttagtgcaaaaaagaatgattaacagatgtaatgatgaaggtaagcctgttataacagctacacaaatgctagagtccatgacggaaaacccacgcccaactagggcagaagccagcgacgttgctaatgctatcatagacggaactgatgcggttatgcttagtggagaaacggctgctggagcttaccccgtggaatcggtaagtactatggcaaatatagcaaaaagtacggagagggagctatctagaaaaccacaagaagttaccgctaaagacactggtatgaccgaagctattgggtactccacctgtcagatagcaggccaattagaagctaatgccatattaacagctacccaatctgggtatacggcaagaatggttgccaaatacaaaccaaaagcgccaattgtggcagtgacgccaattgaaaaagttgccaggagattatctttatcatggggtgtttatccaataacctgtgacccttcagaaacaacagatgaaatgtttcaggaagcaattcaaacagccctgataactcaatatattagtgaaggggaccttattgttataacagcaggaattccagtaggagtttcgggaacaactaacttaattagagtacatactgtgggagaaatcttagtttcaggtgcaggaatcgggaaaaaaccggcaactggcaaagtggtcaaagtagaagatagcaatgatttatctaaaatttctagtggtgatatagtagtgttgcggggtactacagatgaaatggttcctcatctggctcaggttagtggtcttgttgccgaagaaggtggttacacatcaccaagtgcaattgtaggactggatctaggattacctgttattgttggtgctgaaggagctttagaaaaactggcagatggtgatcaggttactatagatcctttacgaggttttgtctataaagggcaagcaaccatattgtaa

SEQ ID NO: 447 - protein, 580 aa, Natranaerobius thermophilus JW/NM-WN-LF
MLRKTKIVATIGPACENKESLARMAQNGMDVCRLNFSHGEHQEHLDRINLIREVYQELKFPPAILLDTRGPEIRLGTFENGEVDLEKGQEFTLSTEEIEGDTTRVHVNYPQVTSDISPGDKVLLDDGLIELLVNEVTETEVKTVVNNDGTIKDNKGVNLPGVTLSLPAMTDKDQQDILFGIENQVDFIAASFIRKPEDVLEIRKFLEEHGSDIPVISKIENKEGVENLERILEVSDGLMVARGDLGVDIPPEEVPLVQKRMINRCNDEGKPVITATQMLESMTENPRPTRAEASDVANAIIDGTDAVMLSGETAAGAYPVESVSTMANIAKSTERELSRKPQEVTAKDTGMTEAIGYSTCQIAGQLEANAILTATQSGYTARMVAKYKPKAPIVAVTPIEKVARRLSLSWGVYPITCDPSETTDEMFQEAIQTALITQYISEGDLIVITAGIPVGVSGTTNLIRVHTVGEILVSGAGIGKKPATGKVVKVEDSNDLSKISSGDIVVLRGTTDEMVPHLAQVSGLVAEEGGYTSPSAIVGLDLGLPVIVGAEGALEKLADGDQVTIDPLRGFVYKGQATIL

SEQ ID NO: 448 - DNA, 1419 bp, Clostridium botulinum E3 str. Alaska E43
  CDS (1)..(1419): transl_table=11
atgcaaaaaactaaaatgatttttactattggacctgcaagtgataatgaggagattataagaaagtttataggcattggaatgaatgcagcaagattaaatttttcacatggtacttatgaatcacacagagagaaaatagaattaattaaaagagtaagagaagatatgggaactcctactgcaattatcttagatataaaaggacctaagataagaacacataattttgtaaacgatggcgtagaattaaaaactggtcaagaattctgttttgtatgcggagatgaaatccttggtgatgaagaaagatgttctattacttatgaagaactttacaaagacatacaaataggtggagaaatccttgttgatgatggtcttttaagattcaaagtcatagctgttgaaggtaaagctattagatgtaatgtaactgttggtggaatgattaaaaatcacaaaggtgttaacgttcccaacgtaataataagactaccttcagtaacagaaaaagatatagctgatataaagtttggttgtgaaatgggtgtagactttattgcagcatcttttataagaaaagctagtgatgtagctgatgtaaagaaaatactttctgaaaacaatggaaaacatattaaagtaatagctaaaattgaaaatcaagaaggcgtagataacatagattctataatagaacaaactgatgcagtaatggtagctagaggagatatgggagttgaaattccgattcaaaaagttcctataattcaaaaaatgataattagaaaatgtaatgatgctggaaagtttgttgtaacagcaactcaaatgcttgattctatgattagaaattctttaccaactagagcagaagcaagtgatatttgtaatgctatatttgatggaactgatgctatcatgttaagtggtgaaagtgcatctggaaatttcccaattgaagctgcaacaacaatgtctgaaatcgcacaagaagcagaagctcatttggattatgctcatttaacagcaagattaagagaaccatctcttactgattatgctggtgcaataagttatacagcttgtagaacttcaaatttattaaatgcatctgcaatagtggctgctactaagagtggtgctactgctactatgatttcaagatacagaccaaagtcacctgttatagcaataacaccttacgaacaagtaagaagaagcttagctttaacttttggtgtattaccaatgctttgcgaaatgtacaatactactgatgagatattagtagaagctagaagatcagtattcgaattaaacattgctctaccaggcgatgatattgtagttgctgctggaatgccaacaactcaaactggtggaacaaatatgttaaaaatagagaaattataa

SEQ ID NO: 449 - protein, 472 aa, Clostridium botulinum E3 str. Alaska E43
MQKTKMIFTIGPASDNEEIIRKFIGIGMNAARLNFSHGTYESHREKIELIKRVREDMGTPTAIILDIKGPKIRTHNFVNDGVELKTGQEFCFVCGDEILGDEERCSITYEELYKDIQIGGEILVDDGLLRFKVIAVEGKAIRCNVTVGGMIKNHKGVNVPNVIIRLPSVTEKDIADIKFGCEMGVDFIAASFIRKASDVADVKKILSENNGKHIKVIAKIENQEGVDNIDSIIEQTDAVMVARGDMGVEIPIQKVPIIQKMIIRKCNDAGKFVVTATQMLDSMIRNSLPTRAEASDICNAIFDGTDAIMLSGESASGNFPIEAATTMSEIAQEAEAHLDYAHLTARLREPSLTDYAGAISYTACRTSNLLNASAIVAATKSGATATMISRYRPKSPVIAITPYEQVRRSLALTFGVLPMLCEMYNTTDEILVEARRSVFELNIALPGDDIVVAAGMPTTQTGGTNMLKIEKL

SEQ ID NO: 450 - DNA, 1443 bp, Geobacter lovleyi SZ
  CDS (1)..(1443): transl_table=11
atgcaaaaagagcggcgcaggacaaagatagtggcaaccttgggaccggctagtagctcccccgatatgattgaacgactgttgaatacaggtgttgacctgtttcggctgaatttttcccatggaaccctagacgataaatccagcttgataaacgctattcgtgcagcctcggcaaaactgggtagagaggtgggtattcttgccgatctgcaggggcccaagatacgcaccggcaggatggctggtgatggcatgttgttgaaaaagggacaggaagtggttattaccaccgctgatgttctcggtgctgacggactgatcccgacgatctatacagaattgccgcgtgatgtgacacctggatcccgtattttgctggatgacggattgctggaactgaaggtgctggcgattgaagctgaagaagtccgctgtctggtggtgaatggcgggctgttaaagaataataaggggatcaatctgcccggcgttaaggtctctgcaccatcgttaacggaaaaggatttggctgatctggatttttgcctctgggtggatgttgactatatcgctctttcgtttgtacgtacccacgaagacgtggaacagatcaaaagaatcatctacggcgccggtaaggatattcctgtggttgccaagatcgaaaagccggaggccttacgcaactttaacaagattctgaaggtctccgatgcggttatggtggccagaggggatctgggggttgagattcaggccgagaaggtgccactgattcagaaaaaaattatccaagcctgcaatcaagcgggaaagccggtcataaccgctactcagatgctggaatcgatgattaccaacccgcggccaaccagggctgaaacgtctgatgttgccaatgcaattatcgatggaaccgatgcggttatgttgtccggcgagactgcatccggtgcgcacccccttgcagcagtggaaacaatggcgagaattgcccttgatgtggaaaatgccggttacggcagcaaagcgaatgcaccggtgctggtaacgccaagtattgcccaggcggttggtgaggccgcctgtcgggcggcaagctgcctgaaggccaaggcaattgccgtttttacccagtcgggcagtacggctgccctcatatcccgcttccggcccccgattcctattgtcgcatttacgaacgctgttgagattcagcgcaagcttacactctactggggggtccgtaccaagtcgattaagatgcttgaaagcatggaacaacagatcgcgctggctgaacaatcattgctggccgcaggcctgcgcaagggggatatcgttgttattattatgggaactccgattgaagcccgcggttctacgaatttgatgaagattcacaagctgggcgcaggaaggttttttgaaattttttaa

SEQ ID NO: 451 - protein, 480 aa, Geobacter lovleyi SZ
MQKERRRTKIVATLGPASSSPDMIERLLNTGVDLFRLNFSHGTLDDKSSLINAIRAASAKLGREVGILADLQGPKIRTGRMAGDGMLLKKGQEVVITTADVLGADGLIPTIYTELPRDVTPGSRILLDDGLLELKVLAIEAEEVRCLVVNGGLLKNNKGINLPGVKVSAPSLTEKDLADLDFCLWVDVDYIALSFVRTHEDVEQIKRIIYGAGKDIPVVAKIEKPEALRNFNKILKVSDAVMVARGDLGVEIQAEKVPLIQKKIIQACNQAGKPVITATQMLESMITNPRPTRAETSDVANAIIDGTDAVMLSGETASGAHPLAAVETMARIALDVENAGYGSKANAPVLVTPSIAQAVGEAACRAASCLKAKAIAVFTQSGSTAALISRFRPPIPIVAFTNAVEIQRKLTLYWGVRTKSIKMLESMEQQIALAEQSLLAAGLRKGDIVVIIMGTPIEARGSTNLMKIHKLGAGRFFEIF

SEQ ID NO: 452 - DNA, 1434 bp, Leptospira biflexa serovar Patoc strain 'Patoc 1 (Ames)'
  CDS (1)..(1434): transl_table=11
atgccagcaatagaacaattaagagccagaaaaacaaagatcgtttgcaccattgggcctgcgactgcttcaaaagatatgatccgaagcctagctttggccgggatgaatatcgcgaggatcaatatgagtcatggtgatcatgagtttcatagaaaaatcattcgcatcatcaaatcattaaacaaagatgaattacacaaacacccaatctccatcttactggatacacaaggtcccgagattcggacaggggatgtgcaaaacgatttacacttaaaagtgggtgaaacgtttacgtttcatatcattccaggaatggaagcagaagcccaaagtgtatttgtgaattaccgtgatatcgtaaaagatttaaaagttggtgataaagtaacagtagacaatggtcttatcaacctcgccgtgcaagagatccgtgaaaacgaactcgtttgtactgtgttagatggtggtaaacttggttctagaaaacatatcaatttgccagggatacgagttaacttaccttcaatcacacctaaagacctcaaagacataatctttggtttggaagaggatattgattttgtggcattgtctttcgttcgttctcaagaagacgtgatccaacttcgcggaatcatcgatgaaaaaaatcaccatgcacaaatcattgcaaagattgaagaccaagaaggtcttaaaaacttggatgccatcattcgagaatcggatgggattatggtggcacgtggtgatttgggtgtcgagatcgagattgaagaactccccattgtccaaagacgtatcatcaaacgttgccaagaagaaggcaaacgagtgatcgttgccactcacttactggaatctatgatccacaatccatctcctacaagggcagaagtaacagatgttgccaatgccgtgtatgaagaagcagatgcgattatgttatctggtgaaacggcgatggggaaatatcctgttcgatgtgtggaaatgttagataaaattgcgcgccgaatggaaatgtcgattaacttaggtcttgcggcacaaagaaaaccaaaagaccaaaaggaagaaatggcaaggtctgcggcaaatctcgcagattcgatgcaagcacatgccattatcgccatcacaagacgaggaatcactgccaataatttggcatcctttcaccctcgttatccaattgtacatgcttttacaaatatgacttctgttagacggaagctttggttgactcggggagtgataccttaccgtgtcgatttttcttccgatccagaaaaaacgatcaaacttgccatccaaactttagtcaataatggctatttacaaatgggtgaaaaggtagtcattttatctgacatcattgctggtgaggaaagggtcgaaaccattcaagtccgcgaagtcaaataa

SEQ ID NO: 453 - protein, 477 aa, Leptospira biflexa serovar Patoc strain 'Patoc 1 (Ames)'
MPAIEQLRARKTKIVCTIGPATASKDMIRSLALAGMNIARINMSHGDHEFHRKIIRIIKSLNKDELHKHPISILLDTQGPEIRTGDVQNDLHLKVGETFTFHIIPGMEAEAQSVFVNYRDIVKDLKVGDKVTVDNGLINLAVQEIRENELVCTVLDGGKLGSRKHINLPGIRVNLPSITPKDLKDIIFGLEEDIDFVALSFVRSQEDVIQLRGIIDEKNHHAQIIAKIEDQEGLKNLDAIIRESDGIMVARGDLGVEIEIEELPIVQRRIIKRCQEEGKRVIVATHLLESMIHNPSPTRAEVTDVANAVYEEADAIMLSGETAMGKYPVRCVEMLDKIARRMEMSINLGLAAQRKPKDQKEEMARSAANLADSMQAHAIIAITRRGITANNLASFHPRYPIVHAFTNMTSVRRKLWLTRGVIPYRVDFSSDPEKTIKLAIQTLVNNGYLQMGEKVVILSDIIAGEERVETIQVREVK

SEQ ID NO: 454 - DNA, 1767 bp, Lactobacillus casei BL23
  CDS (1)..(1767): transl_table=11
atgaaaaaaaccaagatcgtcagcacgcttggacctgcaagtaacaccactgatatcatcgttaagttgattgaagcgggtgccaacgttttccgtttcaatttctcacatggtgatcatgaagagcatttggcacggatgaacatggttcacgaagctgaaaagatcacgggtaagaccgttggtatcatgctggatacgaagggtgccgaaattcggacaactcttgaagataccccgaatggtaagatcgattttcacaccggtgacaaagttcgcatctccatggatgcaagtctgaaaggcaccaaggaaaaagttgctgttacctatcctggcctttatgatgacactcacgttggcggccatgttttgtttgatgatggcttgattgacatgaagatcaccgaaaaggacgaaaagaaccgtgaactcgttaccgttgttcaaaacgacggtgtccttggtggtaagaaaggtgtcaacgctcctggtgttgccatcaacttgcctgggattacggaaaaagactccgatgacattcgtttcggcttggacaacgggatcaacttcattgctgcttcctttgttcgtaagcctcaagacgttttagacattcgtgaactccttgaagaaaagaacgcacttaatgttcagatcttccctaagatcgaatcacaagaaggcatcgacaacattgatgacatcttgaaggtttccgatggcttaatggttgctcgtggcgacatgggtgttgaaattccatttgaacatgttccgatcgttcagaagcgcttgatcaagaagtgcaactctttgggtaagccggttatcacggctacacaaatgttggattccatgcaagaaaacccacgtcctacccgtgccgaagtaaacgacgttgccaatgccgtgtttgatggcaccgatgcaacgatgctttctggcgaatctgctaatggtgactatccggttgaatccgttgctgcaatggctcggattgacgaatacaccgaagcagcgatgatggatcaggatgccttcgcattgaaggaatacagtaacaagaacgtcaccgaagctgttggccaaagtgttgcacacacggctcgcaacttaggggttaagaccattgttgctgcgaccgaatccggctacactgcccgcatgatttccaagtatcgtccgaaggctgacattcttgccattaccttcagcgaaaagacccaacgcggcctgatggtcaactggggtgtttacccaatcattgctgaaaagcctgctaacaccgatgctatgttcgacttggcaaccaagaaggcccaagaccttggctttgctaaggaaggcgatctgatcttgatcactgccggtgttcctgttggtgaatctggcacaaccaacgtaatgaaggttcaactcattggctccaagctggttcaaggctcaggtgtcggcgacgaatccacgattggtaaggcagtcatcgcaagcaacgctcaagaagctgctgctaagatgcaaaagggtgacattctggttgttaagacgactgacaaagattacttgccagcaatcgaaaaagcagctgccttggttgttgaaaccggtggcttgaccagtcacgcagctgttgttggtattgctatgggtatcccagttgttgttggtgctgaaaatgctaccagcgtcatctccgatggccagatcattactgttgactcccgtcgtgggatcatctacaaaggtgctaccaacgccctttaa

SEQ ID NO: 455 - protein, 588 aa, Lactobacillus casei BL23
MKKTKIVSTLGPASNTTDIIVKLIEAGANVFRFNFSHGDHEEHLARMNMVHEAEKITGKTVGIMLDTKGAEIRTTLEDTPNGKIDFHTGDKVRISMDASLKGTKEKVAVTYPGLYDDTHVGGHVLFDDGLIDMKITEKDEKNRELVTVVQNDGVLGGKKGVNAPGVAINLPGITEKDSDDIRFGLDNGINFIAASFVRKPQDVLDIRELLEEKNALNVQIFPKIESQEGIDNIDDILKVSDGLMVARGDMGVEIPFEHVPIVQKRLIKKCNSLGKPVITATQMLDSMQENPRPTRAEVNDVANAVFDGTDATMLSGESANGDYPVESVAAMARIDEYTEAAMMDQDAFALKEYSNKNVTEAVGQSVAHTARNLGVKTIVAATESGYTARMISKYRPKADILAITFSEKTQRGLMVNWGVYPIIAEKPANTDAMFDLATKKAQDLGFAKEGDLILITAGVPVGESGTTNVMKVQLIGSKLVQGSGVGDESTIGKAVIASNAQEAAAKMQKGDILVVKTTDKDYLPAIEKAAALVVETGGLTSHAAVVGIAMGIPVVVGAENATSVISDGQIITVDSRRGIIYKGATNAL

SEQ ID NO: 456 - DNA, 1434 bp, Chloroherpeton thalassium ATCC 35110
  CDS (1)..(1434): transl_table=11
atgaaacgtacaaaaatcatttgtacacttggcccttcaaccgattcaattgaaaaaatcgtcgatctgatcaatgaagggatggatgttgcccgcttgaatttttctcacggaacaagagaagagcaagaacagcgaattcagcttgttcgaaaagcctctgaactaaccggaaaagctgttgcgattcttcaagatttgcaagggccgaaaattagaattggcgatttagccaaaacggtgctgttaaatcaaggcgagcagctgagaatctcgacggaggagcagcttggcaattacgaagtcgtttctacgagctacaaggaaattgtcaacgatgttaatcccggcgatacaattttgatggacgacgggcgaattgaattgaaagtgatttcgaaaaccgcaaccgaagtggttactgagattgtcattggtggattgctcaagccgaaaaaaggcttgaatttgcccggcgttaatatttccattccgtcgcttacggaaaaagacctggaagatttggatttcggtttggcgcatgatgtcgacatggtggcgctttcctttgttcgatcggccaacgatgtgaagcgcatcaagcaactcattcacgaaaagaacaaggacgtttgggcaattgccaaaatcgaaaagccggaagccgtcgctaatatcgatgcgattattttggaatcggatggcgtcatggtggcgcgtggcgatttgggcatcgagatgcgtaccgaagaagtgccggtgttgcaaaagatgattgtggaaaaatgcagtttagcgcataagccggtgattattgccacgcaaatgttggagtcgatgattgaaaatccgcgtccgactcgcgcggaggcgaacgatgtggccaatgccgtttttgatggcacagatgcggtgatgcttagcggcgaaaccgctgccggaaattttccggttgaagccgtgcgaaccatgcgagaaattatcgagcgagttgaaaaacaaggtctcacgcatattcccgtaaggcaaaaacaatggatgcaagcgtgttcgcctcgcattcgctgcatcgatttggatgaagccattgcggcctctgcggttcaaattgcggaatccttgttagccaaagcgattattgttttgactcacagtggcgcaactgccgtgaaaatttccaagcaaaagccaaagtgcgcagtgattgcggtttcggacaaagaggaagttcagcgatggatgtgcatggtgtgggggataaataccattgtcacagaaacgatggtttccacagacgaaagcttcagaaaaattgagaaaatattgcgagaaaacggcgtcgttaaaacaggtgaccttgtggtctacactttaggtattcccattcttgatcacggcggaacggacaccataaaagttagtcacgtcaactaa

SEQ ID NO: 457 - protein, 477 aa, Chloroherpeton thalassium ATCC 35110
MKRTKIICTLGPSTDSIEKIVDLINEGMDVARLNFSHGTREEQEQRIQLVRKASELTGKAVAILQDLQGPKIRIGDLAKTVLLNQGEQLRISTEEQLGNYEVVSTSYKEIVNDVNPGDTILMDDGRIELKVISKTATEVVTEIVIGGLLKPKKGLNLPGVNISIPSLTEKDLEDLDFGLAHDVDMVALSFVRSANDVKRIKQLIHEKNKDVWAIAKIEKPEAVANIDAIILESDGVMVARGDLGIEMRTEEVPVLQKMIVEKCSLAHKPVIIATQMLESMIENPRPTRAEANDVANAVFDGTDAVMLSGETAAGNFPVEAVRTMREIIERVEKQGLTHIPVRQKQWMQACSPRIRCIDLDEAIAASAVQIAESLLAKAIIVLTHSGATAVKISKQKPKCAVIAVSDKEEVQRWMCMVWGINTIVTETMVSTDESFRKIEKILRENGVVKTGDLVVYTLGIPILDHGGTDTIKVSHVN

SEQ ID NO: 458 - DNA, 1470 bp, Anaeromyxobacter sp. K
  CDS (1)..(1470): transl_table=11
atgcgccgcgccaagatcgtcgccaccctcggacccgcgtccggcgagccggacgtgctcgccaggctcctcgagcagggggtggacgtcgcccgcctgaacttctcccacggccggcacgaggaccacgcgcggatgctcgacaagatccgcgccgcctcgcgccacctcggcaaggccgtggccgtgctgcaggacctgcagggcccgaagatccgcaccggcccgctgaaggccgggaaggcgggcgtgcaggtggaggccgggcaggagatcgtcatcaccaccgagggcgaactggcgggcgacgcgcacctcgtctcgaccacctacccgcacctcgccgaggacgtgcgcgccggcgaccgcctgctggtggacgacggcctgctcgagttccgggtgctcgccaccgacggcgtgcgcgtgcgggccgaggtggtggagggcggctggctgggcgagcacaaggggatcaacctgcccggcgtggcgctccgcaccgaggccatgtccgagaaggaccgcgccgacgtggcgttcggcatctcccacggcgtggactacgtcgcgctgtcgttcgtgcgcacgcccgaggacatcggcctctgccgcgaggagatggagcgcgccggccgggtggtgcccatcatcgcgaagatcgagaagcccgaggccatcgacaacctcgacgccatcatcgccgcggccgacggggtgatggtggcccgcggcgacctcggcgtggagatcctgccggagcgcgtgccgctgctgcagaaggagatctgctcgaaggcgaacgcctccggcaagccggtcatcatcgccacgcagatgctgaactcgatgatggagcacccgcgccccacccgcgccgaggcgtccgacgtggcgaacgggatctgggacggggccgacgcggtgatgctctccggcgagaccgccagcggccgcttcccgctcgcggcggtgcagatgatggaccgcatcgtgcgcgaggcggaggcgggctcgccggccgcgctccacgcgcgcgtcccgccgccggcgcgcccggcgccgttcaacctggtgaccgcttcggccgcctgcgaggcggccgaggccgccggggcggtcgcgatctgctgcttcacgctgcgcggcgagaccgcgcggctgctcgcgcacttccgcccgcgggtgccgatcgtcgcgttctcgccggaccagtccatccgccggcgcctggcgctgtactggggcgtgctgccgaaggtgatggagccggtgaagaacgccgacctcatggccgagatcgtctccgaccggctcctcgaggagaagctggtgaagccgggcgaccgggtggtgctggtgcacggctccccgctcggcctgcccggccagacgaactccatccgcctgcacgagatcacccacccgtccgatcgcgggcccgcccagcgctaccgcgtcccggtgtag

SEQ ID NO: 459 - protein, 489 aa, Anaeromyxobacter sp. K
MRRAKIVATLGPASGEPDVLARLLEQGVDVARLNFSHGRHEDHARMLDKIRAASRHLGKAVAVLQDLQGPKIRTGPLKAGKAGVQVEAGQEIVITTEGELAGDAHLVSTTYPHLAEDVRAGDRLLVDDGLLEFRVLATDGVRVRAEVVEGGWLGEHKGINLPGVALRTEAMSEKDRADVAFGISHGVDYVALSFVRTPEDIGLCREEMERAGRVVPIIAKIEKPEAIDNLDAIIAAADGVMVARGDLGVEILPERVPLLQKEICSKANASGKPVIIATQMLNSMMEHPRPTRAEASDVANGIWDGADAVMLSGETASGRFPLAAVQMMDRIVREAEAGSPAALHARVPPPARPAPFNLVTASAACEAAEAAGAVAICCFTLRGETARLLAHFRPRVPIVAFSPDQSIRRRLALYWGVLPKVMEPVKNADLMAEIVSDRLLEEKLVKPGDRVVLVHGSPLGLPGQTNSIRLHEITHPSDRGPAQRYRVPV

SEQ ID NO: 460 - DNA, 1446 bp, Geobacter bemidjiensis Bem
  CDS (1)..(1446): transl_table=11
atgttccgtcacacaaagatcgttgccactgtcggacccgccagcgaatccgaagagatgctcggcgccttgataaaggccggcgtcgacgttttccgcctcaacttctcccatggcgaccatgccgccaaatccgccgtcatccgcagcatccgcaaactctgcgaccaacatgagcattctgtcgccatcctcggggacctgcaggggccgaagatccgcaccggcctcatgaaggggggcgggatgcagctcaccgccgggaccgaagtgatcgtcaccacccgtgagctgctaggcgaggggagcctcatcccgaccatctaccaggggctccccggggacgtgaagcccgacgaccgcatccttttggacgacggcctgatggagctgagggtgctgggggtggaagggggcgatgtgcgctgcctcgtcgtgaccggaggcctcctcaaggaccgcaaggggatcaacctccccggcgccaaggtttccgcccccgccatgaccggcaaggaccgcgacgacctcgaattctgcatggagcagcggcttgactacgtcgccctttccttcgtgcgcgaggcatccgacgtgcaggaattgaggagcatcatcgacagccgcggctcccagctccgcatcatctccaagatcgagaagccggaggcggtgctcaacttcggcgccatcttgcaggcttccgacggggtcatggtggcccgaggcgacctgggggtggagttgaatcccgagaaggttccgctcatccagaagcggatcatccgcagttgcaacgatgccggaaagccggtgatcaccgccacccaaatgctggagagcatggtgaacaacccgcgcccgacccgcgccgagacctccgacgtcgccaacgccatcctggacggcaccgacgccatcatgctttccgccgagaccgcgtccggcaagtatccggtggaggcggtctccatgatggtgcaggtggcgcgcgacgtggaagcggacccgcagctcatggcgcaaagctgccacatcgcccagaccgaggcggagccgaacctctccgaggtgatcgggcttgccgcctgccatgcggcggaaagcgtcaaggcatcggcgatccttgccttcacccagaccggagggaccgcggctctcgtttccaagtgccggccggcccagcccatcatcgccgtgacaccatccgaagaggtgcggcgcgtgctcgccctttatgccggggtgcattcgctgcgcgtagatatcgagggggacactgaatcccagatcatctccgtcgagaaagcggtgctggaaaccggctggctcaacaagggggagttggtggtgataaccatgggaagcccgctttcttcagcgggaaccaccaacctgatgaaggtgcatcggctgggggagcctgaggttaagcggcgtctttga

SEQ ID NO: 461 - protein, 481 aa, Geobacter bemidjiensis Bem
MFRHTKIVATVGPASESEEMLGALIKAGVDVFRLNFSHGDHAAKSAVIRSIRKLCDQHEHSVAILGDLQGPKIRTGLMKGGGMQLTAGTEVIVTTRELLGEGSLIPTIYQGLPGDVKPDDRILLDDGLMELRVLGVEGGDVRCLVVTGGLLKDRKGINLPGAKVSAPAMTGKDRDDLEFCMEQRLDYVALSFVREASDVQELRSIIDSRGSQLRIISKIEKPEAVLNFGAILQASDGVMVARGDLGVELNPEKVPLIQKRIIRSCNDAGKPVITATQMLESMVNNPRPTRAETSDVANAILDGTDAIMLSAETASGKYPVEAVSMMVQVARDVEADPQLMAQSCHIAQTEAEPNLSEVIGLAACHAAESVKASAILAFTQTGGTAALVSKCRPAQPIIAVTPSEEVRRVLALYAGVHSLRVDIEGDTESQIISVEKAVLETGWLNKGELVVITMGSPLSSAGTTNLMKVHRLGEPEVKRRL

SEQ ID NO: 462 - DNA, 1413 bp, Proteus mirabilis HI4320
  CDS (1)..(1413): transl_table=11
atgaaaaagacaaaaattgtttgcaccatcgggccaaaaaccgaatctgaagaaaaactgactcaattactggacgcaggcatgaacgtaatgcgtctaaacttctctcacggtgactatgaagagcatggcaaccgtatcaaaaacctgcgtaatgtctgcgcaaaaacaggcaaaaaagcagccattttattagatactaaaggacctgagatccgcaccattaaattagaaggtggtaacgatgtctctttagttgcaggtcagacttttacctttacaacagatacttctgttgttggtaataaagatcgcgttgcggtcacttatgacggtttcgcaagagacttaactgtcggcaataccgtattagtcgatgacggccttatcggtatgaaagtcattaaagtcactgatactgaagtggtatgtgaagtactcaacaacggtgatttaggcgaaaataaaggcgttaacttaccaggtgtttctatcggcttaccggcattagcagaaaaagataaacaagatcttatctttggttgcgaacaaggcgttgactttgttgccgcttcttttattcgtaaacgttcagatgttgaagagatgcgtgctcacttaaaagcacacggtggcgaaaacatcatgatcatctctaaaattgaaaaccaagaaggtttaaataactttgacgaaattttagaagcctctgacggtatcatggttgcacgtggtgacttaggtgttgagatccctgttgaagaagttatctttgcacaaaaaatgatgatcgaaaaatgtaacgctgcgcgtaaagtggttatcactgcaacacagatgttagattccatgatcaaaaatccacgccctactcgtgcagaagctggtgacgttgccaatgctattttagatggtactgatgctgttatgctatccggtgaaagtgcgaaaggtaaatatccagtagaagctgtgactattatggcgactatctgtgatcgtactgatcgcatcatgaaatcacgtttagagtcttaccaattaggtgctaaattacgtgtaacagaagctgtttgtcgtggtgctgtagaaatggcggagaaattagatgctcctcttatcgttgtagcaacttatggcggtaaatcagcgcgctctatccgtaaatatttcccaacagcgcctatcttagcattaacaaataatgaagagaccgcacgccaattactgttagtaaaaggtgtaacaacacaattagttaataaaattgcttctactgatgacttctaccgtatcggtaaagatgcagcattatcaagtggcttagcccatgcaggtgatcgtgttgttatggttacaggtgcactggttgatagtggaacgacaaatacttcatcagtacacgttctgtaa

SEQ ID NO: 463 - protein, 470 aa, Proteus mirabilis HI4320
MKKTKIVCTIGPKTESEEKLTQLLDAGMNVMRLNFSHGDYEEHGNRIKNLRNVCAKTGKKAAILLDTKGPEIRTIKLEGGNDVSLVAGQTFTFTTDTSVVGNKDRVAVTYDGFARDLTVGNTVLVDDGLIGMKVIKVTDTEVVCEVLNNGDLGENKGVNLPGVSIGLPALAEKDKQDLIFGCEQGVDFVAASFIRKRSDVEEMRAHLKAHGGENIMIISKIENQEGLNNFDEILEASDGIMVARGDLGVEIPVEEVIFAQKMMIEKCNAARKVVITATQMLDSMIKNPRPTRAEAGDVANAILDGTDAVMLSGESAKGKYPVEAVTIMATICDRTDRIMKSRLESYQLGAKLRVTEAVCRGAVEMAEKLDAPLIVVATYGGKSARSIRKYFPTAPILALTNNEETARQLLLVKGVTTQLVNKIASTDDFYRIGKDAALSSGLAHAGDRVVMVTGALVDSGTTNTSSVHVL

SEQ ID NO: 464 - DNA, 1428 bp, Fusobacterium nucleatum subsp. polymorphum ATCC 10953
  CDS (1)..(1428): transl_table=11
atgaggagtttgaaaaaaacaaaaatagtttgtactattggtcctgtgactgaatcagtagaaactttaaaagaattattaaatagaggaatgaatgtaatgagattaaatttctctcatggtgactatgaagaacatggtatgagaatgaaaaattttagacaagcaatgtctgaaactggaattagaggaggtatacttcttgatactaaaggtccagaaataaggacaatgactttaaaagatggtaaagatgttagtattaaggctggacaaaaatttacttttacaacagatcaatcagttgttggagataatgaaagagtagcagtaacttatgaaaactttgcaaaagatttaaaagttggggatattgttcttgttgatgatggattacttgaactagatgttacagaaataaaaggaaatgaagttatatgtatagctagaaataatggtgatttaggacaaaagaaaggaataaatttacctaatgtttctgttaatttaccagcattatctgaaaaagatatagaagatttgaaatttggttgccaaaataatgttgattttgtggcagcatcatttataagaaaagctgatgatgtaagacaagtaaggaaagttcttagagaaaatggtggagaaagaatacaaataatttctaaaatagaaagccaagaaggacttgataactttgatgaaattttagctgaatcagatgggataatggtagcaagaggagatttaggagtagaaattcctgttgaagaagttccttgtgcacaaaaaatgatgataagaaaatgtaatagagcaggaaaagtagttattacagcaactcaaatgctagattcaatgattaaaaacccaagacctacaagggcagaagcaaatgatgttgctaatgctatattagatggtacagatgcagtaatgctttcaggagaaactgcaaaaggaaaatatccactagctgctgttgaggttatgaataaaatagctaaaaaagttgatgctacaataccaccattttatgtagaaggagtaataaataaacatgatataactacagctgttgcagaaggaagtgctgatataagtgaaagattaaatgcaaaacttatagttgttggtacagaatctggaagagctgcaagagatatgagaagatatttccctaaggcaaatattttagcaataactaataatgaaaaaactgcaaatcaattagttttatcaagaggaataattccatatgtagatgcttcaccaaaaacattagaagaattctttgtcatagcagaagctgctgcaaaaaaattaaatttagttgaaaataatgatataattatagcaacttgtggagaaagtgtatttatacaaggaacaactaactcaataaaagtaatacaagtaaaagcatag

SEQ ID NO: 465 - protein, 475 aa, Fusobacterium nucleatum subsp. polymorphum ATCC 10953
MRSLKKTKIVCTIGPVTESVETLKELLNRGMNVMRLNFSHGDYEEHGMRMKNFRQAMSETGIRGGILLDTKGPEIRTMTLKDGKDVSIKAGQKFTFTTDQSVVGDNERVAVTYENFAKDLKVGDIVLVDDGLLELDVTEIKGNEVICIARNNGDLGQKKGINLPNVSVNLPALSEKDIEDLKFGCQNNVDFVAASFIRKADDVRQVRKVLRENGGERIQIISKIESQEGLDNFDEILAESDGIMVARGDLGVEIPVEEVPCAQKMMIRKCNRAGKVVITATQMLDSMIKNPRPTRAEANDVANAILDGTDAVMLSGETAKGKYPLAAVEVMNKIAKKVDATIPPFYVEGVINKHDITTAVAEGSADISERLNAKLIVVGTESGRAARDMRRYFPKANILAITNNEKTANQLVLSRGIIPYVDASPKTLEEFFVIAEAAAKKLNLVENNDIIIATCGESVFIQGTTNSIKVIQVKA

SEQ ID NO: 466 - DNA, 1428 bp, Streptomyces sp. Mg1
  CDS (1)..(1428): transl_table=11
atgcgccgagcgaaaatcgtatgtaccctgggccccgccaccgactcatacgaccagatcaaagccctggtcgaagccggaatggacatcgcccgcctcaacctcagccacggcacctacgccgaacacgaggagcgctaccaacgcgtgcgcaaggcatccgacgaaagcggccgcagcgtcggcatcctcgccgaccttcaaggcccgaagatccgactcggccgcttccacgaaggccccgtactccttgaacgcggcgacgagttcaccatcaccaccgaagaccaccaaggcgaccgccacacctgcggcaccacctaccccggcctcgccgccgacgtcacccccggcgaacgcatcctcgtcgacgacggccgcgtcaccctccaagtcaccaccgtcgaaggcccccacgtccgcaccaccgtcatcgaaggcggcatggtctccgaccacaagggactcaacctccccggagtcgccgtctccgtccccgccctctccgacaaggacatcgaagacctccgctgggccctgcgcaccggcgccgacgtcatcgccctctccttcgtccgcagcggccgcgacatcgaagacgtccaccgcatcatggacgaagaaggccgccgcctccccgtcatcgccaagatcgaaaagcctcaggccgtcgagaacatcgacgaaatcgtcgccgccttcgacggcatcatggtcgcccgcggcgacctcggcgtcgaaatgcccctcgaacaagtccccatcgtccaaaagcgagccgtcaaactcgccaagcgcaacgccaaacccgtcatcgtcgccacccagatgctcgactcgatgatcgacaactcccgccccacccgagccgaagcatccgacgtcgccaacgccatcatcgacggcaccgacgccgtcatgctctccggcgaaaccagcgtcggcaaataccccgtcgaaaccgtcaaaaccatgtcccgcatcgtcgaagccgccgaagaagacatcctcgccaagggcctcccacccctcaccgaccgcaacaaaccccgcacccaaggcggagccgtcgcccgtgccgccgccgaaatgggcgacttcctcgaagccaaattcctcgtcgccttcacccagagcggagacaccgtccgccggctctcccgctaccgctcacccatccccctcctcgccttcacgcccgaccccgccacccgctcccagctcaacctcacctggggcgtcgaaaccttcctcggcccccacgtcgactccaccgacgccatggtcgcccaagtcgaagaagaactcctgcgcatcggccgctgcggacccggcgacatcgtcgtcatcaccgccggctcaccccccggcgtcaccggctccaccaacctggtccgcgtccaccacatcggcgacccggtccgctga

SEQ ID NO: 467 - protein, 475 aa, Streptomyces sp. Mg1
MRRAKIVCTLGPATDSYDQIKALVEAGMDIARLNLSHGTYAEHEERYQRVRKASDESGRSVGILADLQGPKIRLGRFHEGPVLLERGDEFTITTEDHQGDRHTCGTTYPGLAADVTPGERILVDDGRVTLQVTTVEGPHVRTTVIEGGMVSDHKGLNLPGVAVSVPALSDKDIEDLRWALRTGADVIALSFVRSGRDIEDVHRIMDEEGRRLPVIAKIEKPQAVENIDEIVAAFDGIMVARGDLGVEMPLEQVPIVQKRAVKLAKRNAKPVIVATQMLDSMIDNSRPTRAEASDVANAIIDGTDAVMLSGETSVGKYPVETVKTMSRIVEAAEEDILAKGLPPLTDRNKPRTQGGAVARAAAEMGDFLEAKFLVAFTQSGDTVRRLSRYRSPIPLLAFTPDPATRSQLNLTWGVETFLGPHVDSTDAMVAQVEEELLRIGRCGPGDIVVITAGSPPGVTGSTNLVRVHHIGDPVR

SEQ ID NO: 468 - DNA, 1434 bp, Streptomyces sp. Mg1
  CDS (1)..(1434): transl_table=11
atgcgccgttccaaaatcgtctgcacgctgggccccgccgtcgactcgtatgagcagctgaaagcgctcatcgaggcaggcatgaacgtggcccgattcaacttcagccacgggtcccaggcagaacaccaggagcggtacgaccgcgtccggaaggtctccgaggacaccgggcgtgcggtcggcgtcctcgccgacctccagggtccgaagatccgtctggagaccttcgccgagggtcccgtcgagctggtgcgcggtgacgagttcaccatcaccaccgaggacgtcccgggcgacaagtccatctgcggcaccacctacaagggcctgccgggcgacgtcaccaagggcgaccagatcctgatcaacgacggcaacgtcgagctgcgggtgaccggggtcgagggcccgcgggtgcggaccatcgtcatcgagggcggtgtcatctcggaccacaagggcatcaacctgcccggcgcggccgtgaacgtccccgccctgtcggagaaggacgtcgacgacctccgcttcgccctgcggatgggctgcgacatggtcgccctgtccttcgtccgcgacgccaacgacgtcaaggacgtccacaaggtcatggacgaggagggccgccgggtccccgtcatcgccaaggtggagaagccgcaggccgtcgagaacatggcggccgtcgtcgccgcgttcgacgcggtcatggtggcccgcggcgacctggccgtcgagtacccgctcgaaaaggtcccgatggtccagaagcggctcatcgagatgtgccgccgcaacgccaagccggtgatcgtcgcgacccagatgatggagtcgatgatcaccaactcccgcccgacgcgcgcggaggcctccgacgtcgccaacgcgatcctggacggggccgacgcggtcatgctgtcggccgagtcctcggtcggcgcctacccgatcgagaccgtcaagacgatgtcgaagatcgtcacggcggccgaggaggagctgctcgccaagggcctccagcccctggtcccgggcaagaagccccgtacccagggcggctccgtcgcccgcgcggcctgcgagatcgcggacttcctcgacggcaaggcgctcatcgccttcacccagtccggggacacggcccgccgcctgtcgcgctaccgcgcctcgcaggagatcctggccttcaccacggacgtcaacacccgcaaccagctcacgctgagctggggcgtcgagtcgtacgtcgtcccgcacgtggacaccacggacgcgatggtcgacctggtggacggcgagctgctcaagctgggccgctacgaccagggcgacaccatggtcatcaccgccggctcgccccccggcgtcccgggcacgaccaacatggtccgcgtccaccacctgggcggcgacaccccgcaggcctga

SEQ ID NO: 469 - protein, 477 aa, Streptomyces sp. Mg1
MRRSKIVCTLGPAVDSYEQLKALIEAGMNVARFNFSHGSQAEHQERYDRVRKVSEDTGRAVGVLADLQGPKIRLETFAEGPVELVRGDEFTITTEDVPGDKSICGTTYKGLPGDVTKGDQILINDGNVELRVTGVEGPRVRTIVIEGGVISDHKGINLPGAAVNVPALSEKDVDDLRFALRMGCDMVALSFVRDANDVKDVHKVMDEEGRRVPVIAKVEKPQAVENMAAVVAAFDAVMVARGDLAVEYPLEKVPMVQKRLIEMCRRNAKPVIVATQMMESMITNSRPTRAEASDVANAILDGADAVMLSAESSVGAYPIETVKTMSKIVTAAEEELLAKGLQPLVPGKKPRTQGGSVARAACEIADFLDGKALIAFTQSGDTARRLSRYRASQEILAFTTDVNTRNQLTLSWGVESYVVPHVDTTDAMVDLVDGELLKLGRYDQGDTMVITAGSPPGVPGTTNMVRVHHLGGDTPQA

SEQ ID NO: 470 - DNA, 1431 bp, Unknown
  Unidentified
  CDS (1)..(1431)
atgcgccgttccaaaatcgtctgcactctcggtccagcggtcgactcctacgatcagctgaaggcccttatcgaagccggcatgaacgtggcccggctcaacatgagccacggctcgcacgaagaacacctcgggcgctaccagcgcgtccgccaggccgccgccgacagcggcaggaccgtcggggtcctcttcgacctccagggcccgaagatccgcctggagaccttcgccgacggtcccgtggagctggtgcgcggcgacgagttcaccatcaccgtggaggacgtgcagggcgaccgcacgatctgcggcacgacgtacaagggcctcccgggcgacgtcgccaagggcgacccgatcctcatcaacgacggcaacgtcgagctcaaggtcacctcggtcgagggcccccgggtccgcaccatcgtcatcgagggcggtgtcgtctccgaccacaagggcatcaaccttcccggcgcggccgtgaacgtgcccgcgctctccgagaaggacgtcgaggacctccgcttcgcgctgcgcaccggcgcggacatgatcgcgctctccttcgtgcgcgacgcctcggacgtcaaggacgtccacaagatcatggacgaggagggcaagcgcctccccgtcatcgcgaaggtcgagaagccgcaggccgtcgcgaacatggaggaggtcgtcctcgccttcgacgccgtcatggtggcgcgcggcgacctcgccgtggagtacccgctggagaaggtcccgctggtgcagaagcgcctcgtggagatgtgccggcgcaacgcgaagccggtggtcgtggcgacccagatgatggagtccatgatcaccaactcgcggccgacgcgcgccgaggcgagcgacgtcgcgaacgcgatcctcgacggcgccgacgcggtcatgctgtcggccgagtcgagcgtgggcgcgtacccgatcgagaccgtcaagacgatgtcgaagatcgtcacggcggccgaggaggcgctgctctcgcagggcctcaagccgctggacgagggcaagaagccgcgcacccagagcggatcggtggcccgtgccgccgccgagatcgcggacttcctggacgcgaacgcgctcgccgccttcacgcagtccggcgacaccgcgcgccgcctggcccgctaccgcaccgcccagccggtcctcgccttcacgacggaggagtccacgcgcaaccagctcgcgctgagctggggcgtgaccccctacctcgtgccgcacgtggagacgacggacgcgatggtcgacctcgtggacgccgagtcggtgaagctgggctggctcaaggacggcgacaccgtggtcatcacggcgggctcgccccccggcgtcccgggctccacgaacctcgtccgggtccaccacctgggcgacaaccggcagggctga

SEQ ID NO: 471 - protein, 476 aa, Unknown
  Unidentified
MRRSKIVCTLGPAVDSYDQLKALIEAGMNVARLNMSHGSHEEHLGRYQRVRQAAADSGRTVGVLFDLQGPKIRLETFADGPVELVRGDEFTITVEDVQGDRTICGTTYKGLPGDVAKGDPILINDGNVELKVTSVEGPRVRTIVIEGGVVSDHKGINLPGAAVNVPALSEKDVEDLRFALRTGADMIALSFVRDASDVKDVHKIMDEEGKRLPVIAKVEKPQAVANMEEVVLAFDAVMVARGDLAVEYPLEKVPLVQKRLVEMCRRNAKPVVVATQMMESMITNSRPTRAEASDVANAILDGADAVMLSAESSVGAYPIETVKTMSKIVTAAEEALLSQGLKPLDEGKKPRTQSGSVARAAAEIADFLDANALAAFTQSGDTARRLARYRTAQPVLAFTTEESTRNQLALSWGVTPYLVPHVETTDAMVDLVDAESVKLGWLKDGDTVVITAGSPPGVPGSTNLVRVHHLGDNRQG

SEQ ID NO: 472 - DNA, 1425 bp, Streptomyces clavuligerus ATCC 27064
  CDS (1)..(1425): transl_table=11
atgcgccgttccaaaatcgtctgcacactgggccctgctgtcgactcctacgaccagctgagggccctcatcgaggccggtatgaacgtggcccgcttcaacatgagccacggttcccacgccgagcacgaggagcggtaccaccgcgtccgcaaggccgccgccgacaccgggcgcgccctgggcgtcctcgccgacctccagggtccgaagatccggctggagaccttcgccgagggcccggtggagctggtgcgcggtgacgagttcaccatcaccaccgaggacgtggcgggagacaagtccatctgcggcaccacctacaaggggctgccgggcgatgtctccaagggcgaccagatcctgatcaacgacggcaatgtcgagttgcgcgtggtcgaggtcgagggcccccgggtgaagacgatcgtggtcgagggcggtgtcatctccgaccacaagggcatcaacctccccggcgcggcggtgaatgtcccggccctctccgagaaggacgtcgaggacctgcgcttcgccctgcggatgggctgcgacctggtggccctctcgttcgtccgcgacgccgacgacgtcaaggacgtccacaaggtgatggacgaggtgggcatccgggtccccgtcatcgccaaggtggagaagccgcaggccgtcgccaacatggaggacgtcgtcctggcgttcgacggggtgatggtggcccgcggtgacctggcggtcgagtatccgctggagaaggtcccgatggtgcagaagcgcctgatcgagctgtgccgccggaacgcgaagccggtgatcgtggcgacccagatgatggagtcgatgatcaccaactcccgtcccacgcgcgccgaggcgtctgatgtcgccaacgcgatcctggacggcgcggacgcggtcatgctgtcggcggagtcctcggtgggcgcctacccgatcgagaccgtgaagacgatgtccaagatcgtcaccgcggccgaggaggagctgctctccaagggcctccagcccctggtccccggcaagaagccgcgcacccagggcggttcggtcgcccgtgccgcctgtgagatcgcggacttcctgagcggcaaggccctggtcgccttcaccaagtccggcgacacggcccgccgcctctcccgctaccgggtctgtcagccgatcctcgccttcaccaccgaggagtccacccgcaaccagctcgcgctgagctggggcgtcgagtccttcgtcgtcccgcacgtggacaacacggacgccatggtcgacctggtcgacgccgagctgctgaagctccagcgccacaacgagggcgacaccatgatcatcacggccggttcccctccgggtgtgccgggcaccacgaacatggtgcgggtgcaccacctgggccgcgcctcgtaa

SEQ ID NO: 473 - protein, 474 aa, Streptomyces clavuligerus ATCC 27064
MRRSKIVCTLGPAVDSYDQLRALIEAGMNVARFNMSHGSHAEHEERYHRVRKAAADTGRALGVLADLQGPKIRLETFAEGPVELVRGDEFTITTEDVAGDKSICGTTYKGLPGDVSKGDQILINDGNVELRVVEVEGPRVKTIVVEGGVISDHKGINLPGAAVNVPALSEKDVEDLRFALRMGCDLVALSFVRDADDVKDVHKVMDEVGIRVPVIAKVEKPQAVANMEDVVLAFDGVMVARGDLAVEYPLEKVPMVQKRLIELCRRNAKPVIVATQMMESMITNSRPTRAEASDVANAILDGADAVMLSAESSVGAYPIETVKTMSKIVTAAEEELLSKGLQPLVPGKKPRTQGGSVARAACEIADFLSGKALVAFTKSGDTARRLSRYRVCQPILAFTTEESTRNQLALSWGVESFVVPHVDNTDAMVDLVDAELLKLQRHNEGDTMIITAGSPPGVPGTTNMVRVHHLGRAS

SEQ ID NO: 474 - DNA, 1425 bp, Streptomyces pristinaespiralis ATCC 25486
  CDS (1)..(1425): transl_table=11
atgcgccgagcaaaaatcgtctgcaccctgggccccgcaaccgacacgtacgagcagatcaaggcactcgtcgacgccggaatggacatcgcccgcttcaacctcagccacggcacctacgccgaccacgaggagcgctaccaccacgtacgaaaggcctccgacgaaaccggccgcagcatcggcatcctcgcggaccttcaaggcccgaagatccgcctcggccgcttccgcgaaggacccgtactgcttgaacgcggcgacacgttcaccatcaccaccgaggacatcgagggcgaccgccacacctgcggcaccacctatcagggactcgcctccgacgtcacccgcggcgaacgcatcctcgtcgacgacggcaaggtcgccctcgaagtcaccgccgtcgaaggcccccgggtcacgaccaccgtcgtcgaaggcggcatggtctccgaccacaagggcctcaacctccccggcgtggccgtctccgtccccgccctctccgagaaggacatcgaagacctccgctgggccctcggcatcggcgccgacatcatcgccctctccttcgtccgcaacggcaaggacatcgacgacgtccaccgcgtcatggacgaggaaggccgccgcctccccgtcatcgccaaggtcgaaaaaccccaggcggtcgagaacatcgacgacatcgtcgccgcattcgacggaatcatggtcgcccgcggcgacctcggcgtcgaaatgcccctcgaacacgtaccgatcgtgcagaagcgggccatcaagctcgccaaacgcaacgccaagccggtcatcgtcgccacccagatgctcgactcgatgatcgacaactcccgccccacccgcgccgaagcctccgacgtcgccaacgccgtcatcgacggcacggacgcggtgatgctctccggcgagacgagcgtcggcaaatacccggtcgaaaccgtccgcaccatggcccgcatcgtcatcgccgcagaagaggacgtcctcgccaagggcctccccccgctgaccgaccggaacaagccccgcacccagggcggcgccgtggcccgcgcggccgccgagatcggcgacttcctcggcgcgaagttcctcgtcgccttcacccagtccggcgacacggtcaagcgcctctcccgctaccgctcgccgatccccctcctcgccttcacccccgacccggcgacccgctcccaactcaacctcacgtggggcgtcgagaccttcctcggcccgcacgtcgattccaccgacgcgatggtcgcccaggtcgacgaggaactgctgcgcatcggccgctgcgagcggggcgacatcgtggtcatcacggccggctccccgccgggcgtcgcgggctcgaccaacctggtccgcgtgcaccgcatcggcgagagcctctag

SEQ ID NO: 475 - protein, 474 aa, Streptomyces pristinaespiralis ATCC 25486
MRRAKIVCTLGPATDTYEQIKALVDAGMDIARFNLSHGTYADHEERYHHVRKASDETGRSIGILADLQGPKIRLGRFREGPVLLERGDTFTITTEDIEGDRHTCGTTYQGLASDVTRGERILVDDGKVALEVTAVEGPRVTTTVVEGGMVSDHKGLNLPGVAVSVPALSEKDIEDLRWALGIGADIIALSFVRNGKDIDDVHRVMDEEGRRLPVIAKVEKPQAVENIDDIVAAFDGIMVARGDLGVEMPLEHVPIVQKRAIKLAKRNAKPVIVATQMLDSMIDNSRPTRAEASDVANAVIDGTDAVMLSGETSVGKYPVETVRTMARIVIAAEEDVLAKGLPPLTDRNKPRTQGGAVARAAAEIGDFLGAKFLVAFTQSGDTVKRLSRYRSPIPLLAFTPDPATRSQLNLTWGVETFLGPHVDSTDAMVAQVDEELLRIGRCERGDIVVITAGSPPGVAGSTNLVRVHRIGESL

SEQ ID NO: 476 - DNA, 1428 bp, Streptomyces pristinaespiralis ATCC 25486
  CDS (1)..(1428): transl_table=11
atgcgccgttccaaaatcgtctgcacactgggccccgccgtcgactcatacgagcagctgaaagcgctcatcgaggccggtatgaacgtggcccgtttcaacttcagccacgggacccacgccgaccacgaggagcggtaccaccgcgtccgtcaggtgtgcgaggacaccggccgcgccgtgggcgtgctggccgacctccagggccccaagatccgcctggagaccttcgccgagggaccggtcgaactggtccgcggcgacgagttcaccatcacgaccgaggacgtccccggagacaagtcgatctgcgggaccacctacaagggcctgcccggtgacgtctccaagggcgaccaggtcctcatcaacgacggcaacgtcgaactgcgcgtcgtcgaggtcgacggagcgcgggtcaagacgatcgtcgtcgagggcggcgtgatctccgaccacaagggcatcaaccttcccggcgcggccgtcaacgtgccggccctttccgagaaggacgtcgaggacctgcgcttcgcactgcgcatgggctgcgacatggtcgcgctctccttcgtccgtgacgcgagcgacgtcaaggacgtccacaaggtcatggacgaggagggccgccgcgtccccgtcatcgccaaggtggagaagccgcaggcggtcgagaacatgcaggacgtcgtcatggccttcgacggcgtgatggtggcccgcggcgacctcgcggtggagtacccgctcgagcgggtgcccatggtccagaagcgcctcatcgagctgtgccgccgcaacgccaagccggtgatcgtggcgacccagatgatggagtcgatgatcaccaactcccgcccgacccgtgccgaggcgtccgacgtcgcgaacgcgatcctggacggcgcggacgcggtcatgctctccgcggagtcgtcggtcggcgcgtacccgatcgagacggtcaagacgatgtcgaagatcgtcaccgcggcggaggaggaactgctctccaaggggctccagcccctggtccccggcaagaagccccgcacccagggcggttcggtcgcccgcgcggccgccgagatcgcggacttcctgggcggcaaggcgctgatcgcgttcaccaagtccggtgacacggcccgccgcctgtcccgctaccgcgccgagcagcccatcctcgccttcaccacggaccagtcgacgcgcaaccagctgacgctgagctggggcgtggagtccttcctcgcgcccttcgtggagacgacggacgcgatggtcgaactcgtcgacgcggagctgctcaagctccagcgctacaacgcgggcgacgtcatggtgatcacggccggctcgcctccgggcgtcccgggcacgacgaacatggtgcgcgtccaccacctcggcgaggcacgcggctga

SEQ ID NO: 477 - protein, 475 aa, Streptomyces pristinaespiralis ATCC 25486
MRRSKIVCTLGPAVDSYEQLKALIEAGMNVARFNFSHGTHADHEERYHRVRQVCEDTGRAVGVLADLQGPKIRLETFAEGPVELVRGDEFTITTEDVPGDKSICGTTYKGLPGDVSKGDQVLINDGNVELRVVEVDGARVKTIVVEGGVISDHKGINLPGAAVNVPALSEKDVEDLRFALRMGCDMVALSFVRDASDVKDVHKVMDEEGRRVPVIAKVEKPQAVENMQDVVMAFDGVMVARGDLAVEYPLERVPMVQKRLIELCRRNAKPVIVATQMMESMITNSRPTRAEASDVANAILDGADAVMLSAESSVGAYPIETVKTMSKIVTAAEEELLSKGLQPLVPGKKPRTQGGSVARAAAEIADFLGGKALIAFTKSGDTARRLSRYRAEQPILAFTTDQSTRNQLTLSWGVESFLAPFVETTDAMVELVDAELLKLQRYNAGDVMVITAGSPPGVPGTTNMVRVHHLGEARG

SEQ ID NO: 478 - DNA, 1410 bp, Oligotropha carboxidovorans OM5
  CDS (1)..(1410): transl_table=11
atgagccgcaatcggcgggcgaagatcgtagcgacgctgggtccggcgagctcctcgccagagatgatccggaagctctacgacgcgggcgtggatatgttccggctcaatttcagccacgggacgcatgaggatcatcgcgcccgctatgaagccatccgtgcagtcgagcgcgaggtcggcacgccgatcgcgatcctgcaggacctgcagggcccgaaaatccgcctcgggccgctggaaggtggcaagcgcgagctgaccaacggcagcaccgtgcgtttcgtctgcagtgccactgccaagggtaacgacctgccgctgccgcacaaggaagtgttcgatgcggtggtgccgggcaaccagcttctgatcgacgacggcaaggtgcggttgtccgctaccgatgtcggcacgggctatatcgatgcgaaggtgatctcgggcggcatcgtcagcgaccgcaagggcgtcaacctgccggacaccgtgctcgcgctgtcgccgattaccgacaaggatcgtgtcgatctcgctttcggtctcgagctcggcgtcgactgggtcgcgttctcgttcgtgcagcgcgcatccgatctgatcgaggcgcacacgctcgtcggcggccgcgccggcgtgatgtcgaagatcgagaagccggcagcgatgtcggtgatcgaggacatcgtggcgctgtcggattccatcatggtggcgcgcggcgatctcggcgttgaaattccgccggaagacgtgccgggtgcgcagaaggatctggtgcggctgtgccgcctcgccggcaagccggtgatcatcgcgacgcagatgctggagtcgatgatccacacgccgacgccgacgcgcgcggaatcctccgacgtcgcgactgcgatctatgacggctctgacgcggtgatgctgtctgcggaatcggcctccggccagtttccggtgcaggcggtcgagacgatggatcgcatcatccgccgcaccgagcagcacaaggcctatcgcaacatcatcgaggcgctgcaccccgaggtggagccgttgccacagcatgcgatttccgccgccgcggccgaggttgcgaagtcgatcggcgcggcctgcatcgtcgccttcacctcgagcggcaccacggcctaccgcatcgcgcggcagcgcccgccgacaccgatcctgagcgtgacgccgaacgaatccaccgcgcgccagcttgcctggctgtggggctcgaccagcattcgctccgacgagatttcgtcgtatgacgagatggtgagccatgcggttcagaacgccaagagcagcggccttgcgagcgatggcgattgtatcgtcgtggttgcgggcgtgcccttcggcaagtctggatcgaccaacaatctgcgggtcgtgaccgtctga

SEQ ID NO: 479 - protein, 469 aa, Oligotropha carboxidovorans OM5
MSRNRRAKIVATLGPASSSPEMIRKLYDAGVDMFRLNFSHGTHEDHRARYEAIRAVEREVGTPIAILQDLQGPKIRLGPLEGGKRELTNGSTVRFVCSATAKGNDLPLPHKEVFDAVVPGNQLLIDDGKVRLSATDVGTGYIDAKVISGGIVSDRKGVNLPDTVLALSPITDKDRVDLAFGLELGVDWVAFSFVQRASDLIEAHTLVGGRAGVMSKIEKPAAMSVIEDIVALSDSIMVARGDLGVEIPPEDVPGAQKDLVRLCRLAGKPVIIATQMLESMIHTPTPTRAESSDVATAIYDGSDAVMLSAESASGQFPVQAVETMDRIIRRTEQHKAYRNIIEALHPEVEPLPQHAISAAAAEVAKSIGAACIVAFTSSGTTAYRIARQRPPTPILSVTPNESTARQLAWLWGSTSIRSDEISSYDEMVSHAVQNAKSSGLASDGDCIVVVAGVPFGKSGSTNNLRVVTV

SEQ ID NO: 480 - DNA, 1746 bp, Dictyoglomus thermophilum H-6-12
  CDS (1)..(1746): transl_table=11
ttgctaagaagaacaaaaatagtatgtaccataggccctgccagtgaaagagaagaggttcttagggagttaataaaggcaggaatgaatgtggcaagactaaacttctcccatggtgaccacaacgtccatggcgaaagaataagattaataagaaaactctcagaagaattagaaactcctatacccattcttcaagaccttcaaggacccaaaataagagtgggcgaaatagaaaacgacaaggtattattaaaagataacgaagaaattgcactaaccccaaaagaaaccttaggaaacgaaaaactcatcttcgtaaattatccttatcttcttgaagatgtaaacattggagatagaattcttattgatgatggactcattgaacttaaagttatggataaaaaagaagataaattaatatgccacatagttcatgggggatatctttccagtagaaaaggagtaaattttccagactctacccttagagtatctcctcttactgaaaaagataaaagagatgtactatttggtatagagagaaaaatagatttcatagctctttcttttgtacaaagagcatctgacattttagaactaaaagagttccttgagcttcacgatgcaagaattccagttatagccaaaatagagaaaagagaggctgtaaataattttaaagaaatccttgaagtggctgatggaataatggtagcaagaggagaccttgccatagagatgtctaacgaagaagtccctctaatacaaaagagaataataagagagacaaggcttgctggaaaacctgtaataacagcaacccaaatgctaatttccatggtaagcaatcctacacctacaagagcagaggtcagtgatgtagccaatgcaatattagacggtactgatgccctaatgctgtcgaatgaaaccgccacaggaaagtatcctatagaaagtgtaaaaatgatggataaaattgctcgaagggtagaagaagaatttccatacgatagttttctccaggaatctaattgtcataagaacattaccgaagctataacttactctacatgccaaattgcaaaagaaatagaagcctcagccatagttacagcaacccatagtggttttactgcaagacatatctccaaatacagaccaaagtctcccatatttgccatcacccatttccctgaagtacaaagaaggcttaacttatcttggggagtcaccccactccttacagaagtcttctacaacactgacgagatgtttgaaaaatctacaaaaattctaatccaaaagaactatgtaaaaagaggagatactatagtaataactgcaggaatacctatgggaatctcaggcatgactaacctcataaaagtacatgtaataagcgatgttataggacaaggacatggacttgggggagaagctaaaaccgcaaaagtaattattgcaaagaatgcaaaagaagcaataagcaaagtaactgaagatgtaattctcttagttccaacctttgaagaggaattagaaataatattagataagctccaaggaataataatagaggatgaaaaaataccttccaccttaattgcgtggagaagtaaaggtataagtataatagtaggtgctaaaggtctatcagaaaagctaaaagataacgagataataaccatagatcccgaaagaggagtaatatatcgtggcgtggcaagagtatactaa

SEQ ID NO: 481 - protein, 581 aa, Dictyoglomus thermophilum H-6-12
MLRRTKIVCTIGPASEREEVLRELIKAGMNVARLNFSHGDHNVHGERIRLIRKLSEELETPIPILQDLQGPKIRVGEIENDKVLLKDNEEIALTPKETLGNEKLIFVNYPYLLEDVNIGDRILIDDGLIELKVMDKKEDKLICHIVHGGYLSSRKGVNFPDSTLRVSPLTEKDKRDVLFGIERKIDFIALSFVQRASDILELKEFLELHDARIPVIAKIEKREAVNNFKEILEVADGIMVARGDLAIEMSNEEVPLIQKRIIRETRLAGKPVITATQMLISMVSNPTPTRAEVSDVANAILDGTDALMLSNETATGKYPIESVKMMDKIARRVEEEFPYDSFLQESNCHKNITEAITYSTCQIAKEIEASAIVTATHSGFTARHISKYRPKSPIFAITHFPEVQRRLNLSWGVTPLLTEVFYNTDEMFEKSTKILIQKNYVKRGDTIVITAGIPMGISGMTNLIKVHVISDVIGQGHGLGGEAKTAKVIIAKNAKEAISKVTEDVILLVPTFEEELEIILDKLQGIIIEDEKIPSTLIAWRSKGISIIVGAKGLSEKLKDNEIITIDPERGVIYRGVARVY

SEQ ID NO: 482 - DNA, 1413 bp, Aliivibrio salmonicida LFI1238
  CDS (1)..(1413): transl_table=11
atgaaaaagaccaaaatcgtttgtacgattggcccaaaaactgaatcagtagaaaaactaactgaattagcaaatgctggcatgaacgtaatgcgccttaacttctcacacggcgatttccaagagcacggcaaccgtatcgataatcttcgtcaagtaatgaagaacacaggtaagcaacttgctatccttcttgatactaaaggtcctgaaatccgtactatcaaactagacaacggcaatgatgtcgctctagttgctggtcaagacttcacatttacaactgacgtttcagttgtaggtaataaagacgttgttgctgttacttacccaggttttgcaaaagatcttgttactggtaacactatccttgttgatgacggtctaattgaaatggaagtagtttcgactactgaaactgaagttaaatgtaaagttcttaacaacggtgacctaggcgaaaacaaaggtgttaaccttcctggtgtttcagttaagcttccagctctttctgaaaaagataaagctgaccttaaatttggttgtgagcaaggcgttgatttcgttgctgcatcttttattcgtaaagaagaagatgttaaagaaatccgtgctctacttgttgctaacggcggcgagcacatccaaatcatctctaagattgaaaaccaagaaggtgtagataacttcgattcaatcctagaagcttctgacggtattatggttgctcgtggtgatcttggtgttgaaatccctgttgaagaagtaatctttgcacagaagatgatgatcgagaaatgtaatcgcgcacgtaaagttgtaatcactgcaactcaaatgcttgattctatgatcaaaaacccacgtccaactcgcgcagaagcgggcgacgtagctaacgcaatccttgatggtacagatgcagtaatgctttctggtgagtctgcgaaaggtaaataccctatcgaagctgtgactatcatggcgacaatctgtgctcgtacagatgcagtattaaaagcagagcttagctctcgcctagacagcccacgtctacgtatcactgaagcggtatgtaaaggcgctgttgatacagcagagaaactaagtgcacctgtaatcgtagtagcgacagaagcgggtaaatcagctcgttctattcgtaaatacttcccaacagcaagaatcattgccgtaacgactaatactaagacagcagctcaactttgtctttctaaaggtattacaccaatggttgttgatgctatcgacagtactgacgcattctacctacgcggtaaagagttagctcttgagtctggtattggcgctaaaggcgatatcgttgttatggtttctggtgctctagtaccatcaggcacaactaacacagcatctgttcacgtattataa

SEQ ID NO: 483 - protein, 470 aa, Aliivibrio salmonicida LFI1238
MKKTKIVCTIGPKTESVEKLTELANAGMNVMRLNFSHGDFQEHGNRIDNLRQVMKNTGKQLAILLDTKGPEIRTIKLDNGNDVALVAGQDFTFTTDVSVVGNKDVVAVTYPGFAKDLVTGNTILVDDGLIEMEVVSTTETEVKCKVLNNGDLGENKGVNLPGVSVKLPALSEKDKADLKFGCEQGVDFVAASFIRKEEDVKEIRALLVANGGEHIQIISKIENQEGVDNFDSILEASDGIMVARGDLGVEIPVEEVIFAQKMMIEKCNRARKVVITATQMLDSMIKNPRPTRAEAGDVANAILDGTDAVMLSGESAKGKYPIEAVTIMATICARTDAVLKAELSSRLDSPRLRITEAVCKGAVDTAEKLSAPVIVVATEAGKSARSIRKYFPTARIIAVTTNTKTAAQLCLSKGITPMVVDAIDSTDAFYLRGKELALESGIGAKGDIVVMVSGALVPSGTTNTASVHVL

SEQ ID NO: 484 - DNA, 1800 bp, Anoxybacillus flavithermus WK1
  CDS (1)..(1800): transl_table=11
atggtatcgtttccatatgcaaagtgtaggagggtatttatgcgcaaaacgaaaattgtttgtacgatcggtcctgcgagtgaaagtgtagaaaaacttgtgcaattgattgaagcgggaatgaatgtggcccgtctcaacttttcccatggaagtcatgaagaacatgcagcgcgcattcgaaacattcgcgaagcggcaaaaatgacaggaaaaacagttgcgattttattggatacgaaaggtccagaaattcgtacgcataacatggaaaatggagcaattgagttaaaagtaggtgctgaagtcaccatttcaatgaaagaagtgcttggcacaccagaaaaattttcgattacttatgaaggactcatcgatgacgtacatgtcggttcaacgattttgttagacgacggactcattggtttagaagtattagctgttgacaaagaagcaaaagagatcaaaacaaaagtgttaaatggtggcgtgctgaaaaataaaaaaggcgtaaacgtcccaggagtaaaagtaaaactaccgggtattacggaaaaagatgcagaggacattcgctttggtattgaacaaggaattgatttcatcgccgcatcgttcgttcgacgcgcttccgacgtgcttgaaattcgcgaattgctcgaagcacataacgcattacacattcaaattatcccaaaaattgaaaaccaagaaggcgtagacaatattgatgaaattttagaagtggcagacggcttaatggttgcacgcggagatttaggcgttgaaattccagcagaagaagtgccacttgtccaaaaagagttaatcaaaaaatgtaatgcgcttggaaaaccagtcattacagcgacacaaatgcttgattcgatgcagcgcaatccacgtccaactcgtgcggaggcaagcgatgtggcgaacgccatttttgatggaacagatgcgattatgctctcaggtgaaacagcagcaggggcttatccagtcgaggcggtacaaacgatgcaccgaattgctctgcgcacagaacaagcgttacaatatcgcgacttattatcgaaacgaagcaaacagagcggcacgacgattacagatgcgatcggacaatcggttgctcacaccgcattaaacttagatgtcgcggcgattgtgacaccgacggtaagcgggcataccgcgcgtatgatttcaaaataccgtccaaaagcgccaattatcgctgttacatcgaatgaaggtgtttcgcgtaaattagcgctcgtttggggtgtttatccacgcgttgctcaacacgcaacgtcaacggatgaaatgcttgatattgctgtggaagcagctcttgatacaggcatcgtgaaacatggcgacctcgttgtcattacagcgggcgttccagtcggagaaacaggttcaacaaacttaatgaaagtgcatatgattggcgatatgattgcgaaagggcaagggattggccgtaaatcagcattcgggaaagttgttgtagccaaaacagcggaagaagcgcttgaaaagatgatagaaggcggcattttagttgctccagcaacggatgcagacatgatgaaagcgttagaaaaagctgcggcgatcattacagaagaaggcggcttaacaagccatgcggctgttgttggtttaagcttaggcattccggtcattgttggggtaaaccatgcgacagctattttaaaagatggacaagatatcacggtagatgcgagcttcggtgccatttatcgcggccatgcgagcgtgctataa

SEQ ID NO: 485 - protein, 599 aa, Anoxybacillus flavithermus WK1
MVSFPYAKCRRVFMRKTKIVCTIGPASESVEKLVQLIEAGMNVARLNFSHGSHEEHAARIRNIREAAKMTGKTVAILLDTKGPEIRTHNMENGAIELKVGAEVTISMKEVLGTPEKFSITYEGLIDDVHVGSTILLDDGLIGLEVLAVDKEAKEIKTKVLNGGVLKNKKGVNVPGVKVKLPGITEKDAEDIRFGIEQGIDFIAASFVRRASDVLEIRELLEAHNALHIQIIPKIENQEGVDNIDEILEVADGLMVARGDLGVEIPAEEVPLVQKELIKKCNALGKPVITATQMLDSMQRNPRPTRAEASDVANAIFDGTDAIMLSGETAAGAYPVEAVQTMHRIALRTEQALQYRDLLSKRSKQSGTTITDAIGQSVAHTALNLDVAAIVTPTVSGHTARMISKYRPKAPIIAVTSNEGVSRKLALVWGVYPRVAQHATSTDEMLDIAVEAALDTGIVKHGDLVVITAGVPVGETGSTNLMKVHMIGDMIAKGQGIGRKSAFGKVVVAKTAEEALEKMIEGGILVAPATDADMMKALEKAAAIITEEGGLTSHAAVVGLSLGIPVIVGVNHATAILKDGQDITVDASFGAIYRGHASVL

SEQ ID NO: 486 - DNA, 1758 bp, Bacillus cereus AH187
  CDS (1)..(1758): transl_table=11
atgcgtaaaactaaaattgtatgtactataggtcctgctagtgaaagtattgaaaaattagagcaattaatcgaagcaggtatgaacgttgctcgtttaaacttctctcatggtagccatgaagaacacggcgctcgtattaaaaacattcgtgaagcttcaaagaaaactggtaaaacagttggtatcttacttgatacaaaaggtccagaaatccgtactcacgacttcgtagacggacaagctgagcttgtaacaggtgcagaagtagttatttctactgagcaagtattaggtactgcagagaagttctctgtatcttatgctggtctttatgacgatgtaaacccaggttctcgtattctaatcgatgacggtcttatcgagctagaagtaatcgaaaaagctgacggaaacatccgtacaaaagttcttaacagcggaactgtaaaaaataaaaaaggtgttaacgtaccaaacgtaagcattaagcttcctggtatcactgaaaaagacgtaaaagatatcatcttcggtatcgagcaaaaagttgatttcatcgcagcttcattcgtacgtaaagcagctgacgtattagaaatccgtgaattactagaagagcataacgctcaatacatccaaatcgtaccaaaaatcgaaaaccaagagggtatcgacaacatcgattcaatcttagaggtttctgacggtttaatggtagctcgtggtgatatgggtgtagaaattccaccagaagaagtaccattagtacaaaaacgtctaatcaaaaaatgtaacgtgttaggtaaaccagttattactgcaacacaaatgttagattctatgcaacgtaacccacgtccaactcgtgcggaagcaagtgacgtagctaacgcaatcttcgatggtacagacgcaatcatgctttcaggtgaaacagctgctggacaatacccagtagaagcagtaacaatgatggctaacattgcagtacgtgttgaaaaatcattacaatatgaagatatgttcaaaaaacgtattaaagagttcactccaacaattacagatgcaattagccaatctgttgcgcatacagcacttgctcttgatgtagctgcaatcgtagctccaacagaaagtggatatactgcgaaaatgatctctaaataccgtccaaaatctccaatcgtagctgtaacatctgacgagcaagtaggacgtcgtcttgcacttgtttggggtgtacaagcatttatggctgagaagcgcgcagcttctactgacgaaatgttagatacagcgattcaaacaggtatggatgcaggtctaatcggacttggagacactgtagtaatcactgctggtgttccggttgctgaaactggtacaacaaacttaatgaaaatccacgttgttggtgaagaagttgctaaagggcaagggatcggtcgtaaagctgcaaaaggtaaagtagttgtagcgaaaacagctgctgaagctgtagaaaacgtaaacgaaggtgatatccttgttacaacaagcactgataaagatatgattcctgcaattgaaaaagctgctgctctagttgtagaagaaggcggcctaacaagccatgcggctgttgtaggtgtatcaatcggtattcctgttatcgttggtgtaaacggcgtaacagcaactttaaaaaatggccaagaagtaacagttgatgcagcacgcggaattgtttataatggacatgcggaagtgctataa

SEQ ID NO: 487 - protein, 585 aa, Bacillus cereus AH187
MRKTKIVCTIGPASESIEKLEQLIEAGMNVARLNFSHGSHEEHGARIKNIREASKKTGKTVGILLDTKGPEIRTHDFVDGQAELVTGAEVVISTEQVLGTAEKFSVSYAGLYDDVNPGSRILIDDGLIELEVIEKADGNIRTKVLNSGTVKNKKGVNVPNVSIKLPGITEKDVKDIIFGIEQKVDFIAASFVRKAADVLEIRELLEEHNAQYIQIVPKIENQEGIDNIDSILEVSDGLMVARGDMGVEIPPEEVPLVQKRLIKKCNVLGKPVITATQMLDSMQRNPRPTRAEASDVANAIFDGTDAIMLSGETAAGQYPVEAVTMMANIAVRVEKSLQYEDMFKKRIKEFTPTITDAISQSVAHTALALDVAAIVAPTESGYTAKMISKYRPKSPIVAVTSDEQVGRRLALVWGVQAFMAEKRAASTDEMLDTAIQTGMDAGLIGLGDTVVITAGVPVAETGTTNLMKIHVVGEEVAKGQGIGRKAAKGKVVVAKTAAEAVENVNEGDILVTTSTDKDMIPAIEKAAALVVEEGGLTSHAAVVGVSIGIPVIVGVNGVTATLKNGQEVTVDAARGIVYNGHAEVL

SEQ ID NO: 488 - DNA, 1746 bp, Dictyoglomus turgidum DSM 6724
  CDS (1)..(1746): transl_table=11
ttgttgagaaaaaccaaaatagtatgcactataggtcctgccagtgaaagagaagagattttaagagagttaataaaagcaggaatgaacgtagcaagattaaacttctcacatggagattacaatgtccatggtgaaagaataagactaataagaaagctctctgaagaattagaaactcctatacccattttacaagatctccaaggaccaaagataagagttggagaaatagaaaacgacaaggtatttctgaaagataatgaagagattgctcttacccctaaagaattagtaggaaatgaaaaattagtttctgtaagctatcctcaccttctcgaagatataaacataggagatagaattcttattgatgatggactcatagagcttaaagtcatagataaaaaagaagacaagttaatatgccacattatccatggaggctatatttctagtagaaaaggagtaaactttcctgattctacccttagagtttctcctcttactgaaaaggataaaaaagatgtactttttggaattgagaaaaaagtagactttatagctctttcctttgtacaaagagcttctgacattttagaattaaaagaattccttgaacttcacgatgctagaatccctgtgatagctaaaatagaaaaaagagaagcggtaaataatttcagagaaatccttgaagtagcagatgggataatggtagcaagaggagatcttgccatagaaatgtctaacgaagaagtaccactaatacaaaaaaagataataagagaaacaaggcttgctggaaaacctgtaataacagcaacccaaatgttaatatctatggtgaataatcctactccaacaagggcagaggtaagtgatgtggcaaatgcaatccttgatggtaccgatgcggtgatgctctctaatgaaactgccacaggaaaatatcctgtggaaagtgtacaaataatggataagattgcaagaagagtagaaaaagaattcccctatgatacctttcttcaagaatctaattgtcataaaaatatcactgaagcaataaccttttctacctgtcaaattgcaaaagaaattgaagcctctgcaatagttacagcaactcacagtggctttacagcaagacatatatcaaagtataggcccaaagctccaatctttgccatcactcattttcctgaggtccaaagaagacttaacctatcttggggagtcaccccccttcttacagaagtattctacaatactgatgaaatgtttgaaaaatccacaaaaatcttactgcaaaaaaattatgtaaaaagaggagataccatagtaataactgcaggaattcccatgggaatttcaggtatgactaatcttataaaggtacatgtgataagtgacgtaataggacaaggtcatggtcttggaggagaggctaaaactgccaaagtaattatcgctaaaaatgcaaaagaggcaataagcaaagtaacagaggatgtaatcctcttgattccaacttttgagaaagaattagaaattatattagacaaactccaaggaataataattgaggacgaaaagataccaccattcctaattccgtggagaagtaaaggtataagcataatagtgggtgctaaaaatttatcagaaaaattaaaagataatgagatcattactatagatccagaaagaggagtaatatatcgtggcgtggcaagaatatattaa

SEQ ID NO: 489 - protein, 581 aa, Dictyoglomus turgidum DSM 6724
MLRKTKIVCTIGPASEREEILRELIKAGMNVARLNFSHGDYNVHGERIRLIRKLSEELETPIPILQDLQGPKIRVGEIENDKVFLKDNEEIALTPKELVGNEKLVSVSYPHLLEDINIGDRILIDDGLIELKVIDKKEDKLICHIIHGGYISSRKGVNFPDSTLRVSPLTEKDKKDVLFGIEKKVDFIALSFVQRASDILELKEFLELHDARIPVIAKIEKREAVNNFREILEVADGIMVARGDLAIEMSNEEVPLIQKKIIRETRLAGKPVITATQMLISMVNNPTPTRAEVSDVANAILDGTDAVMLSNETATGKYPVESVQIMDKIARRVEKEFPYDTFLQESNCHKNITEAITFSTCQIAKEIEASAIVTATHSGFTARHISKYRPKAPIFAITHFPEVQRRLNLSWGVTPLLTEVFYNTDEMFEKSTKILLQKNYVKRGDTIVITAGIPMGISGMTNLIKVHVISDVIGQGHGLGGEAKTAKVIIAKNAKEAISKVTEDVILLIPTFEKELEIILDKLQGIIIEDEKIPPFLIPWRSKGISIIVGAKNLSEKLKDNEIITIDPERGVIYRGVARIY

SEQ ID NO: 490 - DNA, 1779 bp, Cyanothece sp. PCC 8801
  CDS (1)..(1779): transl_table=11
atgcaaccgcgacccctattccgtcgaaccaaaattgttgccactatcggccctgccacccaaaataaagaagtattacgacagttaattctagccggtgccacaaccctacgcctcaacttctcccacggcgatcatgactatcatcaacacagtatccgtctcattcgccaaaccgcttttgaacttaaccaacccgtagccattttgcaggacttacagggaccgaaaattcgtctcggtaaatttgcttgtcagtcaattaccctgaaaaatggtgatccctttattctcacgagtcgtaaggtagaatgcaccccagaaattagctacgtcagctatcgctacctaaccgatgaagtgcccgatgacgcaagaattttactcgatgacggcaaagtggaaatgcgggtagaaaaagtcgatcgcacccaacaagaattacactgtcgcgtagtggttggtggggttctctccagcaataaaggggtcaattttccaggggtctatctatcagtcaaagctttgacagacaaggacaaggaagatttgatgttcggtctggatcaaggcgttgattgggtagccttgagttttgtccgcaatccccaagatattcgagaaattaaagacttaatcaccaatgcagggaaagtcgttcccgtgatcgccaaaatcgaaaagcatgaggcgatcgaaaacatggaggacattctctccctctgtaatggcgtgatggtggctaggggtgacttaggggtggaattgccggccgaagatgtgcccatcctgcaaaaacgcttgattatgacggcgaataagttaggtattcccgtcattactgctacccaaatgctagacagcatggttaataatcctcgtcccactcgcgcggaaatctccgatgtggctaatgctattcttgatggaaccgatgcggtcatgctgtccaatgaaaccgccgtcggtaaatatcccgtggaagccgtcgctaccatggctaccatcgcagaacggatggaacaggaacccttctccctaaaattctcctcccaacctaaaacatcggttactaatgccatttcttcggcagtgagtcaaattgcccaacaattagacgcagcagcaatcatgaccctgacaaaaacaggatcaaccgcccgtaatgtctcgaaatttcgcccaccgacccctattttagccgtcactccccatgtggatgtggctaggcagttacaattagtttggggggttaaacccctattagttctcgatttaccctccactagccaaaccttccagtcagcgattaatgtcgcccaagaaaatcagttagtcaacgatggtgatatcgtggtgatgaccgccggaaccctccaaggagtcgccggatcaacggatttaattaaggtagaaatggttaaagccattttgggtcaaggggtcggtatcggtcaaggatcagccagtggtcgtgcacgagtaggtcagcatccgaaggaattgggcaattttgaggccggagacattttagtcgttccccacaccaatgcggagtttgtggagatgatgcgaaaagcgtctggcattattaccgaagagtccagtctcaccagtcacgcggcggtaattggcatccgtttaggcattcctgttctcgttgccctcaaagatgctactcaaattatccgtgagggggcaattgtcactatagatgcccaaaaaggttatgtttattcaggcgcaatgacccgcagcaatggtaaaggggaattttga

SEQ ID NO: 491 - protein, 592 aa, Cyanothece sp. PCC 8801
MQPRPLFRRTKIVATIGPATQNKEVLRQLILAGATTLRLNFSHGDHDYHQHSIRLIRQTAFELNQPVAILQDLQGPKIRLGKFACQSITLKNGDPFILTSRKVECTPEISYVSYRYLTDEVPDDARILLDDGKVEMRVEKVDRTQQELHCRVVVGGVLSSNKGVNFPGVYLSVKALTDKDKEDLMFGLDQGVDWVALSFVRNPQDIREIKDLITNAGKVVPVIAKIEKHEAIENMEDILSLCNGVMVARGDLGVELPAEDVPILQKRLIMTANKLGIPVITATQMLDSMVNNPRPTRAEISDVANAILDGTDAVMLSNETAVGKYPVEAVATMATIAERMEQEPFSLKFSSQPKTSVTNAISSAVSQIAQQLDAAAIMTLTKTGSTARNVSKFRPPTPILAVTPHVDVARQLQLVWGVKPLLVLDLPSTSQTFQSAINVAQENQLVNDGDIVVMTAGTLQGVAGSTDLIKVEMVKAILGQGVGIGQGSASGRARVGQHPKELGNFEAGDILVVPHTNAEFVEMMRKASGIITEESSLTSHAAVIGIRLGIPVLVALKDATQIIREGAIVTIDAQKGYVYSGAMTRSNGKGEF

SEQ ID NO: 492 - DNA, 1806 bp, Cyanothece sp. PCC 7424
  CDS (1)..(1806): transl_table=11
atgcaaccacgcacactgccccgtcgaaccaagatagtggccaccattggaccggccagccaggataaggaaactctccgtcaactgattcaatccggtgctactacgtttcggctcaacttttctcacggaactcacgatgatcatcaacgcaatatccgcttgattcgtcaaacggcctttgaacttaatcaacccgttggcattttgcaagacttgcaagggccgaaaattcgactgggtaagtttgaatgtcaatctatctatctcaaacccggtgatccctttattatcaccagtcgtccccaagtcgagtgtaatcaacagattagttatgtcagttatgaatacctagcggaggaagtcccctgtggctctcgaattctgctagacgatggcaaagtggaaatgctcgtcgaaaacgttgatctccagcaaaaagatttacattgccgcgtcgttgttggtgggacactctcgagtaataaaggggttaactttccgggagtctacctctcagttaaagccttaaccgataaagacaaaaaagacctcgtctttggactcgatcaaggtgtagattgggttgctctgagctttgttcgcaatccccaggatattttagagattaaagacttaatcaccaatgccggtaaatccgttcccgtgattgccaaaattgaaaaacatgaagctatcaaagaaatggaggctattttatccttatgtgacggggtaatggtggcgagaggggatttaggggtagaattgccggctgaagacgttcctattttgcaaaaacgtctcattgtgaccgccaaccgtctcggcattcccattattaccgcgactcaaatgctcgatagtatggtcaataaccctcgtcctacaagggccgaagtctcagacgtagctaatgccattcttgatggaacggatgcagtcatgctctccaacgagacagcagtcgggaaataccccgtagaagcggtagcgactatggctaaaattgccgaacgcatcgaacaagaaaaagaacaattgacggctcggtcttatccgagtaataaacattctattcctaatgcgatctcttcggcggtgagtcaaattgctgaacaactcgaagcttcagccatcatgaccttaaccaaaagtggcgcgactgcccgcaatgtctctaaatttcgtcctaaaactccaattttagccgtaactccccatgtggatgtggccagacagttacagttagtttggggagttaaacctttattagtcctcgatttaccctccaccagtcagactttccaagccgctattaatgtggctcaagaaaattatctcctggttgatggggatttagtcgtcatgaccgccggaactcttcaaggggtttcaggctcgacagatttaattaaagtggaagtggtcaaggccattttaggtaaaggcattggcattggacaaggatcagtgagtggacgagctagagttgcccataaaccccaagacttaaatcattttgagccaggagaaattctagtggcatcctctaccaataaagaatttgtcgaggtcatgcgaaaagccgccgggattattactgaagaagcgagtctgaccagtcatgccgctattattggattacgcttaggcattcctgttattgttggcttgaataatgccactcagttaattcgtgaaggagcaattgttacccttgatgctcaacggggattagtttactcaggagcaatgaccagtagtttcttaaaaggcacagaggccaatttacccattccctaa

SEQ ID NO: 493 - protein, 601 aa, Cyanothece sp. PCC 7424
MQPRTLPRRTKIVATIGPASQDKETLRQLIQSGATTFRLNFSHGTHDDHQRNIRLIRQTAFELNQPVGILQDLQGPKIRLGKFECQSIYLKPGDPFIITSRPQVECNQQISYVSYEYLAEEVPCGSRILLDDGKVEMLVENVDLQQKDLHCRVVVGGTLSSNKGVNFPGVYLSVKALTDKDKKDLVFGLDQGVDWVALSFVRNPQDILEIKDLITNAGKSVPVIAKIEKHEAIKEMEAILSLCDGVMVARGDLGVELPAEDVPILQKRLIVTANRLGIPIITATQMLDSMVNNPRPTRAEVSDVANAILDGTDAVMLSNETAVGKYPVEAVATMAKIAERIEQEKEQLTARSYPSNKHSIPNAISSAVSQIAEQLEASAIMTLTKSGATARNVSKFRPKTPILAVTPHVDVARQLQLVWGVKPLLVLDLPSTSQTFQAAINVAQENYLLVDGDLVVMTAGTLQGVSGSTDLIKVEVVKAILGKGIGIGQGSVSGRARVAHKPQDLNHFEPGEILVASSTNKEFVEVMRKAAGIITEEASLTSHAAIIGLRLGIPVIVGLNNATQLIREGAIVTLDAQRGLVYSGAMTSSFLKGTEANLPIP

SEQ ID NO: 494 - DNA, 1413 bp, Escherichia fergusonii ATCC 35469
  CDS (1)..(1413): transl_table=11
atgaaaaagacgaaaattgtttgcacaatcggcccgaaaaccgaatcagaagagatgttaaccaagatgctcgacgcaggcatgaacgtcatgcgtctgaacttctctcacggtgattacgcagaacatggtcagcgcatccagaacttgcgcaacgttatgagcaaaaccggcaaacaagcagccatcctgctcgacaccaaaggcccggaaatccgtaccatcaaactggaaggcggtaatgacgtttccctgaaagcaggccagacctttactttcactactgataaatctgtggtgggtaacaatgagatcgttgcagtaacttacgaaggcctgacttccgacctgtctgttggcaacactgttctggtcgatgatggtctgattggcatggaagttaccgctattgaaggtaacaaagttatttgtaaagtgctgaacaacggcgatctgggcgaaaacaaaggtgtgaacctgcctggtgtttccattgccctgccagcactggctgaaaaagacaaacaggatctgatcttcggctgcgaacaaggcgttgactttgttgctgcttcctttattcgtaaacgctccgacgtagaagagattcgcgcacacctgaaagcgcacggcggcgaaaacatccagatcatctccaaaattgaaaaccaggaaggcctgaacaacttcgacgaaatcctcgaagcgtctgacggtatcatggttgcgcgtggcgacctgggtgttgaaatcccggttgaagaagttatcttcgctcagaagatgatgatcgaaaaatgtatccgtgcacgtaaagtcgttattactgcgactcaaatgctggattccatgatcaaaaacccacgaccaacccgcgcagaagcaggtgacgttgctaacgccattctggatggtactgacgcagttatgctgtctggtgaatccgcaaaaggcaagtatccgctggaagctgtttctattatggcgaccatttgtgaacgtactgatcgtgtaatgaccagccgtctggatttcaacaacgacagccgtaaactgcgtatcactgaagcagtttgccgtggtgcggttgaaacagcagaaaaactggatgccccgctgatcgttgtagcgacccagggcggtaaatctgcacgtgcggtgcgcaaatacttcccggatgcaaccatcctggcgctgaccaccaacgaaaaaactgcacatcagctggtgctgagcaaaggcgttgtgccacagttggtgaaagaaatcacctctactgatgacttctaccgtctgggtaaagaactggctctgcagagcggtctggctcagaaaggtgatgttgtggtcatggtttctggcgcactggtcccaagcggcacaaccaataccgcatctgttcacgtactgtaa

SEQ ID NO: 495 - protein, 470 aa, Escherichia fergusonii ATCC 35469
MKKTKIVCTIGPKTESEEMLTKMLDAGMNVMRLNFSHGDYAEHGQRIQNLRNVMSKTGKQAAILLDTKGPEIRTIKLEGGNDVSLKAGQTFTFTTDKSVVGNNEIVAVTYEGLTSDLSVGNTVLVDDGLIGMEVTAIEGNKVICKVLNNGDLGENKGVNLPGVSIALPALAEKDKQDLIFGCEQGVDFVAASFIRKRSDVEEIRAHLKAHGGENIQIISKIENQEGLNNFDEILEASDGIMVARGDLGVEIPVEEVIFAQKMMIEKCIRARKVVITATQMLDSMIKNPRPTRAEAGDVANAILDGTDAVMLSGESAKGKYPLEAVSIMATICERTDRVMTSRLDFNNDSRKLRITEAVCRGAVETAEKLDAPLIVVATQGGKSARAVRKYFPDATILALTTNEKTAHQLVLSKGVVPQLVKEITSTDDFYRLGKELALQSGLAQKGDVVVMVSGALVPSGTTNTASVHVL

SEQ ID NO: 496 - DNA, 1629 bp, Escherichia coli ED1a
  CDS (217)..(1629): transl_table=11
atggtttcagcactttggactgtagaactcaacgactcaaaaacaggcactcacgttgggctgagacacaagcacacattcctctgcacgctttttcgatgtcacctatccttagagcgaggcacaaccactttcgtaataccggattcgctttccggcagtgcgcccagaaagcaagtttctcccatccttctcaacttaaagactaagactgtcatgaaaaagaccaaaattgtttgcaccatcggaccgaaaaccgaatctgaagagatgttagctaaaatgctggacgctggcatgaacgttatgcgtctgaacttctctcatggtgactatgcagaacacggtcagcgcattcagaatctgcgcaacgtgatgagcaaaactggtaaaaccgccgctatcctgcttgataccaaaggtccagaaatccgcaccatgaaactggaaggcggtaacgacgtttctctgaaagcgggtcagtcctttactttcactactgataaatctgttatcggcaacagcgaaatggttgcggtaacgtatgaaggtttcactactgacctgtctgttggcaacaccgtactggttgacgacggtctgatcggtatggaagttaccgccattgaaggtaacaaagttatctgtaaagtgctgaacaatggcgacctgggcgaaaacaaaggtgtgaacctgcctggcgtttccattgccctgccagcactggctgaaaaagacaaacaggacctgatctttggttgcgaacaaggcgtagactttgttgctgcttcctttattcgtaagcgttctgacgttatcgaaatccgtgagcacctgaaagcgcacggcggcgaaaacatccacatcatctccaaaatcgaaaaccaggaaggcctcaacaacttcgacgaaatcctcgaagcctctgacggcatcatggttgcgcgtggcgacctgggtgtagaaatcccggtagaagaagttatcttcgcccagaagatgatgatcgaaaaatgtatccgtgcacgtaaagttgttatcactgcgacacagatgctggattccatgatcaaaaacccacgcccgactcgcgcagaagccggtgacgttgcaaacgccatcctcgacggtactgacgcagtgatgctgtctggtgaatccgcaaaaggtaaatacccgctggaagcggtttctatcatggcgaccatctgcgaacgtaccgaccgcgtgatgaacagccgtctcgagttcaacaatgacaaccgtaaactgcgtattaccgaagcggtatgccgtggtgccgttgaaactgctgaaaaactggatgctccactgatcgtggttgctactcagggcggtaaatctgctcgcgcagtacgtaaatacttcccggatgccaccatcctggcactgaccaccaacgaaaaaacggctcaccagttagtactgagcaaaggtgttgtgccgcagctggttaaagagatcacatctactgatgacttctaccgtctgggtaaagaactggctctgcagagcggtctggcacacaaaggtgatgtcgtagttatggtttctggtgcactggtaccgagcggcactactaacaccgcatctgttcacgtcctgtaa

SEQ ID NO: 497 - protein, 470 aa, Escherichia coli ED1a
MKKTKIVCTIGPKTESEEMLAKMLDAGMNVMRLNFSHGDYAEHGQRIQNLRNVMSKTGKTAAILLDTKGPEIRTMKLEGGNDVSLKAGQSFTFTTDKSVIGNSEMVAVTYEGFTTDLSVGNTVLVDDGLIGMEVTAIEGNKVICKVLNNGDLGENKGVNLPGVSIALPALAEKDKQDLIFGCEQGVDFVAASFIRKRSDVIEIREHLKAHGGENIHIISKIENQEGLNNFDEILEASDGIMVARGDLGVEIPVEEVIFAQKMMIEKCIRARKVVITATQMLDSMIKNPRPTRAEAGDVANAILDGTDAVMLSGESAKGKYPLEAVSIMATICERTDRVMNSRLEFNNDNRKLRITEAVCRGAVETAEKLDAPLIVVATQGGKSARAVRKYFPDATILALTTNEKTAHQLVLSKGVVPQLVKEITSTDDFYRLGKELALQSGLAHKGDVVVMVSGALVPSGTTNTASVHVL

SEQ ID NO: 498 - DNA, 1413 bp, Vibrio splendidus LGP32
  CDS (1)..(1413): transl_table=11
atgaaaaagaccaaaatcgtatgtacgattggccctaaaactgaatctgtagagaagctaactgaactagtagatgctggcatgaacgttatgcgtcttaacttctctcacggtgatttcgcagagcacggcactcgtatcgcgaacttccgtaaagtaatggaaaataatggtgagcaacttgcgatccttctagatactaaaggtccagaaatccgtactatcaaacttgaagatggtaacgacgtagatctagtagctggtcaagagttcactttcacaactgacgcaacagttgttggtaacaaagacgtagtagcagtaacttacctaggtttcgctaaggacctaacagcaggtaacactatccttgttgatgatggcctaatcgaaatggaagttatcgcaacaacagaaactgaagttaagtgtaaagttcttaacaacggtgctctaggcgaaaacaaaggtgttaacctgcctggcgtttctgttcaacttccagctctttctgagaaagacaaagctgaccttaagtttggttgcgagcaaggcgttgatttcgtagctgcttctttcattcgtaaagaagaagacgttaaagaaatccgtgagcttctaaacgctaacggcggcgagaacatccacatcatttctaagattgaaaaccaagaaggtgtagataacttcgattcaatccttgaagcttctgacggcatcatggttgctcgtggtgacctaggtgttgaaatcccagctgaagaagtaatcttcgctcagaagatgatgatcgagaagtgtaaccgcgcacgtaagatggttatcactgcaactcaaatgcttgactctatgatcagcaacccacgtccaactcgtgcagaagcgggtgacgttgcgaacgcaatcatggatggtactgatgcagtaatgctttctggtgaaactgctaaaggtaagtacccagttgaagctgttactatcatggctcaaatcgcgaaccgtactgattcagctcttaaagctgagctaggttctcgtctagacagcccacgtctacgcatcactgaagcagtatgtaaaggcgctgtagacacagcagagaagctagctgctcctctaatcgttgttgcaactgaaggcggtaagtctgcacgttcagtacgtaagtacttcccaactgcaaacatccttgctttaacaactaacgaaaagacagctgcacagctagttcttactaaaggtgttaagccagttcttgttgactctatcgagaacacagacgcgttctacatcaacggtaaagaaatcgctctacaatctggcctaggtaacaaaggcgacatcgtagttatggtttctggtgctctagtcgcttctggtactacaaacacagcatctgttcacgttctataa

SEQ ID NO: 499 - protein, 470 aa, Vibrio splendidus LGP32
MKKTKIVCTIGPKTESVEKLTELVDAGMNVMRLNFSHGDFAEHGTRIANFRKVMENNGEQLAILLDTKGPEIRTIKLEDGNDVDLVAGQEFTFTTDATVVGNKDVVAVTYLGFAKDLTAGNTILVDDGLIEMEVIATTETEVKCKVLNNGALGENKGVNLPGVSVQLPALSEKDKADLKFGCEQGVDFVAASFIRKEEDVKEIRELLNANGGENIHIISKIENQEGVDNFDSILEASDGIMVARGDLGVEIPAEEVIFAQKMMIEKCNRARKMVITATQMLDSMISNPRPTRAEAGDVANAIMDGTDAVMLSGETAKGKYPVEAVTIMAQIANRTDSALKAELGSRLDSPRLRITEAVCKGAVDTAEKLAAPLIVVATEGGKSARSVRKYFPTANILALTTNEKTAAQLVLTKGVKPVLVDSIENTDAFYINGKEIALQSGLGNKGDIVVMVSGALVASGTTNTASVHVL

SEQ ID NO: 500 - DNA, 1398 bp, Desulfatibacillum alkenivorans AK-01
  CDS (1)..(1398): transl_table=11
atgccttacaccaaaattgtggccaccctggggcctgccagcgattcgccggaggtcatgagggccttgattaaaaacggcatgaacgtagccaggatcaacttcgcccacggcacgcacgaggagcacgccaaaaaaattgcagacctccgcgccatttccagtgaactgggcattcccgtcgccatcctgcaagacctgggaggccccaaaatccgggtgggcgacctgccgtccgaaggcgtcagcctcaaggtcggggacttgttctgcctgtattcggaagaaggcaagggcgataaaagaggagtttccgtaacctatccggagcttcccgacgaagtggaaaccggcgaccccattttgttggccgacggccttctggaactggaagtggttgacgccagacccacttgcgtggaatgccgggtggttacgggcggcgtccttacctcacataaagggatcaacctgcccacgcgcaccttaaagacctccgccctgacggagaaggacatcaaggacctggatttcggcatggacgaaggcgtggactacgtgggcgtctcctttgtccggtccgccgcggacatccgcatggtcaaagatcggatgatcggccgccaggcgccggtcatcgccaaaatcgagaagcacgaggccatcgccaatatagacgaaattcttgaagtggccgacggaatcatggtggccaggggcgatttgggcgtggaagtccccctggaagaagttcccacttaccagaaaatactgatccgcaaggccaacgccctgggcaagccggtcatcaccgccacccagatgcttcggtccatggtggattctccgcggccaaccagggcggaagccacggacgtagccaacgcggttctggacggcacggacgcggtcatgctttcggaggaaaccgccatgggcgcctaccccattgaagccgtgcaatacatggcccgaatcgccaaaaaggcggaggaaaccttttcttacgaacaccgcttgaagcagcatccggaaaaagacatggccgactccgtggcccatgcttcctgcgttctggccgagcatttgggagcctccgccatcctggcggccacggcatccggcctgaccgccaagaaaatatcccatttcaggccccaaagaaagattgtggccttatctcccaacgagtcgacagtgcgggaattgtccttatattggggatgtacgccggtgttggtgtcgtcgcccaaagacacggacgcactgatcaattcatcggccagggcggccttggaccatggcctgattgcaaaaggagaccttgtggtaatcaccgcagggcatcctatcggaggggcgggcacgaccaatatgctgagggttatgcagctttga

SEQ ID NO: 501 - protein, 465 aa, Desulfatibacillum alkenivorans AK-01
MPYTKIVATLGPASDSPEVMRALIKNGMNVARINFAHGTHEEHAKKIADLRAISSELGIPVAILQDLGGPKIRVGDLPSEGVSLKVGDLFCLYSEEGKGDKRGVSVTYPELPDEVETGDPILLADGLLELEVVDARPTCVECRVVTGGVLTSHKGINLPTRTLKTSALTEKDIKDLDFGMDEGVDYVGVSFVRSAADIRMVKDRMIGRQAPVIAKIEKHEAIANIDEILEVADGIMVARGDLGVEVPLEEVPTYQKILIRKANALGKPVITATQMLRSMVDSPRPTRAEATDVANAVLDGTDAVMLSEETAMGAYPIEAVQYMARIAKKAEETFSYEHRLKQHPEKDMADSVAHASCVLAEHLGASAILAATASGLTAKKISHFRPQRKIVALSPNESTVRELSLYWGCTPVLVSSPKDTDALINSSARAALDHGLIAKGDLVVITAGHPIGGAGTTNMLRVMQL

SEQ ID NO: 502 - DNA, 1758 bp, Bacillus cereus G9842
  CDS (1)..(1758): transl_table=11
atgcgtaaaactaaaattgtatgtactataggtcctgctagtgaaagtattgaaaaattagagcaattaatcgaagcaggtatgaacgttgctcgtttaaacttctctcatggtagccatgaagagcacggagctcgtattaaaaacattcgtgaagcttcaaagaaaactggtaaaacagttggtatcttacttgatacaaaaggtccagaaatccgtactcacgacttcgtagacggacaagctgagcttgtaacaggtgcagaagtagttctttctactgagcaagtattaggtactgcagagaagttctctgtatcttatgctggtctttatgacgatgtagacccaggttctcgcattctaatcgatgacggtcttatcgaactagaagtaatcgaaaaagctgatggaaacatccgtacaaaagttcttaacagcggaactgtaaaaaataaaaaaggtgttaacgtaccaaacgtaagcattaagcttcctggtatcactgaaaaagacgtaaaagatatcatcttcggtatcgagcaaaaagttgatttcatcgcagcttcattcgtacgtaaagcgtctgacgtattagaaatccgtgaattattagaagagcatggtgctcaatacatccaaatcgtaccgaaaatcgaaaaccaagaaggtatcgacaacatcgattcaatcttagaagtttctgacggtttaatggtagctcgtggtgatatgggtgtagaaattccaccagaagaagtaccattagtacaaaaacgtctaatcaaaaaatgtaacgtgttaggtaaaccagttattactgcgacacaaatgttagactctatgcaacgtaacccacgtccaactcgtgcggaagcaagtgacgtagctaacgcaatcttcgatggtacagatgcaatcatgctttcaggtgaaacagctgctggtcaatatccggtagaagcagtaacaatgatggctaacattgcagtacgtgttgaaaaatcattacaatacgaagatatgttcaaaaaacgtattaaagagttcactccaacaattacagatgcaattagccaatctgttgcgcatacagcacttgctcttgatgtagctgcaatcgtagctccaacagaaagtggacatactgcgaaaatgatctctaaataccgtccaaaatctccaattgtagctgtaacatctgacgagcaagtaggacgtcgtcttgcgcttgtttggggtgtacaagcgtttatggctgagaagcgcgcagcttcaactgacgaaatgttagatacagcaattcaaacaggtatggatgcaggtctaatcggacttggagatactgtagtaattactgctggtgttccagttgctgaaactggaacaacaaacttaatgaaaatccacgttgttggtgaagaagttgctaaaggacaaggaatcggtcgtaaagctgcaaaaggtaaagtagttgtagcaaaaacagctgctgaagctgtagcgaacgtaaacgaaggtgatatccttgttacaacaagtactgataaagatatgattcctgcaatcgaaaaagctgctgctttagttgtagaagaaggtggcttaacaagccatgcggctgttgtaggcgtatcaatcggtattcctgttatcgttggtgtaaacggcgtaacagcaactttaaaaaatggccaagaagtaacagttgatgcagcacgcggaattgtttataatggacatgcggaagtgctataa

SEQ ID NO: 503 - protein, 585 aa, Bacillus cereus G9842
MRKTKIVCTIGPASESIEKLEQLIEAGMNVARLNFSHGSHEEHGARIKNIREASKKTGKTVGILLDTKGPEIRTHDFVDGQAELVTGAEVVLSTEQVLGTAEKFSVSYAGLYDDVDPGSRILIDDGLIELEVIEKADGNIRTKVLNSGTVKNKKGVNVPNVSIKLPGITEKDVKDIIFGIEQKVDFIAASFVRKASDVLEIRELLEEHGAQYIQIVPKIENQEGIDNIDSILEVSDGLMVARGDMGVEIPPEEVPLVQKRLIKKCNVLGKPVITATQMLDSMQRNPRPTRAEASDVANAIFDGTDAIMLSGETAAGQYPVEAVTMMANIAVRVEKSLQYEDMFKKRIKEFTPTITDAISQSVAHTALALDVAAIVAPTESGHTAKMISKYRPKSPIVAVTSDEQVGRRLALVWGVQAFMAEKRAASTDEMLDTAIQTGMDAGLIGLGDTVVITAGVPVAETGTTNLMKIHVVGEEVAKGQGIGRKAAKGKVVVAKTAAEAVANVNEGDILVTTSTDKDMIPAIEKAAALVVEEGGLTSHAAVVGVSIGIPVIVGVNGVTATLKNGQEVTVDAARGIVYNGHAEVL

SEQ ID NO: 504 - DNA, 1425 bp, Unknown
  Unidentified
  CDS (1)..(1425)
atgcgtcggacaaaaattgttgctacgcttgggccggcgacgagtacccccgaacggatcgccggattgattcgtgccggaatgaacgtggcccgtctcaacttctcacatggtactcatgccgaacacgcagcgcggattgcgatggtgcgacgagcggctgccgaagccggtcgctatgtcgctattctccaagatttacaaggaccgaagattcgcaccgggccactgattaacggtcagccggtcgagctggttgccggtcagcgctttgtaatcacgaccgaaccgatcgtcggtgatgctcagcgcgtcagtaccacctaccgggccttaccactcgatgtgcggccacgagaccggattttgttgtcggatgggttaatcgagctggtggtcatcaaccataccgacactgaagttgagaccgaggtcgtgcatggtggaaagttacgcgaacatcagggcatcaatttgccgggtgtacgggtcagtgcgccggccgcgaccgagaaagatcttgccgatctcgcctttggtctcgaacagggtgtggatttcgtggcgttgtcgtttgtccgccgcgccagtgacgtgcgtgaggtgaaggagttcattcgtcgagccggaaaacaaacgccggtcattgccaagattgaacgaccggaggcgcttgaagttttacctgagatcttagccgaagctgacgggattatggtggcccgtggtgatcttggtgtcgaaatgccacccgaacgggtaccgattgtacagaagcagattatcgctgcggctaatctagcgatgttgcccgtcattaccgccactcagatgctcgagtcgatgattcacaacccacgaccaactcgcgctgaagcgagcgatgtggcgaatgcgattctcgacggtaccgacgccgtgatgctcagcggtgagacggcagccggtgcgtacccgattgaagccgtacagatgatggcgctgattgccgatgctgtcgagtcatcgttgagcggtaatcattcacacacaacaccgcgctggtcggttgtgtcttcacaatcaactccacgtgcaattgctgctgcggcgtgtactattgcgagtaccttgccggtgcgctttatcgtggtgctcacccagagcggcgcaagtgctcggctcgtctcccactaccggcctgaagtgccgatcctcgccttctgcccgaccgaagagacggcacgccgcacgagtctctactggggtgtgacgcccattgtgattgaggcgcgtgaccgactcgacgaactggaacagcagatcgtgcggatgatgcgtaatatggggatggcccggcgcggtgatttgatcgtcctgagtggcgggcatccggtgtatcgctacgggccaaccaactttttaaaggtcattacgattgaataa

SEQ ID NO: 505 - protein, 474 aa, Unknown
  Unidentified
MRRTKIVATLGPATSTPERIAGLIRAGMNVARLNFSHGTHAEHAARIAMVRRAAAEAGRYVAILQDLQGPKIRTGPLINGQPVELVAGQRFVITTEPIVGDAQRVSTTYRALPLDVRPRDRILLSDGLIELVVINHTDTEVETEVVHGGKLREHQGINLPGVRVSAPAATEKDLADLAFGLEQGVDFVALSFVRRASDVREVKEFIRRAGKQTPVIAKIERPEALEVLPEILAEADGIMVARGDLGVEMPPERVPIVQKQIIAAANLAMLPVITATQMLESMIHNPRPTRAEASDVANAILDGTDAVMLSGETAAGAYPIEAVQMMALIADAVESSLSGNHSHTTPRWSVVSSQSTPRAIAAAACTIASTLPVRFIVVLTQSGASARLVSHYRPEVPILAFCPTEETARRTSLYWGVTPIVIEARDRLDELEQQIVRMMRNMGMARRGDLIVLSGGHPVYRYGPTNFLKVITIE

SEQ ID NO: 506 - DNA, 1425 bp, Thermus thermophilus HB27
  CDS (1)..(1425): transl_table=11
atgccgccttttaagcgcaccaagatcgtggccaccctggggccggccacggacgacaaggaggtgatccgcgccctggcggaggccggggccgacgtcttccgcctgaacttcagccacggcgcccccgaggaccacaggcgccgggtgggctgggtgcgggaggtggcggaggagctcggccgaaccctggccgtcctccaggacctccagggcccgaagatccgtgtgggccgtttccgggagggccaggtcctcctccgcccggggcagaggttcgtcctcaccgccgagcccgtggagggggacgagcaccgcgtttccgtgagctacaaggggcttcccgaggacgtttccccggggcagatcctccttctggacgacggccgcatccggctcaaggtcctggaggtccggagcccggagatcctcacggaggtggaggtgggcggggtcctctccaacaacaaggggatcaacatccccggggcggacctctccatccccgccctctcggagaaggatatccaggacctggccctgggggcggagctcggggtggactgggtggcggtctccttcgtccgcacgcgggacgacctcctcctcgcccggcactacctctcccgctacggctccaaggccaggctcatggccaagatcgagaagccctcggccgtggcccggtttgaggagatcctggaggaggcggacgggatcatggtggcccggggggacctcggggtggagatgcccctggaggaggtgcccatcgtccagaagcgcctcatcctccggtgcatcgccgccgggaagccggtgatcaccgccacccagatgctggagtccatggtgcagaacccgagccccacccgggccgaggcctcggacgtggccaacgccatctttgacgggaccgacgcggtgatgctctccgcggagacggcggccggggcctacccggtggaggcggtggccatgatgagcaggatcgccaaggcggtggaatcctccccggagttcttgcagaagctcaacgtcctccgccccgcccccacccccaccacccaggacgccatcgcccaggcggcggacgacgtggtggaggcggtgggggcacgggccatcgtggtcttcacggccacgggcggctcggcgcggaggatcgcccgcacccggccccaggtgcccatcctggccctcaccccgaaccccgaggtgcggaaccagctggccttggtctggggggtctacccccatctcgcccccgacccccaggacaccgacgacatggtccgcatcgccctcagggaggtgaaagccctggggctcgcccaggtgggggaccgggtggtcatcgccgccggggttcccttcggggtccgggggacaacgaacctcatccgcgtggagcgggtggggtag

SEQ ID NO: 507 - protein, 474 aa, Thermus thermophilus HB27
MPPFKRTKIVATLGPATDDKEVIRALAEAGADVFRLNFSHGAPEDHRRRVGWVREVAEELGRTLAVLQDLQGPKIRVGRFREGQVLLRPGQRFVLTAEPVEGDEHRVSVSYKGLPEDVSPGQILLLDDGRIRLKVLEVRSPEILTEVEVGGVLSNNKGINIPGADLSIPALSEKDIQDLALGAELGVDWVAVSFVRTRDDLLLARHYLSRYGSKARLMAKIEKPSAVARFEEILEEADGIMVARGDLGVEMPLEEVPIVQKRLILRCIAAGKPVITATQMLESMVQNPSPTRAEASDVANAIFDGTDAVMLSAETAAGAYPVEAVAMMSRIAKAVESSPEFLQKLNVLRPAPTPTTQDAIAQAADDVVEAVGARAIVVFTATGGSARRIARTRPQVPILALTPNPEVRNQLALVWGVYPHLAPDPQDTDDMVRIALREVKALGLAQVGDRVVIAAGVPFGVRGTTNLIRVERVG

SEQ ID NO: 508 - DNA, 1758 bp, Listeria monocytogenes str. 4b F2365
  CDS (1)..(1758): transl_table=11
atgaaaaaaacgaaaattgtttgtacaattggtcctgcaagtgagtcagttgacacattagttcagttgatcgaagcaggaatgaacgttgcacgtcttaatttctctcacggagattttgaagagcacggtgcgcgtattgtaaatatccgcgaagcatcgaaaaaaactggtaaacaagtggctatcttacttgatacaaaaggtccagaaatccgtacaaacgacatggtcggcggaaaattagaattccaaacaggtgatgttgtacgtgtttctatgactcctgttgaaggaacaaaagaaaaattctccgtgacttacggcgaactttacgatgatgtagaaattggttcttccattttacttgatgacggcttaatcggtcttgaagtaatcgaaaaagacgaagctaatcgcgaactagtaacaaaagtacttaacccaggtgtacttaaaaataaaaaaggtgttaacgtaccaaacgtttctatcaacctaccaggaatcacagaaaaagatgctgctgatatccgctttggtttagaacaaggtattgattttatcgctgcatctttcgtacgtcgtgctacagatgttcttgaaatcactaaaattctagaagagcacaatgcaactcacgtacaaatcattcctaaaatcgaaaaccaagaaggcgttgataatatcgacgaaatcttacaagtatctcaaggcctaatggttgctcgtggggaccttggtgttgaaattccagctgaagaagttccgattgtacaaaaagaacttatcagaaaatgtaataaacttggtaaacctgttattactgcaacacaaatgcttgattccatgcaacgtaacccacgtccaactcgcgctgaagcaagtgacgtagcgaatgcgatttttgatggaacagatgcaattatgttgtccggtgaaacagctgctggggattatccagtagaagcagttaaaatgatggcgaaaatcgctgttcgtacagaagaagtactagttgctcaagataaatttgcacttaaacttcacgaaaatacggatatgacagaagctatcggtcaagcagttggccatactgcgaaaaacctaaatgtacaaactattgttgctgcgactcaaagtggtcacacagcgcgtatgatctctaaataccgtcctaaatctcatatcgttgctgtaacattcaacgagcatgtataccgcggtttagcactttcatggggtgtttatcctcgcctagctactccagttagcaacacagatgaaatgttcgaccttgcagtgaaagaatctcttgcttctggcgttgcaaaacaaggcgacttaattatcatcactgctggtgttccagttactgaaagtggaacaacaaacgtaatgaaaatccaattaattggtgaaaaagttgttaaaggccaaggtattggcagcaaatctgttatcggtaaagcaatcgttgctaaatccaatgcagaagcacttgaaaaagcagaagaaggcggaatcttaatcgttaaaacaacggataaagaaatgctacctgcattcgagaaaagtgcagcagttgttgtggaagaaggcggcttgactagccacgcagcagttgtaggaatcaacctaggcattcctgtcatcgttggcgctaaagatgcaacatctcttgtaaaagacggtgaaatcattactgttgattctcgtcaaggtgttgtatataacggcaaaacagcaacacattaa

SEQ ID NO: 509 - protein, 585 aa, Listeria monocytogenes str. 4b F2365
MKKTKIVCTIGPASESVDTLVQLIEAGMNVARLNFSHGDFEEHGARIVNIREASKKTGKQVAILLDTKGPEIRTNDMVGGKLEFQTGDVVRVSMTPVEGTKEKFSVTYGELYDDVEIGSSILLDDGLIGLEVIEKDEANRELVTKVLNPGVLKNKKGVNVPNVSINLPGITEKDAADIRFGLEQGIDFIAASFVRRATDVLEITKILEEHNATHVQIIPKIENQEGVDNIDEILQVSQGLMVARGDLGVEIPAEEVPIVQKELIRKCNKLGKPVITATQMLDSMQRNPRPTRAEASDVANAIFDGTDAIMLSGETAAGDYPVEAVKMMAKIAVRTEEVLVAQDKFALKLHENTDMTEAIGQAVGHTAKNLNVQTIVAATQSGHTARMISKYRPKSHIVAVTFNEHVYRGLALSWGVYPRLATPVSNTDEMFDLAVKESLASGVAKQGDLIIITAGVPVTESGTTNVMKIQLIGEKVVKGQGIGSKSVIGKAIVAKSNAEALEKAEEGGILIVKTTDKEMLPAFEKSAAVVVEEGGLTSHAAVVGINLGIPVIVGAKDATSLVKDGEIITVDSRQGVVYNGKTATH

SEQ ID NO: 510 - DNA, 1758 bp, Staphylococcus aureus subsp. aureus MRSA252
  CDS (1)..(1758): transl_table=11
atgagaaaaactaaaattgtatgtacaattggaccagcttcagaatcagaagaaatgattgagaaattaatcaatgctggtatgaacgttgcacgattaaacttttcacatggtagtcatgaagagcataaaggtagaattgatacaattcgtaaagtagctaaaagattagacaaaattgtagcaattttattagatacgaaaggtccagaaattcgtacgcataatatgaaagacggtatcattgaacttgaacgtggtaacgaagttattgttagcatgaatgaagttgaaggaacacctgaaaagttctctgtaacttatgaaaacttaattaacgatgttcaagtaggttcatacattttacttgatgatggcttaattgaattacaagttaaagatattgaccatgctaaaaaagaagttaaatgtgatattttaaactctggtgagcttaaaaacaaaaaaggtgttaacttacctggtgtaagagttagtttacctggtattacagaaaaagatgctgaagatatccgtttcggtattaaagaaaatgttgacttcattgcagcaagtttcgtacgtcgtcctagtgatgttttagaaattcgtgaaattttagaagaacaaaaagctaacatttcagtattccctaaaattgaaaaccaagaaggtattgataatattgaggaaattcttgaagtgtctgatggtttaatggttgcacgtggtgacatgggtgttgaaatcccacctgaaaaagtaccaatggttcaaaaagatttaatcagacaatgtaacaaattaggtaaaccagttattacagctacacaaatgttagattctatgcaacgtaacccacgtgctacacgtgcagaagctagtgacgttgccaacgcaatctatgatggtacagatgcagtaatgttatctggtgaaactgctgctggtttatatcctgaagaagctgttaaaacaatgagaaatattgctgtatcagctgaagcagcccaagattacaaaaagttattgtcagatcgtactaaattagttgaaacttcattagtgaatgctatcggtatttcggttgcacatacagctttaaacttaaatgttaaagcaattgtagctgctactgaaagtggttcaacggcacgtactatctctaaatatcgtccgcattcagacattattgcagtgactccaagtgaagaaactgcacgtcaatgttcaattgtttggggtgttcaacctgtagttaaaaaaggacgtaagagtacagatgcattgttaaacaatgcagttgcaacagctgttgaaactggtagagtaactaatggtgatttaatcattattactgctggtgtaccaactggtgaaactggaactactaatatgatgaaaatccacctagttggtgacgaaattgctaatggtcaaggtattggacgtggatcagttgttggtactacgttagttgctgaaactgttaaagatttagaaggtaaagatttatctgacaaagttatcgttacaaactcaatcgatgaaacgtttgtaccttatgtagaaaaagcgttaggcttaattacagaagaaaatggaattacatcaccaagtgcaattgttggtttagaaaaaggtattccaacagttgtaggtgtagaaaaagctgttaaaaacataagcaataacgtgttagttacgattgatgctgctcaaggtaaaatctttgaaggatatgcaaacgtactataa

SEQ ID NO: 511 - protein, 585 aa, Staphylococcus aureus subsp. aureus MRSA252
MRKTKIVCTIGPASESEEMIEKLINAGMNVARLNFSHGSHEEHKGRIDTIRKVAKRLDKIVAILLDTKGPEIRTHNMKDGIIELERGNEVIVSMNEVEGTPEKFSVTYENLINDVQVGSYILLDDGLIELQVKDIDHAKKEVKCDILNSGELKNKKGVNLPGVRVSLPGITEKDAEDIRFGIKENVDFIAASFVRRPSDVLEIREILEEQKANISVFPKIENQEGIDNIEEILEVSDGLMVARGDMGVEIPPEKVPMVQKDLIRQCNKLGKPVITATQMLDSMQRNPRATRAEASDVANAIYDGTDAVMLSGETAAGLYPEEAVKTMRNIAVSAEAAQDYKKLLSDRTKLVETSLVNAIGISVAHTALNLNVKAIVAATESGSTARTISKYRPHSDIIAVTPSEETARQCSIVWGVQPVVKKGRKSTDALLNNAVATAVETGRVTNGDLIIITAGVPTGETGTTNMMKIHLVGDEIANGQGIGRGSVVGTTLVAETVKDLEGKDLSDKVIVTNSIDETFVPYVEKALGLITEENGITSPSAIVGLEKGIPTVVGVEKAVKNISNNVLVTIDAAQGKIFEGYANVL

SEQ ID NO: 512 - DNA, 1413 bp, Pectobacterium atrosepticum SCRI1043
  CDS (1)..(1413): transl_table=11
atgaaaaagacaaaaattgtttgtaccatcgggccgaaaacagagtcagaagaaatgcttggcaacctgctgtctgccggcatgaatgttatgcgcctgaacttctctcacggggattacgtagaacatggccaacgcatcaagaacctgcgtgccgtcatggaaaaaaccggtcagcaagcggcgatcctgcttgacaccaaaggcccagaaatccgcaccatgaagctggaaaacggcgctgacgtaacgttgaccgccggtcaaacgttcacgttcaccaccgatcagagcatcgtgggtaacaaagatcgtgtcgcagtcacttatgctggattcaccgaagacctcagcgtcggtaacaccgttctggttgatgacggtttgatcggtatgcaggttacagcggtcagcggtaacgacgtcgtttgtaaggtgctgaacaatggcgatctgggcgagaataaaggcgttaacctgccaggcgtttccatccagttacctgctctggctgaaaaagacaaacgcgacctgattttcggttgcgaacaaggtgtcgatttcgtcgcagcttcctttattcgtaaacgttccgacgttgaagaaattcgcgctcacctgaaagcacacggtggcgagcacatccagatcatttccaaaatcgaaaatcaggaaggtctgaacaatttcgacgaaattctggaagcgtctgacggcatcatggttgctcgtggcgacctgggcgttgagatcccagttgaagaagtgatcttcgcacagaaaatgatgatcgaaaaatgtaacctggctcgcaaagtggtgatcaccgcaacgcaaatgctggattcaatgatcaaaaacccacgtcctacccgtgctgaagctggcgacgtggctaacgccatcatcgacggtaccgatgccgttatgctgtctggcgaaagtgcgaaaggtaaatacccgctggaatccgttaccattatggcgacgatctgtcagcgcaccgattccgtgatgaaaagccgtctggataccatcaagacaccaggaatactgcgtatcactgaagccgtctgccgtggtgcagtagaaaccgcagaaaaactggatgcaccgctgattgtggttgcgaccagcggcggcaagtcagccaaatcgatccgtaaatacttcccgaatgcgcgcattctggcgctgacgactaacgaagtcaccgcgcgccagcttctgctgagcaaaggcattgatacgctgctggtgaaggaaatcgcctctactgatgatttctaccgcattggtaaagaagccgcgctgaagaccggtcatgcgcaagctggtgatgttgtggtgatggtatctggtgcactggtttccagcggcacaaccaacactgcttccgtacatcgtctctga

SEQ ID NO: 513 - protein, 470 aa, Pectobacterium atrosepticum SCRI1043
MKKTKIVCTIGPKTESEEMLGNLLSAGMNVMRLNFSHGDYVEHGQRIKNLRAVMEKTGQQAAILLDTKGPEIRTMKLENGADVTLTAGQTFTFTTDQSIVGNKDRVAVTYAGFTEDLSVGNTVLVDDGLIGMQVTAVSGNDVVCKVLNNGDLGENKGVNLPGVSIQLPALAEKDKRDLIFGCEQGVDFVAASFIRKRSDVEEIRAHLKAHGGEHIQIISKIENQEGLNNFDEILEASDGIMVARGDLGVEIPVEEVIFAQKMMIEKCNLARKVVITATQMLDSMIKNPRPTRAEAGDVANAIIDGTDAVMLSGESAKGKYPLESVTIMATICQRTDSVMKSRLDTIKTPGILRITEAVCRGAVETAEKLDAPLIVVATSGGKSAKSIRKYFPNARILALTTNEVTARQLLLSKGIDTLLVKEIASTDDFYRIGKEAALKTGHAQAGDVVVMVSGALVSSGTTNTASVHRL

SEQ ID NO: 514 - DNA, 1434 bp, Propionibacterium acnes KPA171202
  CDS (1)..(1434): transl_table=11
atgcgtagagctaagattgtgaatacccttgggcccgctgtgaccagccatgacgccatgaaggagctcatggaggctggcatgaatattgcccgtctcaacatgagccacggcgactactccgagcaccaggagcgtcttgacctggttcgctcggtctcgaaagagcttggtctcaacgtggcagccttggccgacctccaaggcccgaagatccgtaccggcctgttcgagaaggccgaaggagagtcgaacggcaagatcgacctcaagattggtgacaagttcactatcaccactgacgacattgtgggcaatcaggagcgcgtctccaccactttcaagggtctgccccaggactgcaagcccggcgacgtcatcctcatcgacgacggcaagaccgtcctccaggttgactctgtgagcggcaacgacgtcaattgtcactgcactgtcgctggcccggttggcgaccacaagggcatcaacctccccggtgttgccgtgtctattcccgccctcaccaaaaaggacgaggagaacctgcgctgggctctcaaagctggcatcgaccttgttgctctgtccttcgtccgacacggctctgacatcgaccgtgtccacgagattatggacgaggagggacgtaccgtccccgttatagccaagctcgagaagccgcaggctatcgagaacctggacgagattattgacgtctttgacgccgtcatggttgctcgtggcgatatggccgtcgagtgcccgctcgaggaggttccgctgatccaaaagcagatcatcgagaaggctcggttacaggctaagcccgtcatcgtggccacccagatgctcgagtcgatgatccacgctccccgcccgacccgcgctgaggccgccgacgtcgccaacgccatccttgacggcgccgacggcgtcatgacgtccgctgagaccagcgttggtgacttcccaggtgagactgtccgcaccatggccaagatcgttgagtctactgaggcccgtggcttggacaagatcgccaagatcgactgggatccgcacaccaccagtggcatcatgtcgaaggcagctgctgagatcgctgagcgcgccgaggccaagttcatcgtggcctttaccaagtccggtgacaccgcccgtcgtatcgctcgtctgcgtccgagcaccccgctcatcgttttcacctctgatgagaccacgaccaagaccctcgcctgggtctggggcgctcacgccgtcgttaccccggtgtttaagaatgcggaggagctgtaccgctgggttaacgcgtacctgcgcgacaagggtttcgtgccggtcggtgaccgcgtcgtcgtgttgtccggttccccgatggatattccgggtaagaccaacaatctgcgcatccttcgtatcaaggaagatgactga

SEQ ID NO: 515 - protein, 477 aa, Propionibacterium acnes KPA171202
MRRAKIVNTLGPAVTSHDAMKELMEAGMNIARLNMSHGDYSEHQERLDLVRSVSKELGLNVAALADLQGPKIRTGLFEKAEGESNGKIDLKIGDKFTITTDDIVGNQERVSTTFKGLPQDCKPGDVILIDDGKTVLQVDSVSGNDVNCHCTVAGPVGDHKGINLPGVAVSIPALTKKDEENLRWALKAGIDLVALSFVRHGSDIDRVHEIMDEEGRTVPVIAKLEKPQAIENLDEIIDVFDAVMVARGDMAVECPLEEVPLIQKQIIEKARLQAKPVIVATQMLESMIHAPRPTRAEAADVANAILDGADGVMTSAETSVGDFPGETVRTMAKIVESTEARGLDKIAKIDWDPHTTSGIMSKAAAEIAERAEAKFIVAFTKSGDTARRIARLRPSTPLIVFTSDETTTKTLAWVWGAHAVVTPVFKNAEELYRWVNAYLRDKGFVPVGDRVVVLSGSPMDIPGKTNNLRILRIKEDD

SEQ ID NO: 516 - DNA, 1467 bp, Leifsonia xyli subsp. xyli str. CTCB07
  CDS (1)..(1467): transl_table=11
atgagaagggcgaaaatcgtcgcgaccctcgggccggcgacctccagctatgacaacatccgcgccatcgtcgacgcgggcgtcgacgtggcccggatgaacctcagccacggcagctacgaggtgcatgagggggtctacgccaacgttcggaaggctgcggaggacgccggcaaaccggtcgcggtcctggtcgacctccaaggcccgaagattcgcctcggcaagttcgaggccggtccctacgaactcgccgagggcgatatcttcacgatcaccaccgaggaaatcatcggcaccaaggagatctcctccaccacgttcaaggggttgccccaggacgtgaagccgggtgacttcctgctgatcgacgacggaaaggtgcgcgtgcgcgtgctggagaccgatggcacggccgtaaccactgaggtggtcgtggccggtcccgtctccaacaacaagggcatcaaccttcccggtgtcgcggtgaacgtgcccgcgctgtccgagaaggacgaggccgacctccgctggggcctgaatctgggcgccgatctcatcgccctctcgttcgtgcgcaacgcgggggacatcgagcgcgtacacgagatcatggccgaggagggccgtaaggtccccgtcatcgccaagatcgagaagccgcaagccgttgacgctctggagggcatcatcgaggcgttcgacggcatcatggtcgcgcgtggcgacctgggcgtcgagttgccgctggaggcggtgccgatcgtgcagaagcgcgcggtcgaactcgcccgccgtgcggccaagccggtcatcgtcgcgacgcagatgctggagtcgatgatctcgagcccggtaccgacccgcgccgagacatccgacgtcgctaacgccgtcctcgatggctcggatgcggtcatgctctcgggggagaccagtgtcggcgagtacccgaagatcaccgttcagacgatggcgaagatcgtgaaatcgaccgaagagcacggtctcgaccggatcgccccgctcggcaccaagccgcgcacgcagtccggcgcgatcaccctggccgcgaccgaggtggcggacttcgtcgaggccaagtacctctgcgtgttcaccgagtccggcgagtcggcccgtcgcatggcgcgtctgcgcagcaagatccggatcctcgccttcacaccggaggagtcgacccgtcgcaagatggcgctctattggggcgtggagtccttcgtggtcgaccgggtcacccacaccgaccagatggtcgcgcaggtggacgaggcgctgaagtccacgggccgagcggagaacggcgacaaggtggtcatcatttccgggtcgcctcccgggattcctggcaccaccaacgacatccgcgtacaccgggtcggcgacgtcctgtgtagcgaaacgcagcgaagggcctcgcgcttcggggaccgctcccggctgtga

SEQ ID NO: 517 - protein, 488 aa, Leifsonia xyli subsp. xyli str. CTCB07
MRRAKIVATLGPATSSYDNIRAIVDAGVDVARMNLSHGSYEVHEGVYANVRKAAEDAGKPVAVLVDLQGPKIRLGKFEAGPYELAEGDIFTITTEEIIGTKEISSTTFKGLPQDVKPGDFLLIDDGKVRVRVLETDGTAVTTEVVVAGPVSNNKGINLPGVAVNVPALSEKDEADLRWGLNLGADLIALSFVRNAGDIERVHEIMAEEGRKVPVIAKIEKPQAVDALEGIIEAFDGIMVARGDLGVELPLEAVPIVQKRAVELARRAAKPVIVATQMLESMISSPVPTRAETSDVANAVLDGSDAVMLSGETSVGEYPKITVQTMAKIVKSTEEHGLDRIAPLGTKPRTQSGAITLAATEVADFVEAKYLCVFTESGESARRMARLRSKIRILAFTPEESTRRKMALYWGVESFVVDRVTHTDQMVAQVDEALKSTGRAENGDKVVIISGSPPGIPGTTNDIRVHRVGDVLCSETQRRASRFGDRSRL

SEQ ID NO: 518 - DNA, 1746 bp, Desulfotalea psychrophila LSv54
  CDS (1)..(1746): transl_table=11
atgaataaaacaaaaataattgccaccctagggccccagagccaaagcgtcgaggagatttattcccttattcaagcgggaatgaatgttgcacggataaacctttcccatggagatgctgaaagctacaagcatcttatcagtaatgtaaaagaggctcgcaagttagcagaaaaagataccgcgatcctacttgataaccgtggccctgaaattcgtgttagcgagatggaagaagatatacatctcgttgatggagaagagctagtcatcaccaacagagctgaaactgtttccccatcgcggatcactacaaattacccacagcttgcaggtgatgtccaggtaggttcacgcatccttctcgatgacggaaagctcgccctggaagtgcttgccattgaagatgaagaggtgatcacgaaagttattgccggcggaatcctcagtagtcgtaaacgtgttgccctccccgataacgaggttaacctgccctctttgtcagaaaaagacaaagaagatatcgccttcggagtcgaacaggatgttgatttcatcgctgcttcttttgttagacaggcaggtgatgtctgggcggtacgaaaaatcatcgaagataacggtggtgatcaggagatcattgccaagatcgagaaccgccagggagtaaacaatcttgatgaaatactgcaagcagccaacggaataatggtagctcggggtgatctaggcgttgaagtacccgccgaagaggtgcctattattcaaaaaagcatcatcaaagctgcaaacagactaggcaaacctgtaatcactgccacccagatgctcgaatcaatgatcacctgccccactcctaccagagccgaggcaaatgatgtaaccaacgctatcttcgatggcaccgatgcagtaatgctctccggcgaaacagccattggtaagtatcctgttcaggctgtagcctttcttgtccgctgtgcgacaatagctgagaatgccctggactatgatcatatcctggcaaatggcctgcagaaccgaagaccaacgatcaccgactctatctcctatgcaagttgtgcgacggcagcggatcttaaagcaaccgccatcattacggcaacaagctctggttccaccgctcgcatggtggccagatatcgccccaaggctcccgttattgccgtcagcccttcgcccagcaccattcgccaccttcaacttattcgcggggtaacccccctgctctgcaactttggttcctccatggatgagcagctggatcgagtcattcatgcagcaacccttgcagagcttattcataatggcgatttggtcattataaccgccggcatgcctcttggacccacagggacaaccaatatgcttaaggtacacacggtggcagatatttgcgttaccggccaggggattggggtcaagcatgcccagggtgccgtccgcattattcaagcagaagatgattggcaggatctccccgaacataccattgcggtagtatcctcaaccaatgaatccatgctgaaacatctcggtaaggtgcgtggaattattgcagaagcaccgggactcacctcacatgcggcaattgttggccgcgaactggggatccctgttatctgtaatgttaccaatgcccttatgctctttgaaaatgaccaggttatcaccattgatgggacaactggccatatctgttacggaagtacacaaaacacatga

SEQ ID NO: 519 - protein, 581 aa, Desulfotalea psychrophila LSv54
MNKTKIIATLGPQSQSVEEIYSLIQAGMNVARINLSHGDAESYKHLISNVKEARKLAEKDTAILLDNRGPEIRVSEMEEDIHLVDGEELVITNRAETVSPSRITTNYPQLAGDVQVGSRILLDDGKLALEVLAIEDEEVITKVIAGGILSSRKRVALPDNEVNLPSLSEKDKEDIAFGVEQDVDFIAASFVRQAGDVWAVRKIIEDNGGDQEIIAKIENRQGVNNLDEILQAANGIMVARGDLGVEVPAEEVPIIQKSIIKAANRLGKPVITATQMLESMITCPTPTRAEANDVTNAIFDGTDAVMLSGETAIGKYPVQAVAFLVRCATIAENALDYDHILANGLQNRRPTITDSISYASCATAADLKATAIITATSSGSTARMVARYRPKAPVIAVSPSPSTIRHLQLIRGVTPLLCNFGSSMDEQLDRVIHAATLAELIHNGDLVIITAGMPLGPTGTTNMLKVHTVADICVTGQGIGVKHAQGAVRIIQAEDDWQDLPEHTIAVVSSTNESMLKHLGKVRGIIAEAPGLTSHAAIVGRELGIPVICNVTNALMLFENDQVITIDGTTGHICYGSTQNT

SEQ ID NO: 520 - DNA, 1755 bp, Symbiobacterium thermophilum IAM 14863
  CDS (1)..(1755): transl_table=11
atgctgcgaaagacgaagatcgtggccaccatcggcccggccagcgagcaggtggaggtgctgacccggctgatcgaggcgggtgtcgatgtctgtcggctcaacttcagccacggcaccctcgacgagcagaggcgccggatcgagaacatccgtgaggccggccgccgggtgggcaaggacgtcgcgatcatgatcgacctgaaggggcccgagatccgcatcggaacgttcgagaacggcaaggtcacgctgcgggacggggacctcttcaccctgaccacggagccttgcgtcggcaaccaggagcgggtctgggtccagtaccccgggatcgttcacgacgtggccgagggcgggtacctgctgctggatgacggcaacctgacgttccaggcggtggaggtgacgcccaccgagatccgttgccgggtgatcgtcggcggcgtcctgtccgaccgcaagaaggtgaacctgcccggcacgaaggtctcgctgcccgcgctgtccgagaaggacatcgaggacatccgcttcggcgtcgagatgggcgtcgacttcgtggccggctcgttcatccggaaggcccaggacgtgctggagatccgccgggtgatcgaggaggcgggcggccaccagcagatcatctcgaaggtggagtcccaggaggggttcgacaacctggaggccatcctgcaggtctccgacggcctgatggtggcccgcggcgacctgggggtggaggtgcccaccgaagaggtgccgctgatgcagaagcggatgatcgagcgggccaatgccatgggcaagcccgtgatcaccgcgacgcagatgctggagtccatggtcaaccggccccgtccgacccgggccgaggcctccgacgtggccaacgcgatcatggacggcaccgacgccatcatgctgtcggcggagtccgccgccggcaagtacccggtggaggcggtgcggacgatggcgacgatcgcccgccgcaccgaggaggcgctggaccactcgcagctgatggcccgacgcggccgcttcggccggatggacagcgtcaccgaggccatctcccacgcgacggtgaccacggcccacgacctgggcgccacggccatcgtctcggccaccacctcgggctttaccgcccgtatggtgtccaagtaccgcccgggctgccccatcatcgccgtgaccccggatccgcgggtcgcgcggcagctgcggctggtctggggcgttttccccgtcgtcgagccggtggcctcgggcactgaggacctgacccagcgggccgtggaaggggccctggtttccgggctggtgaagaacggcgacctggtcgtcatcaccgccggtctgccggtgggggtgaagggcaccaccaacctgctgaaggtgcacacggtggcggacgtgctggcccagggtacgggcatcggccggcagccggtcacggggcgggccgtcatcgtgcggtccgaggaggacctggcccgcgtgcagcccggcgacatcctggtcagcaggctgaccgacgccgactgcgtccccgcgatggagcgggccgcggggatcatcacggaagagggcggcctgacctcgcacgcggcggtggccggcatctcgctgggcaagcccgtgatcgtgggcgccgagggcgccacccgccgcattcccgacggggcgatcatcacgatggacgtggcccatggcctggtcttgcgcggcgaggccaccgtcaagtaa

SEQ ID NO: 521 - protein, 584 aa, Symbiobacterium thermophilum IAM 14863
MLRKTKIVATIGPASEQVEVLTRLIEAGVDVCRLNFSHGTLDEQRRRIENIREAGRRVGKDVAIMIDLKGPEIRIGTFENGKVTLRDGDLFTLTTEPCVGNQERVWVQYPGIVHDVAEGGYLLLDDGNLTFQAVEVTPTEIRCRVIVGGVLSDRKKVNLPGTKVSLPALSEKDIEDIRFGVEMGVDFVAGSFIRKAQDVLEIRRVIEEAGGHQQIISKVESQEGFDNLEAILQVSDGLMVARGDLGVEVPTEEVPLMQKRMIERANAMGKPVITATQMLESMVNRPRPTRAEASDVANAIMDGTDAIMLSAESAAGKYPVEAVRTMATIARRTEEALDHSQLMARRGRFGRMDSVTEAISHATVTTAHDLGATAIVSATTSGFTARMVSKYRPGCPIIAVTPDPRVARQLRLVWGVFPVVEPVASGTEDLTQRAVEGALVSGLVKNGDLVVITAGLPVGVKGTTNLLKVHTVADVLAQGTGIGRQPVTGRAVIVRSEEDLARVQPGDILVSRLTDADCVPAMERAAGIITEEGGLTSHAAVAGISLGKPVIVGAEGATRRIPDGAIITMDVAHGLVLRGEATVK

SEQ ID NO: 522 - DNA, 1758 bp, Bacillus licheniformis ATCC 14580
  CDS (1)..(1758): transl_table=11
atgagaaagactaaaatagtttgtacaattggaccggccagcgaaagtgttgaaaagctcacccagctgatggaagccggaatgaacgtggcgcgcctgaacttttcccatggagatttcgaagagcacggcgcaagaattaaaaacattcgtgaagcagccggcaagctgggaaaagatatcggcatccttcttgacacgaaagggcctgaaatccgcacgcacacaatggaaaacggttcgatcgaactggcagcgggttctcagctgatcgtttcaatggacgaagtcatcggtacgcctgataaaatctcagttacatatgatgggttgattcacgatgtgtcagtcggttcaacgattttgcttgacgatggattggtcggacttgaagtcactgacataaacaaggacaagcgtgaaatcgtcacgaaagtgatgaacagcggaacgttgaaaaacaaaaaaggcgtgaatgtgccgggcgtcagcgtcaatcttccgggaattacggaaaaagatgcaaacgacatcgtattcggcatcgagcagggcgttgatttcatcgcggcatcctttgtgcgccgtccgtcggatgtccttgaaatccgcgaacttcttgaagagcacaatgcggcagatattcaaatcattccaaaaatcgaaaaccaggaaggcgttgacaacatcgatgccattcttgaagtatcagacggtctgatggttgcgcgtggagacctgggtgtagaaatccctgccgaagaagtgccgctcgttcaaaaagaactgatcaaaaaatgcaatgcgcttggcaagcctgtcatcacggctacccaaatgctcgacagcatgcagcgcaatccgcgcccgacacgcgcggaagcgagcgacgttgccaatgcgatctttgacggaactgacgcaatcatgctttcaggtgaaacggcagcgggaaattatcctgttgaagccgttcagacgatgcacaatatcgcttcccgttcagaagaagcgctcaaccataaaaagatcctttccgcacgaagcaagcaagtcagcatgtcaattacggatgcgatcggccaatctgtggcgcatacggcaatcaaccttgatgtgaatgccatcgtcacaccgacggaaagcggccatacggcgagaatgatttccaaatatcgcccgcaggcgccgattgtcgcagttacggtaaacgatgcggtgtcaagaaagctgtcacttgtgttcggggttttcgcaacaagcggacaaaaccacagctccactgacgaaatgcttgaaaaagcggtgcaaaaatctctcgatacaggcatcgtacgccacggcgacttgatcgttatcacggccggagctgtcggtgaagccggtacaacaaacttgatgaaagtgtatgttgtcggagacgtggtcgcaaaaggccagggcatcggacgcaaatccgcatttggtgaagtggtcatcgctcaaaacgcacaagaagcggccaaaaaaatgaaagatggcgccgttttagttacaaaaagcacggatcgtgacatgatggcatcccttgaaaaagcggctgcgctgattacggaagaaggcggcttaacaagccacgcggcagtcgtaggcttaagcctcggcatccctgtcatcgtcggaatggaaaatgcgacttccattctgaaagagggagaagacatcacggtcgactccgcccgcggagctgtatacaaaggacgtgcaagcgtgctttaa

SEQ ID NO: 523 - protein, 585 aa, Bacillus licheniformis ATCC 14580
MRKTKIVCTIGPASESVEKLTQLMEAGMNVARLNFSHGDFEEHGARIKNIREAAGKLGKDIGILLDTKGPEIRTHTMENGSIELAAGSQLIVSMDEVIGTPDKISVTYDGLIHDVSVGSTILLDDGLVGLEVTDINKDKREIVTKVMNSGTLKNKKGVNVPGVSVNLPGITEKDANDIVFGIEQGVDFIAASFVRRPSDVLEIRELLEEHNAADIQIIPKIENQEGVDNIDAILEVSDGLMVARGDLGVEIPAEEVPLVQKELIKKCNALGKPVITATQMLDSMQRNPRPTRAEASDVANAIFDGTDAIMLSGETAAGNYPVEAVQTMHNIASRSEEALNHKKILSARSKQVSMSITDAIGQSVAHTAINLDVNAIVTPTESGHTARMISKYRPQAPIVAVTVNDAVSRKLSLVFGVFATSGQNHSSTDEMLEKAVQKSLDTGIVRHGDLIVITAGAVGEAGTTNLMKVYVVGDVVAKGQGIGRKSAFGEVVIAQNAQEAAKKMKDGAVLVTKSTDRDMMASLEKAAALITEEGGLTSHAAVVGLSLGIPVIVGMENATSILKEGEDITVDSARGAVYKGRASVL

SEQ ID NO: 524 - DNA, 1422 bp, Nocardia farcinica IFM 10152
  CDS (1)..(1422): transl_table=11
atgatgcgacggacgaagattgtgtgcacgctcggaccggccactgccaccgaggaccgtatccgcgaactcgtcgagagcggcatggacgtcgcgcggctgaatttcagccacggcgagcacagcgaccatgccgagaactacaagaaggtccgccaggcctccgaccatctcggccgtgcggtcggcattctcgccgacctacagggccccaagatccgcctcggccgcttcgccgagggccgcacggtgtgggcgaccggggaggaggtccgcatcacggtcgacgacatcgacggctcccacgatcgggtctccaccacctacaagcagctggcccaggacgccaagcccggcgaccggctgctcgtcgacgacggcaaggtcggactcaccgtcacccgcgtcgagggcaacgacgtggtgtgccgggtgaccgagggcggcccggtgtccaacaacaagggcgtgtcgctgcccggcatggacgtctcggtgcccgcgctgtcggacaaggacatcgaggatctggaattcgcgctcgacctgggcgtcgacttcatcgcgctgtcgttcgtgcgctcgcccgccgacgtcgagctggtgcacgacgtgatggacaaggtcggccggcgggtgccggtgatcggcaagctggagaagcccgaggccatcgacaacctggaggccatcgtgctggccttcgacgcgatcatggtcgcccgcggcgatctgggcgtggagctgccgctcgagcaggtgccgctggtgcagaagcgcgcgatccagatggcgcgcgagaacgccaagccggtcatcgtcgccacccagatgctggaatcgatgatcgagaacagccgcccgacccgcgccgaggcctccgacgtggccaacgcggtgctcgacggcgccgacgcggtgatgctgtccggcgagacctcggtgggcgcgttcccgatcgagaccgtccgcaccatggcccgcatcgtgcacgcggtggaggccgaatcctcgacgcgggtgccgccgctgacccacgtgccgcgcaccaagcgcggcgtcatctcctacgccgcccgtgacatcggcgaacggctcaacgccaaggcgctcgtggcgttcacccaatccggtgacacggtgcgccggctggcccggctgcacacgccgctgccgctgctggcgttcaccccgctgcccgaggtgcgcagccagctggcgctgacctggggtaccgagaccttcatcgtgccgaccgtggacagcaccgacgcgatgatccaccaggtcgaccaggcgctgctgtcgatggggcgctacagcaagggtgatctcgtggtgatcgtggcgggctccccgcccggtactgtcggttccaccaacctgatccacgtgcaccgcatcggtgaggaggaccattag

SEQ ID NO: 525 - protein, 473 aa, Nocardia farcinica IFM 10152
MMRRTKIVCTLGPATATEDRIRELVESGMDVARLNFSHGEHSDHAENYKKVRQASDHLGRAVGILADLQGPKIRLGRFAEGRTVWATGEEVRITVDDIDGSHDRVSTTYKQLAQDAKPGDRLLVDDGKVGLTVTRVEGNDVVCRVTEGGPVSNNKGVSLPGMDVSVPALSDKDIEDLEFALDLGVDFIALSFVRSPADVELVHDVMDKVGRRVPVIGKLEKPEAIDNLEAIVLAFDAIMVARGDLGVELPLEQVPLVQKRAIQMARENAKPVIVATQMLESMIENSRPTRAEASDVANAVLDGADAVMLSGETSVGAFPIETVRTMARIVHAVEAESSTRVPPLTHVPRTKRGVISYAARDIGERLNAKALVAFTQSGDTVRRLARLHTPLPLLAFTPLPEVRSQLALTWGTETFIVPTVDSTDAMIHQVDQALLSMGRYSKGDLVVIVAGSPPGTVGSTNLIHVHRIGEEDH

SEQ ID NO: 526 - DNA, 1413 bp, Photobacterium profundum SS9
  CDS (1)..(1413): transl_table=11
atgaaaaagaccaagatcgtatgtacgattggaccaaaaactgaatctgtagaaatgctgactaaactagctaacgctggtatgaacgtaatgcgtttaaacttctctcacggtaacttcgaagaacacggtcaacgtatcgtaaacctacgtgaagtaatggctacatctgctcagcctctagctatcttgctagatactaaaggtcctgaaattcgtactatcaaactagaaaatggcgaagatttcgctctagttgctggtcaagaattcacattcacaactgatattacagttgttggcaaccaagaccgcgttgcagtaacttacccaggtttcgctaaagaccttactaaaggtaacatcatccttgttgatgatggtcttatcgaaatggaagtactagaaacaactgaaactgaagttaagtgtaaagtacttaacaacggtgaccttggtgaaaacaaaggtgttaacctacctggtgtttctgtaaagcttcctgctctttctgaaaaagataaagcagacctagtattcggttgtgagcaaggcgttgatttcgttgctgcatctttcattcgtaaagaagatgatgttaaagaaatccgtgctctacttgctgctaacggtggcgagaagattcaaatcatctctaaaatcgaaaaccaggaaggcgttgataactttgactctatcctagaagcttctgacggtatcatggttgctcgtggcgaccttggtgttgaaatcccagtagaagaagttatctttgctcagaagatgatgatcgagaaatgtaatcgcgcacgtaaagttgttatcactgcaactcaaatgcttgattctatgattaagaacccacgtccgactcgcgcagaagcgggtgacgttgcaaacgcaatcatggatggtactgatgcagtcatgctatctggtgaatcagctaagggtaaatacccaattgaagctgtaactatcatggctcaaatctgtaaccgtacagattcagcgttaaaagcagaattaggttctcgcctagacagctctcgtctacgtattactgaagctgtatgtaaaggcgcagtagacacttcagagaagctaaatgctcctctaattgttgttgctactgaagcgggtaaatctgctcgctctatccgtaagtacttcccaacagcgaaaattattgctgtaactacaaaccagaaaacagctgctcagctttgtctaacgaaaggtgttacacctatcgttgttgatgctatcgacaacactgatgcattctacagtcgcggtaaagaaatcgcgctagaaactggtcttggcgctaaaggcgatatcgttgttatggtatctggcgcactagttccttctggtacaactaacacagcttctgtacacgtactttaa

SEQ ID NO: 527 - protein, 470 aa, Photobacterium profundum SS9
MKKTKIVCTIGPKTESVEMLTKLANAGMNVMRLNFSHGNFEEHGQRIVNLREVMATSAQPLAILLDTKGPEIRTIKLENGEDFALVAGQEFTFTTDITVVGNQDRVAVTYPGFAKDLTKGNIILVDDGLIEMEVLETTETEVKCKVLNNGDLGENKGVNLPGVSVKLPALSEKDKADLVFGCEQGVDFVAASFIRKEDDVKEIRALLAANGGEKIQIISKIENQEGVDNFDSILEASDGIMVARGDLGVEIPVEEVIFAQKMMIEKCNRARKVVITATQMLDSMIKNPRPTRAEAGDVANAIMDGTDAVMLSGESAKGKYPIEAVTIMAQICNRTDSALKAELGSRLDSSRLRITEAVCKGAVDTSEKLNAPLIVVATEAGKSARSIRKYFPTAKIIAVTTNQKTAAQLCLTKGVTPIVVDAIDNTDAFYSRGKEIALETGLGAKGDIVVMVSGALVPSGTTNTASVHVL

SEQ ID NO: 528 - DNA, 1554 bp, Streptococcus thermophilus LMG 18311
  CDS (52)..(1554): transl_table=11
ttgttaatccgtcgcaaaagcgacaataaatataagggagttttatatatcatgaataaacgcgtaaaaatagttgctacacttggtcctgcggttgaaatccgtggtggcaagaaatttggtgaagatggttactggagtgaaaaacttgaccctgatgcatctgctaaaaatattgctcaattgatcgaggaaggtgctaacgttttccgtttcaacttctcacatggtaaccacgctgagcaaggtgaacgtatggatgtcgtacgtatggctgaatctattgctggtcaaaaagtaggtttccttcttgacactaagggacctgaaatccgtactgaattgtttgaaggtgatgctaaagagtatgcatacaaaactggtgaacaaatccgtattgctactaaacaaggtctcaaatcaactcgcgacgttattgctttgaacgttgctggtgcacttgacattttcgacgatgtagaagttggtaaacaagttcttgtggatgatggtaaacttggtcttcgtgttgtagacaaggatgctgaaaaacgtgaattcatcgttgaagttgaaaatgatggtattattgctaaacaaaaaggtgtaaacatcccttacactaaaattcctttcccagcacttgctgaacgtgataatgctgatattcgttttggtctcgaacaaggtattaactttatcgcaatctcatttgtacgtactgcgaaagacgtacaagaagtacgtgctatctgtgaagaaactggaaacggccacgttaaattgttggctaaaatcgaaaaccaacaaggtatcgataatatcgatgaaatcattgaagctgctgatggtatcatgatcgctcgtggtgacatgggtatcgaagtaccattcgaaatggttccagtttaccaaaaaatgattatcactaaagtaaatgccgctggtaaaattgttgttacagctacaaacatgcttgaaacaatgacagaaaaaccacgtgcaactcgttctgaagtatctgacgtgtttaacgcagttatcgatggtactgatgcgacaatgctttctggtgagtctgcaaatggtaaatatccagttgaatcagttcgtacaatggctacaattaataaaaacgctcaaactcttcttaaagagtatggtcgtcttaattcatcaacatttgatcgctcaagtaaaactgaagttgttgcatctgcagttaaagatgctactaactcaatgaatatcaaacttattgttgcacttactgaatctggtaacacagctcgtttgatttctaaataccgtccagaagctgacatcttggcaataacattcgatgaacttactcaaaaatcattgatgcttaactggggtgttattccagttgttactgaaacaccttcatctactgatgatatgtttgaagttgctgagcgtgttgctcttgaatcaggtcttgtagaatcaggtgataacattgttattgttgctggtgttccagttggttctggtaatacaaatactatgcgtatccgcacagttaaataa

SEQ ID NO: 529 - protein, 500 aa, Streptococcus thermophilus LMG 18311
MNKRVKIVATLGPAVEIRGGKKFGEDGYWSEKLDPDASAKNIAQLIEEGANVFRFNFSHGNHAEQGERMDVVRMAESIAGQKVGFLLDTKGPEIRTELFEGDAKEYAYKTGEQIRIATKQGLKSTRDVIALNVAGALDIFDDVEVGKQVLVDDGKLGLRVVDKDAEKREFIVEVENDGIIAKQKGVNIPYTKIPFPALAERDNADIRFGLEQGINFIAISFVRTAKDVQEVRAICEETGNGHVKLLAKIENQQGIDNIDEIIEAADGIMIARGDMGIEVPFEMVPVYQKMIITKVNAAGKIVVTATNMLETMTEKPRATRSEVSDVFNAVIDGTDATMLSGESANGKYPVESVRTMATINKNAQTLLKEYGRLNSSTFDRSSKTEVVASAVKDATNSMNIKLIVALTESGNTARLISKYRPEADILAITFDELTQKSLMLNWGVIPVVTETPSSTDDMFEVAERVALESGLVESGDNIVIVAGVPVGSGNTNTMRIRTVK

SEQ ID NO: 530 - DNA, 1764 bp, Geobacillus kaustophilus HTA426
  CDS (1)..(1764): transl_table=11
atgaagcggaaaacgaaaatcgtctgtacgatcgggccggcaagcgagagcgtagacaagctcgtgcaattgatcgaagcggggatgaacgtggcgcgcctcaacttttcgcacggagatcatgaggaacacgggcggcgcatcgccaacattcgcgaggcggcgaggcggacgggccaaacggtcgccattttgctcgatacgaaaggcccggaaatccgcacgcacaatatggagaacggcgccgtcgaactgaaggaaggggcaaagctcatcatttcgatgagcgaagtgctcggcacgccggaaaaaatttctgtcacctatccggggctgatcgatgatgtgtccgttggttcgaaaattttgctggacgacgggttgatcggccttgaagtcaacgcggtcgacaagcaagctggagaaattgccacgaccgtcctaaacaccggtgtgctcaaaaacaaaaaaggggtcaatgtccccggcgtgcgtgtcaatttgccgggcatcaccgagaaggaccgagccgatattttatttggcatccgccaaggcatcgacttcatcgccgcctcgtttgtgcgccgggcgtctgatgtgctcgaaatccgcgagctgctcgaggcgaatgacgccttacatatccaaattatcgcgaaaattgaaaatgaagaaggcgtcgccaacatcgatgaaattttggaagccgccgatggcctcatggtggcgcgcggcgaccttggcgttgagattccggctgaggaagtgcctctcattcaaaaaatgctcattaaaaagtgcaacatgcttggcaagccggtcatcacggcgacgcaaatgctcgactcgatgcagcgcaatccgcggccgacgcgggctgaggcgagcgatgtcgccaacgccatttttgacggcaccgacgccgtcatgctttccggagaaaccgcagccggccagtatccggtcgaagcggtaaggacgatgcaccaaatcgcgctccgcaccgagcaggcgttggagcatcgcgacattttgtcccagcgcacgaaagagagccgaacgacgatcaccgatgccatcggccaatcggtcgcccacacagcgctcaatttggatgtcgcggcgatcgtgacgccgacggtgagcggaaaaacgccgcagatggtggcgaaataccgcccgaaagccccgatcatcgcggtgacatcaaacgaagcggtctcgcggcggctggcgctcatttggggcgtgtatacgaaagaagcaccgcatgtcaatacaaccgatgaaatgctcgatgtggcggtcgacgcggcagtgcgctccggcttggtgaagcacggcgacttggtcgtcatcacggccggcgtgccggtcggcgaaacgggatcgacgaacttaatgaaagtgcacgtcatcagcgacttgcttgccaaagggcaaggcatcggccgcaagtcggcattcggcaaggcggtcgtcgccaaaacggcggaagaggcgtgccgaaaaatggtagagggcggcattttagtcaccatcagcaccgatgccgatatgatgccggcgatcgaaaaagcggcggcgatcatcaccgaggaaggcgggttgacgagccatgcggcggtcgtcggcttaagccttggcattccggtcgtcgtcggggtggaaaatgccacaagcttgtttaaagatgggcaagagatcacggtcgatggcggctttggcgccgtctaccgcggccatgcgagcgtgttgtaa

SEQ ID NO: 531 - protein, 587 aa, Geobacillus kaustophilus HTA426
MKRKTKIVCTIGPASESVDKLVQLIEAGMNVARLNFSHGDHEEHGRRIANIREAARRTGQTVAILLDTKGPEIRTHNMENGAVELKEGAKLIISMSEVLGTPEKISVTYPGLIDDVSVGSKILLDDGLIGLEVNAVDKQAGEIATTVLNTGVLKNKKGVNVPGVRVNLPGITEKDRADILFGIRQGIDFIAASFVRRASDVLEIRELLEANDALHIQIIAKIENEEGVANIDEILEAADGLMVARGDLGVEIPAEEVPLIQKMLIKKCNMLGKPVITATQMLDSMQRNPRPTRAEASDVANAIFDGTDAVMLSGETAAGQYPVEAVRTMHQIALRTEQALEHRDILSQRTKESRTTITDAIGQSVAHTALNLDVAAIVTPTVSGKTPQMVAKYRPKAPIIAVTSNEAVSRRLALIWGVYTKEAPHVNTTDEMLDVAVDAAVRSGLVKHGDLVVITAGVPVGETGSTNLMKVHVISDLLAKGQGIGRKSAFGKAVVAKTAEEACRKMVEGGILVTISTDADMMPAIEKAAAIITEEGGLTSHAAVVGLSLGIPVVVGVENATSLFKDGQEITVDGGFGAVYRGHASVL

SEQ ID NO: 532 - DNA, 1413 bp, Salmonella enterica subsp. enterica serovar Paratyphi A str. ATCC 9150
  CDS (1)..(1413): transl_table=11
atgaaaaagacgaaaattgtttgtactatcggtccgaaaaccgaatccgaagagatgttaagcaaaatgctggacgcgggcatgaacgtgatgcgtctgaacttctctcatggcgattatgcagaacacggtcagcgtatccagaacttgcgcaacgtgatgagcaaaactggtaaaaaagccgctattctgcttgatactaaaggaccagaaatccgcaccattaaactggaaggcggtaacgacgtttcgctgaaagcgggccaaacctttacttttaccaccgacaaatccgtggtcggtaataatgaaatcgttgccgtcacctatgaaggcttcaccagcgacctgagcgttggcaacaccgtcctggttgacgatggtctgatcggtatggaagtgaccgccatcgaaggcaataaagtcatttgtaaggtgctgaacaacggcgatctgggcgagaacaaaggcgttaacctgccgggcgtttctattgctctgccggcgctggctgaaaaagacaaacaggacctgatcttcggttgcgaacagggcgttgactttgttgctgcgtcctttatccgtaaacgttctgacgttgtcgaaattcgcgagcatctgaaagcccacggcggcgaaaacatccagattatctctaagatcgaaaaccaggaaggcctgaacaacttcgatgaaattctcgaagcttccgacggcatcatggttgcgcgtggcgacctgggcgtagaaatcccggttgaagaagtgatctttgcgcagaaaatgatgatcgaaaaatgtatccgcgcacgtaaagtcgtgatcaccgcgactcagatgctggattctatgatcaaaaacccgcgtccgacccgcgcagaagcaggcgacgttgcgaacgccatcctcgacggtacggatgcggttatgctgtccggcgaatccgcaaaagggaaatacccgctggaagccgtttctatcatggcaaccatctgcgaacgtaccgaccgcgtcatgaacagccgtctggactacaacaacgacagccgtaaactgcgcattacggaagcagtatgccgcggctcggtagaaaccgccgaaaaactggaagcgccgctgatcgtggtagcgacccagggcggtaaatccgctcgcgccgtgcgtaaatacttcccggacgccaccatcctggcattgaccaccaatgaagtgaccgcccgtcagttagtactgagcaaaggcgtggtatcgcagctggtgaaagaaatcaattctactgatgatttctaccgtctgggcaaagatgtcgccctgcaaagcggcctcgcccagaaaggcgacgtcgtagtgatggtctccggcgcgctggttccaagcggcaccactaacaccgcctctgttcacgtactgtaa

SEQ ID NO: 533 - protein, 470 aa, Salmonella enterica subsp. enterica serovar Paratyphi A str. ATCC 9150
MKKTKIVCTIGPKTESEEMLSKMLDAGMNVMRLNFSHGDYAEHGQRIQNLRNVMSKTGKKAAILLDTKGPEIRTIKLEGGNDVSLKAGQTFTFTTDKSVVGNNEIVAVTYEGFTSDLSVGNTVLVDDGLIGMEVTAIEGNKVICKVLNNGDLGENKGVNLPGVSIALPALAEKDKQDLIFGCEQGVDFVAASFIRKRSDVVEIREHLKAHGGENIQIISKIENQEGLNNFDEILEASDGIMVARGDLGVEIPVEEVIFAQKMMIEKCIRARKVVITATQMLDSMIKNPRPTRAEAGDVANAILDGTDAVMLSGESAKGKYPLEAVSIMATICERTDRVMNSRLDYNNDSRKLRITEAVCRGSVETAEKLEAPLIVVATQGGKSARAVRKYFPDATILALTTNEVTARQLVLSKGVVSQLVKEINSTDDFYRLGKDVALQSGLAQKGDVVVMVSGALVPSGTTNTASVHVL

SEQ ID NO: 534 - DNA, 1755 bp, Unknown
  Unidentified
  CDS (1)..(1755)
atgcgtaaaacaaaaattgtttgtacgattggaccagcaagtgagtcgcttgaaaaactaacagcactcatcgaagcggggatgaatgtagcccgtttgaatttttcacacggtgattttgaagagcacggtgcccgaattaaaaacattcgcgaagcggcaaaacggactggaaaaacggttgctattctacttgatacgaaagggccggaaatccgcacacaaacggtagaaggcggagcgattgaacttgagaaagggcaagagctcattttgtcaatgaatgaagtccaaggtacgaaagaaaagatctccattacgtatccagggctttgcgaggatgtagaagtcggaagtacgatcttgctcgatgatggcttaattgggcttgaggtaaaggaaatccgcgacactgagctggttacgattgttcgcaacagtggcgtgctgaaaaacaagaaaggcgtcaacgtcccaaatgtcagcgtcaacctaccggggatgaccgaaaaggatgcagccgacattgtatttgggattgagcaaaaagttgactttatagccgcctcctttgtgcgccgcgcttctgatgttctagaaatccgcgagctccttgaaaagcatggcgctgcagatacagcgattatcccgaaaatcgaaaaccaagaaggcgttgacaatatcgatgaaattcttgaagtatcggacggccttatggtcgcaaggggagacttaggtgtagaaattccagcagaagaagtaccgcttgtgcaaaaacagctcattaaaaaatgcaatgagttggccaagccggtcatcactgccacgcaaatgcttgattccatgcaacgcaacccgcgtcctacacgagcggaagcaagcgacgtagccaacgctatttttgacgggacagacgccattatgctttctggtgaaaccgctgctggtgattaccctgtagaatcggtgcaaacaatgcacaatattgccgaacgaacagaacaagccctcaattatgaaaacatgctgcgtcggaaaagcaaagaagtgaaaacatcgattacaagtgcaattggccagtctgttgcttacaccgcctcaaacttgaatgctgctgcgattttaacagcgacagaaagcggctatacagcacggatgacatcacgtttccggccgaaatcgccaatcttggccgtaacgagcaatgagcgtgcttaccggagaatggcgctcgtgtggggggttacgccaatacttggtaaacaagcaaacacaactgacgaaatgttagaccgtacagttgaagcggctgtcgctacaggagtggtgaaacaaggtgaccttgttatcattacggctggtgttcccgttggggagtcaggcacaacgaatttaatgaaagtccatatgcttggggaagttgcagcaaaaggacaaggcatcggacgtcgctctgcctcaggaaaagtcgttgttgcccgtgacgcaaaagaagcgattgcaaaagtaacggaaggctctgtgcttgtcacaaaatcaaccgataaagacatgatcgaagcgttcgagaaagctgctgctgtcgtgactgtagaaggcggtcttacatcccatgcagctgttgttggcttaaacttgagcacgcctgttatcgtcggtgtagccaacgcccttgaacgtttccaagacggcgatgaagtgactgtggactgcattagcggaaacatttacagcggccaagcccgtgtattataa

SEQ ID NO: 535 - protein, 584 aa, Unknown
  Unidentified
MRKTKIVCTIGPASESLEKLTALIEAGMNVARLNFSHGDFEEHGARIKNIREAAKRTGKTVAILLDTKGPEIRTQTVEGGAIELEKGQELILSMNEVQGTKEKISITYPGLCEDVEVGSTILLDDGLIGLEVKEIRDTELVTIVRNSGVLKNKKGVNVPNVSVNLPGMTEKDAADIVFGIEQKVDFIAASFVRRASDVLEIRELLEKHGAADTAIIPKIENQEGVDNIDEILEVSDGLMVARGDLGVEIPAEEVPLVQKQLIKKCNELAKPVITATQMLDSMQRNPRPTRAEASDVANAIFDGTDAIMLSGETAAGDYPVESVQTMHNIAERTEQALNYENMLRRKSKEVKTSITSAIGQSVAYTASNLNAAAILTATESGYTARMTSRFRPKSPILAVTSNERAYRRMALVWGVTPILGKQANTTDEMLDRTVEAAVATGVVKQGDLVIITAGVPVGESGTTNLMKVHMLGEVAAKGQGIGRRSASGKVVVARDAKEAIAKVTEGSVLVTKSTDKDMIEAFEKAAAVVTVEGGLTSHAAVVGLNLSTPVIVGVANALERFQDGDEVTVDCISGNIYSGQARVL

SEQ ID NO: 536 - DNA, 1413 bp, Vibrio fischeri ES114
  CDS (1)..(1413): transl_table=11
atgaaaaagaccaaaatcgtttgtacgatcggcccaaaaactgaatcagttgaaaaactaactgaactagcaaatgctggtatgaacgttatgcgcctaaacttctcacacggcgacttcgcagaacacggccaacgtattgataacgtacgtcaagtaatgaaaaacactggcaaacaacttgctattcttcttgatactaaaggtcctgaaatccgcacaatcaaactagaaaatggcgacgatgttgctctagttgcaggtcaagatttcacattcacaacagatacttcagttgttggtaacaaagacgttgttgctgtaacttacccaggtttcgcaaacgaccttgaagttggtaacactatccttgttgatgatggtctaatcgaaatggaagttgttgcgacaactgaaactgaagttaagtgtaaagttcttaacaacggtgacctaggcgaaaacaaaggtgttaaccttcctggcgtttctgttcaacttcctgctctatctgaaaaagataaagctgaccttaaatttggttgtgagcaaggcgttgatttcgttgctgcttctttcatccgtaaagaagaagacgttaaagaaatccgtgaactacttgttgctaacggcggcgagaacattcaaatcatctctaagattgaaaaccaagaaggtgttgataacttcgattcaatcctagaagcttctgacggtatcatggttgctcgtggtgaccttggtgttgaaatcccagttgaagaagtaatcttcgctcagaagatgatgatcgagaaatgtaaccgcgcacgtaaagttgtaatcactgcaactcaaatgcttgattctatgatcaaaaacccacgtccaactcgtgctgaagcgggtgacgttgcgaacgcaatcatggatggtactgatgctgtaatgctttcaggtgaatctgctaaaggtaaatacccagtagaagctgtaactatcatggctcaaatctgtgctcgtactgatgcggctcttaaagcagaactaggttctcgtctagatagcccacgtctacgtatcactgaagcggtatgtaaaggtgcagtagatacagctgagaaactaaacgctcctgttatcgttgttgcaactgaagctggtaaatcagctcgttcaatccgtaaatacttcccaacagctaaaatcatcgctgtaactactaatactaagactgctgcacaactatgtctttctaaaggtattactccaatgatcgttgattcaatcgatagcactgacgcattctacctacgtggtaaagagttagctcttgaatcaggtattggcgctaaaggcgatatcgttgttatggtttctggtgctctagttccatctggtactacaaacacagcttctgtacacgttctataa

SEQ ID NO: 537 - protein, 470 aa, Vibrio fischeri ES114
MKKTKIVCTIGPKTESVEKLTELANAGMNVMRLNFSHGDFAEHGQRIDNVRQVMKNTGKQLAILLDTKGPEIRTIKLENGDDVALVAGQDFTFTTDTSVVGNKDVVAVTYPGFANDLEVGNTILVDDGLIEMEVVATTETEVKCKVLNNGDLGENKGVNLPGVSVQLPALSEKDKADLKFGCEQGVDFVAASFIRKEEDVKEIRELLVANGGENIQIISKIENQEGVDNFDSILEASDGIMVARGDLGVEIPVEEVIFAQKMMIEKCNRARKVVITATQMLDSMIKNPRPTRAEAGDVANAIMDGTDAVMLSGESAKGKYPVEAVTIMAQICARTDAALKAELGSRLDSPRLRITEAVCKGAVDTAEKLNAPVIVVATEAGKSARSIRKYFPTAKIIAVTTNTKTAAQLCLSKGITPMIVDSIDSTDAFYLRGKELALESGIGAKGDIVVMVSGALVPSGTTNTASVHVL

SEQ ID NO: 538 - DNA, 1761 bp, Staphylococcus haemolyticus JCSC1435
  CDS (1)..(1761): transl_table=11
atgagaaagactaaaattgtatgtacaattggacctgcatcagagtctgaagaaatgttagaaaaattaatgaaagctggtatgaacgtagcgcgtttgaacttttctcatggtagtcatgaagaacataaagcacgtattgatacgattcgtaaagtagcagacagattaggtaaaacaataggtatcttattagatacaaaaggacctgaaattcgtactcatgacatgaaagatggcttaattatgcttgaaaaaggcaaagaagtaatcgtaagtatgtcacaagttgaaggtacacctgaaaaattctcagtaacttatgaagacttaattaatgatgtgcaagtagggtcatacatcttacttgatgatggtttagttgaattacaagttaaagacatcgataaaactaaaggcgaagttaaatgtgatatcttaaacactggtgaattaaaaaataaaaaaggtgttaacttacctggcgtaaaagttaatttacctggtattactgataaagatgctgacgatatcttatttggtatcaaagaagatgttgattatatcgcagcaagctttgtacgtcgtcctagtgatgttttagatattcgtgaaattttagaaagagaaaataatcataacattactattttccctaaaattgaaaaccaagaaggtattgataatatcgaagaaatattagaagtatctgacggtttaatggtagctcgtggtgacatgggagttgaaataccacctgaatcagtaccaatcgtacaaaaagatttaattagaaaatgtaataaattaggtaaaccagttattactgcaacacaaatgttagattcaatgcaacgtaatccacgtgcaactagagcagaagcaagtgacgttgccaatgcaatctatgatggtactgacgctgtgatgctttcaggtgaaactgctgcaggtttatatcctgaagaagctgttaaaacaatgagaaatattgctgtttctgctgaagctgctcaagattacaaaaaattattatcagaccgtactaaattagtagaaacttcattagttaacgctattggtgtatcagttgcacatactgcattaaacttaaatgttaaagcgattgttgcggcaactgaaagtggttctacagctgtaacgatttcaaaatatcgtccacattctgatattattgcggttacccctagcgagcacactgcacgtcaacttgctttagtttggggtgcctatcctgtaattaaaaaagggcgtaaaactactgatgacctattaaataatgcagttgctacagcagtagaaactggaagagttactaatggtgatttaattattattactgccggtgtacctactggtgaaaaaggtacaactaatatgatgaaattacatttagttggagatgaaattgcaaaaggacaaggtgtcggtcgtggatcagtagttggtaaaactgtagtagctaacagtgctagtgatttagaaggtgtagacttaagtgaatcagttattgtcactaattctgtagatgagacattagtgccttatattgagcaagcagttggattaattacagaagagaatggtatcacatcaccaagtgcgattattggacttgaaaaaagtattccaaccattataggtgttgaaaatgctactaaagaattaaaagatggtattttagtaacagtagatgctgcccaaggtaaaatatttgaagggtacgctaacgtactttaa

SEQ ID NO: 539 - protein, 586 aa, Staphylococcus haemolyticus JCSC1435
MRKTKIVCTIGPASESEEMLEKLMKAGMNVARLNFSHGSHEEHKARIDTIRKVADRLGKTIGILLDTKGPEIRTHDMKDGLIMLEKGKEVIVSMSQVEGTPEKFSVTYEDLINDVQVGSYILLDDGLVELQVKDIDKTKGEVKCDILNTGELKNKKGVNLPGVKVNLPGITDKDADDILFGIKEDVDYIAASFVRRPSDVLDIREILERENNHNITIFPKIENQEGIDNIEEILEVSDGLMVARGDMGVEIPPESVPIVQKDLIRKCNKLGKPVITATQMLDSMQRNPRATRAEASDVANAIYDGTDAVMLSGETAAGLYPEEAVKTMRNIAVSAEAAQDYKKLLSDRTKLVETSLVNAIGVSVAHTALNLNVKAIVAATESGSTAVTISKYRPHSDIIAVTPSEHTARQLALVWGAYPVIKKGRKTTDDLLNNAVATAVETGRVTNGDLIIITAGVPTGEKGTTNMMKLHLVGDEIAKGQGVGRGSVVGKTVVANSASDLEGVDLSESVIVTNSVDETLVPYIEQAVGLITEENGITSPSAIIGLEKSIPTIIGVENATKELKDGILVTVDAAQGKIFEGYANVL

SEQ ID NO: 540 - DNA, 1761 bp, Staphylococcus saprophyticus subsp. saprophyticus ATCC 15305
  CDS (1)..(1761): transl_table=11
atgagaaaaactaaaattgtttgtactattggacctgcgtccgaatctgaagaaatgcttgaaaaactaattaaggctggaatgaatgtcgcgcgcttaaacttctcgcatggtgaccaagctgaacataaagctagaattgacacaattcgtaaagtttctaaaagattaggcaaaacagttgcaatcttacttgatacaaaaggaccagaaatacgtacacacaacatgaaagatgggcttattgaacttgaaaaaggttctgaagttaccgtaagcatgactgaagttgaaggtactcctgaaaaattctcagtaacgtatgaaaacttaatcaatgatgttgaagaaggttcatatattttattagatgatggtttaattgaattacaagttaaatcaatcgataaagcaaacggtgaagtattatgtgatgtacttaatactggagaattaaaaaacaaaaaaggcgtaaacttacctggtgtcaaagtaagcttacctggtattacagataaagatgctgacgacattaactttggaattagtgaaggcgttgatttcattgcagcgagctttgtacgtcgtccaagtgatgtattagatattcgtaaattattagaagcgaagcaaaataaaaatatcagcattatacctaagattgaaaatcaagagggtattgataatattaaagaaatattagaagtttctgatggtttaatggttgctcgtggtgatatgggtgttgaaattccacctgaatcagtaccaatggtgcaaaaagatttaattagacaatgtaataaattaggtaaaccagttataactgctacacaaatgttagactctatgcaacgtaatccacgtgcgacacgtgcagaagcaagtgacgtagcgaacgcaatttatgatggtacagatgcggttatgctttctggtgaaacagctgcaggtcaataccctgaagaagcagttaaaacaatgcgtaatatagctgtatcagcagaagcagcacaagattataaaaaattattatctgaccgtacaaaattagttgaaacttcattagtcaatgctattggtgtttcagttgctcatactgctttaaacttaaatgtcaaagcaatcgtagctgctactgaaagtggttcaactgcccgtacaatttctaaatatcgtccacaatctgacattattgcagttacacctaatgcagaaactgcgcgtcagtgtgctttagtatggggtattttcccagtcgttaaagaaggacgtaaaacaactgatgcattattaaataatgcagtagcaacagccgttgaaactgaaagagttcaaaatggtgacctaattattattactgctggtgtaccaactggtgaaaaaggtacaacgaatatgatgaaattacatttagttggtgatgaactagctaaaggacaaggtatcggtagaagttctgtagtaggtaaaacactagtagttaaagatgctagtgaactagaaggcaaagacttatcagaatctataattgtaacaagttctgtagatgagacgcttgtaccatatattgaaaatgcaatcggactcattactgaagaaaatggcattacatctccaagtgcaattataggattagaaaaaggtattcctaccgtagtaggcgttgagaacgctacatctgaaattcaaagtgatgtactcattacagtagatgcaaaccaaggaaaaatctttgaaggttatgcaaacgtactttaa

SEQ ID NO: 541 - protein, 586 aa, Staphylococcus saprophyticus subsp. saprophyticus ATCC 15305
MRKTKIVCTIGPASESEEMLEKLIKAGMNVARLNFSHGDQAEHKARIDTIRKVSKRLGKTVAILLDTKGPEIRTHNMKDGLIELEKGSEVTVSMTEVEGTPEKFSVTYENLINDVEEGSYILLDDGLIELQVKSIDKANGEVLCDVLNTGELKNKKGVNLPGVKVSLPGITDKDADDINFGISEGVDFIAASFVRRPSDVLDIRKLLEAKQNKNISIIPKIENQEGIDNIKEILEVSDGLMVARGDMGVEIPPESVPMVQKDLIRQCNKLGKPVITATQMLDSMQRNPRATRAEASDVANAIYDGTDAVMLSGETAAGQYPEEAVKTMRNIAVSAEAAQDYKKLLSDRTKLVETSLVNAIGVSVAHTALNLNVKAIVAATESGSTARTISKYRPQSDIIAVTPNAETARQCALVWGIFPVVKEGRKTTDALLNNAVATAVETERVQNGDLIIITAGVPTGEKGTTNMMKLHLVGDELAKGQGIGRSSVVGKTLVVKDASELEGKDLSESIIVTSSVDETLVPYIENAIGLITEENGITSPSAIIGLEKGIPTVVGVENATSEIQSDVLITVDANQGKIFEGYANVL

SEQ ID NO: 542 - DNA, 1434 bp, Methanosarcina barkeri str. Fusaro
  CDS (1)..(1434): transl_table=11
atgcaaattccggaccataaaacaaagattgtctgtaccataggccctgcttcctcttccgaagaagtgatcaggaaacttgtgcttgctggcatgaacgtggcaaggatcaatttttcccacgggagcttcgaaagccatagcgaagtaatccagagagtccgtaaggttgcagaggagcttgacaggacagttgcgattcttgccgacctgccaggcccgaagatccgtataggcaaactggaaaaagaaccgatcatgctccataaaggaaactctgtgacccttacggttgccgaaactacaggaaatgagacacgtattcctgtaagctacaagcaacttccggaaagcgtggttccagggagccttatttacttaagtgacggttttatccagcttcgatgcctggaagtttcgggaaaagatgtgctttgtgaggttcttatcggagggcagctctattctcataaagggctaaatctaccaggggcaaagatcttagttgattctgtaactggaaaggatcttgaaattcttgggtttgcccttagtaaagggatcgacactttcagcatttctttcatagaaagtgcggaagatattcgtaatgtccggaattttgctgcagctagaggaaagtctgtatatattgtttctaaaatcgaacgcaggcaagctgtagagaatatccaggacattctaaaagaaaccgatgctctcatgattgccagaggggacctcggggttgaaatacctattcaggaagttccttcagtccagaaggaacttatccatagtgcaaaacttcttggaattccggtaattacagccactcaaatgctggcttcaatgactgataatataaggcctacccgcgcagaagcaaccgatgtagccaacgcaatccttgacggcacagatgcggttatgctttcggaagagacggcagttggtaattatcctgtggaagctgttgaaatgatggcaaaaattgcaaaaaccacagaagactggcgttccgggacaaaatggggactagatgctattatcaagggcataacggcaagagatatgtcagtggatgaggtaataaccctccaggtgcatgaagccttgcaaaagttgccggttgcggccgtactgactcccacgagaagtggagcgaccccccgcaggatctcgcgcttcaagcctgatacctggatccttgctttcagccgtgtcccgagaacctgcggcttcctctctttatcctatggcgtttatcctatcactgtgaatgaaaatattgaaagctgggaaaaagagactactgagaaagccaaagaccttggatttgtaaaaagcggagagattgttattttcacccagggtccatcttcaggaagccccggaggcacaaatatgcttaaaatccttacccttaaataa

SEQ ID NO: 543 - protein, 477 aa, Methanosarcina barkeri str. Fusaro
MQIPDHKTKIVCTIGPASSSEEVIRKLVLAGMNVARINFSHGSFESHSEVIQRVRKVAEELDRTVAILADLPGPKIRIGKLEKEPIMLHKGNSVTLTVAETTGNETRIPVSYKQLPESVVPGSLIYLSDGFIQLRCLEVSGKDVLCEVLIGGQLYSHKGLNLPGAKILVDSVTGKDLEILGFALSKGIDTFSISFIESAEDIRNVRNFAAARGKSVYIVSKIERRQAVENIQDILKETDALMIARGDLGVEIPIQEVPSVQKELIHSAKLLGIPVITATQMLASMTDNIRPTRAEATDVANAILDGTDAVMLSEETAVGNYPVEAVEMMAKIAKTTEDWRSGTKWGLDAIIKGITARDMSVDEVITLQVHEALQKLPVAAVLTPTRSGATPRRISRFKPDTWILAFSRVPRTCGFLSLSYGVYPITVNENIESWEKETTEKAKDLGFVKSGEIVIFTQGPSSGSPGGTNMLKILTLK

SEQ ID NO: 544 - DNA, 1452 bp, Pelobacter carbinolicus DSM 2380
  CDS (1)..(1452): transl_table=11
atgttccgccataccaaaatcattgccactatcggcccggcctgcgactcgcgcgaaggcatcgagcggttactgttggcgggcgccaatctttttcgcttgaatttttcccatggcgaccagcagcacaaagccgggatcgtcgagtccattcgcgaattggccaggcagcatcgggttccggtggcgattctcggtgacctgcaggggcctaaaattcgcgttggatgcctcacaaacggtgccgtgcaactggacaccggcggcaccgtaacgttgacatccgaagcgatcgaaggcgatgcgacgcgcatccccgtgagttatgccaagctggccgaagacgtcgccgtgggtgatcgaatcctgctcgacgacggactgttggaactcgaggtcctgaccagggaagcacaggccgtgcattgccgcgttgtgacaggcggtaccctcaaagaccgcaagggcgtcaatctgcccggcgcggccctgtcggtgccttcattgaccgaaaaagacctggaagatgccggctttgccgtgcgtcaggggttggattatctggcgctgtcgtttgtgcggcgggccgacgacgtaaggcaacttaaagccttgctgcagaagcacaacagcaacatcccggtcattgccaaaattgaaaagccccaggccgtggagaatttcgacgccatcctggaggagtccgacgccatcatggtggcgcggggggatctgggcgtggaaatcagcccggaaagggtgccgctgatccagaaaaacattatccgacgttgtcatgaggccggcaaaccggtgataaccgccacccagatgctggaaagcatgattcacaacccgcgtcccacacgggctgaaacctccgatgtcgccaacgccattctcgacggcaccgatgccgttatgctgtcgggagaaaccgcggccggcaggtttccggtggaagcggttgaactgatggatcgggtggcacgcagcgtggaaggcgacgccttgctcaagcggcaactgttttacagttttcccgcccatcagcaagggccgcgaaaactatccgatgccatcggcgaagccgcctgccggacggctgtgcatattggcgcgaccgccatcctggcgtttacccagaccggttcgacggcggcactggtgtcgcgttttcggccggaaatccccatttatgccgtgacgccctcgcgtgaagtaaggcgccggctggctcttttttccggagtgcagtcgattcaggtcgactttgccggcgatacggaggcgcagatccattccgtggaggaggcagtgctggctgcaggggttctgcaaaaaggggatatcgttgtcattaccatgggcagtccggtggctgcctacggcaccaccaacctgatgaaagtgcaccgtctgggcaccggcaggttttacgagatcaattga

SEQ ID NO: 545 - protein, 483 aa, Pelobacter carbinolicus DSM 2380
MFRHTKIIATIGPACDSREGIERLLLAGANLFRLNFSHGDQQHKAGIVESIRELARQHRVPVAILGDLQGPKIRVGCLTNGAVQLDTGGTVTLTSEAIEGDATRIPVSYAKLAEDVAVGDRILLDDGLLELEVLTREAQAVHCRVVTGGTLKDRKGVNLPGAALSVPSLTEKDLEDAGFAVRQGLDYLALSFVRRADDVRQLKALLQKHNSNIPVIAKIEKPQAVENFDAILEESDAIMVARGDLGVEISPERVPLIQKNIIRRCHEAGKPVITATQMLESMIHNPRPTRAETSDVANAILDGTDAVMLSGETAAGRFPVEAVELMDRVARSVEGDALLKRQLFYSFPAHQQGPRKLSDAIGEAACRTAVHIGATAILAFTQTGSTAALVSRFRPEIPIYAVTPSREVRRRLALFSGVQSIQVDFAGDTEAQIHSVEEAVLAAGVLQKGDIVVITMGSPVAAYGTTNLMKVHRLGTGRFYEIN

SEQ ID NO: 546 - DNA, 1752 bp, Carboxydothermus hydrogenoformans Z-2901
  CDS (1)..(1752): transl_table=11
atgaaacgcaccaagattgtttgtacaattgggccggcttcaaacgacgtaggtatcttaaaagaaatgattatatccggaatgaatgtggccagaattaattttgctcatggcagtcacgaggagcaccgggagagaattgaaaaggttagacgggcgtctttagaagtaggaatcccggtggcaattttaattgatacaaaaggtccggaaattcgcattggtaaagttgaaaacggaaaaattgtcttaaaagaaggggacttagtggtatttgatccggatatagcagagggtcaaggtttgagagttccagtaaattatccgggattagcccgggatgttaatgtcggaggaactattcttttagatgatgggttaatagaattgaaaatcgaagatattcagggtaataaagttattgcccgggttataaccggtggtgagttatccaataacaaaggagtaaatttaccgggagttaaagttaatcttccggcgttaaccgaaaaggaccggaaggatattgattttggtattgaaattggagcggactttattgcccactcttttgtccgaaaagcagcggatgtgttagctttacggcgttacctggaagaaaaaggggcggatatggaaataattgctaaaatcgaaaaccaagaaggggtcgaaaacatcgatgaaatcatcaaagttgcggatgggataatggttgcccggggggatctgggagtagaaattccaacggaagatgtgcctttggtgcaaaaggaaataattgaaaagtgtaataaaaatggtaaaccggtaatcaccgccacccagatgttagattcaatgattagaaataaacgtccgacccgggccgaagctaccgatgtggctaatgctatttttgacggcaccgatgcggtaatgctgtcgggagaaacggctgccgggaaatatccggtagaagcggttaaaacaatggcccggattgcggaaaaagcggaagaaaaattactcacgttacgaaaactaaataaacccaccacaaaatcttttaaaactgtaaccgatgccataagccacgccagtgttaccaccgctgaagaattggatgcgggggcaattatcacgcctacttcttcgggctatacggcgcgaatggtttcccggtaccgcccggcggttcctattattgctgccacaccggatatgaaggtacttagaaagttgacgctggtttggggggtatttccccttttggttaaaacctccgattctaccgatgaaatgttaagtaaagcaatagaagcctctttagaaagtgggcttttaaaacctggcgatttggtggtgcttaccgccggagttccggtgggcgtaaaagggacaaccaaccttttaaaagtccatgtagcgggaaatgttttggccaaaggtgtgggcattggaacaaggcctataaccggaacggctcgggtctgtcgaaccgccagggaagcaatcgagcggattcagccgggagatattttggtaaccgaagcaaccgacagagattttgtttcggctattgaaaaggccgcgggactggtagttgaagcgggaggacttacgtcgcatgcggctattgcggggttagagtttgggatacctgtaatagttggggtcgatggtgctacttcgataattaaagatggggaaaagttaactctagatccccagaggggtctggtataccacggttctgctaaagttttataa

SEQ ID NO: 547 - protein, 583 aa, Carboxydothermus hydrogenoformans Z-2901
MKRTKIVCTIGPASNDVGILKEMIISGMNVARINFAHGSHEEHRERIEKVRRASLEVGIPVAILIDTKGPEIRIGKVENGKIVLKEGDLVVFDPDIAEGQGLRVPVNYPGLARDVNVGGTILLDDGLIELKIEDIQGNKVIARVITGGELSNNKGVNLPGVKVNLPALTEKDRKDIDFGIEIGADFIAHSFVRKAADVLALRRYLEEKGADMEIIAKIENQEGVENIDEIIKVADGIMVARGDLGVEIPTEDVPLVQKEIIEKCNKNGKPVITATQMLDSMIRNKRPTRAEATDVANAIFDGTDAVMLSGETAAGKYPVEAVKTMARIAEKAEEKLLTLRKLNKPTTKSFKTVTDAISHASVTTAEELDAGAIITPTSSGYTARMVSRYRPAVPIIAATPDMKVLRKLTLVWGVFPLLVKTSDSTDEMLSKAIEASLESGLLKPGDLVVLTAGVPVGVKGTTNLLKVHVAGNVLAKGVGIGTRPITGTARVCRTAREAIERIQPGDILVTEATDRDFVSAIEKAAGLVVEAGGLTSHAAIAGLEFGIPVIVGVDGATSIIKDGEKLTLDPQRGLVYHGSAKVL

SEQ ID NO: 548 - DNA, 1452 bp, Synechococcus sp. CC9902
  CDS (1)..(1452): transl_table=11
atgggccagttcgatttgaaccgccgaaccaaaatcgtggccacgatcggtcctgccacagaaagcccggaccagatcaaagagcttgtcagggctggggccacaacgtttcgtctgaacttttcccacggcgatcacgccgatcacgccgaacgaatcaaaaccattcgccaagtatccgaggagcttgggcaaaccatcggaatcctccaagatctccaaggtccaaagattcgactgggtcgttttgccgatggacccatcaccttggccaacggcgatccttttacgctcacgtccaggcctgtgagttgcgatcagagcatcgctactgtcacctacccaaaactggcggatgaagtcaccgctggaagccgcattcttttggatgacgggcgagtggagatgaaggtcgaaagcgtcgatcaatcgcagcaaacactccattgcagcgtcacggtgggaggggttctctccaacaacaagggggtcaatttccccgatgttcagttatcggttcgcgcgttaacggataaggacaaagaagatctcgctttcgggttgagccaaggggtggattgggttgccctgagcttcgtgcgcaacccatccgacatggaagaaattcgtggtctcattcgccaacacggccacgaaaccccagtcgtggccaagatcgaaaaatttgaagccatcgatcagatcgatgcgattcttcccctctgtgatggggtgatggtggcccgaggcgatctcggcgttgagatgcccgcagaagaagttcccctcttgcagaaagagctgattcgcaaggccaacagtcttgggattccgatcatcaccgcaacgcagatgctcgattccatggcatcgagtcctcggccaacgcgggctgaggtgagcgacgttgctaacgcgatcctcgatggcaccgatgcggtcatgctctccaacgaaacggcggttggcgatttccctgttgaagcggtgcagaccatggccaccattgcccggcgaatcgaaaaggattacccagagcggtcgattgacagccacctcccgtccacgatccccaatgccttaagcggtgctgttagcaccattgccagtcagctcaacgcggccgccatcattcccctcaccaaaactggagcaacggcccacaacgtgagcaaattcaggccggcagcaccgattcttgcggtcacccccgataaatccgtagcgtgtcgattgcaactcgtttggggtgtgacaccccttgttgtgccagaagagcctgatacaacagcaacttttattaccgccatgcgaaaagccaaagacctcaagctcttgaaagaaggagatttggtggtccaaacggcaggaacccattccggggtctcgggttccaccgatttggtgaaggtcggtgtcgtgacctcggccgacgactgcagtttcttctag

SEQ ID NO: 549 - protein, 483 aa, Synechococcus sp. CC9902
MGQFDLNRRTKIVATIGPATESPDQIKELVRAGATTFRLNFSHGDHADHAERIKTIRQVSEELGQTIGILQDLQGPKIRLGRFADGPITLANGDPFTLTSRPVSCDQSIATVTYPKLADEVTAGSRILLDDGRVEMKVESVDQSQQTLHCSVTVGGVLSNNKGVNFPDVQLSVRALTDKDKEDLAFGLSQGVDWVALSFVRNPSDMEEIRGLIRQHGHETPVVAKIEKFEAIDQIDAILPLCDGVMVARGDLGVEMPAEEVPLLQKELIRKANSLGIPIITATQMLDSMASSPRPTRAEVSDVANAILDGTDAVMLSNETAVGDFPVEAVQTMATIARRIEKDYPERSIDSHLPSTIPNALSGAVSTIASQLNAAAIIPLTKTGATAHNVSKFRPAAPILAVTPDKSVACRLQLVWGVTPLVVPEEPDTTATFITAMRKAKDLKLLKEGDLVVQTAGTHSGVSGSTDLVKVGVVTSADDCSFF

SEQ ID NO: 550 - DNA, 1485 bp, Synechococcus sp. CC9605
  CDS (1)..(1485): transl_table=11
atggtagtttccgcagggattttcagccgcgatatgggccagttcgacctgaaccgacggaccaagatcgtggccaccatcggccctgccacggagagtccagagcggatcaaagagctggtgaaggctggtgctaccaccttcaggctgaatttttcccacggggaccacagcgagcacgccgcacgcatcgccacgatccgtcaggtgtctgaggaactgggccagaccatcggcatcctccaagacctccagggtccgaagatccggctcgggcggttcgccgaggggccgatcaccctggccaacggcgatccgttcacgctcacctcacggccggtgagctgcgacaagacgatcgcaacggtcacctacgacaagctcgccgacgaagtaaccgccggcagtcgcatcctgctcgacgacggccgtgtggagatgaaggtcgataccgtcgacaaagcggagcagaccttgcattgcaccgtcaccgtgggcggtgttctctccaacaacaaaggcgtcaacttcccagatgttcaactttctgttcgtgccctcacggacaaggacaagaccgacttggcctttggcctcagccagggggtggactgggtggccctcagcttcgtgcgcaatccctcggacatggaggagattcgcggattgatttgtgaacagggccatgagacccctgtagtggcgaagatcgaaaagtttgaggccatcgatcagatcgattcaatcctgccgctctgtgacggcgtgatggtggcccgcggtgacctcggcgtggagatgccggccgaggaagtgccgttgctgcagaaggaactgatccgcaaggccaacagcctgggcatccccatcattactgccacccagatgctggattccatggcctccagcccccggcccacccgagccgaagttagcgacgtggccaacgccatcctggatggcaccgacgccgtgatgctctccaacgagactgcagtgggggatttccccgtggaagccgtccaaaccatggcgaccattgcccgaaggatcgagaaggactacccccaacgctcgatcgacagccaccttcccagcaccattcccaacgccttgagcggtgcggtcagcaccatcgccagccagctcaatgcctcggcgattctccccctcacccgaagtggggccacagctcgcaacgtcagcaagttccggcctgcggcacccatccttgccatcactcctgatcgcaccgtcgcctgtcgtctgcagttggtgtggggcgtgacaccgctggtgattcccgaaggcgagcgaaccacgcagaccttccaggcagcgatgctcaaagccaaggagctcaacctgctgaaggagagtgatctcgtggttcagtccgcaggcacccatgccggagtttccggatccacggatctggtcaaggtgagcatcgtgggcaacgaagcagaggcgacactgatctga

SEQ ID NO: 551 - protein, 494 aa, Synechococcus sp. CC9605
MVVSAGIFSRDMGQFDLNRRTKIVATIGPATESPERIKELVKAGATTFRLNFSHGDHSEHAARIATIRQVSEELGQTIGILQDLQGPKIRLGRFAEGPITLANGDPFTLTSRPVSCDKTIATVTYDKLADEVTAGSRILLDDGRVEMKVDTVDKAEQTLHCTVTVGGVLSNNKGVNFPDVQLSVRALTDKDKTDLAFGLSQGVDWVALSFVRNPSDMEEIRGLICEQGHETPVVAKIEKFEAIDQIDSILPLCDGVMVARGDLGVEMPAEEVPLLQKELIRKANSLGIPIITATQMLDSMASSPRPTRAEVSDVANAILDGTDAVMLSNETAVGDFPVEAVQTMATIARRIEKDYPQRSIDSHLPSTIPNALSGAVSTIASQLNASAILPLTRSGATARNVSKFRPAAPILAITPDRTVACRLQLVWGVTPLVIPEGERTTQTFQAAMLKAKELNLLKESDLVVQSAGTHAGVSGSTDLVKVSIVGNEAEATLI

SEQ ID NO: 552 - DNA, 1761 bp, Lactobacillus sakei subsp. sakei 23K
  CDS (1)..(1761): transl_table=11
atgaagaaaaccaaaatcgtaagtacacttggacccgcaagtaacagtgttgaaatcatcacaaaattaattgaagcaggtgctaacgtattccgctttaacttctctcatggtgatcatgaagaacatttaagccgtatgaatatggttcgcgaagctgaaaaagctacgggcaaaactgttggtatcatgttagatactaaaggtgctgaaatccggacaactgttcaacaaggtaagaaatttgaattacacactggtgaagtggtacgtatttcaatggacgatactcttgaaggaacacctgaaaaaattgccgttacttacccaggtctatacgacgatactcacgttggtggccacgttttaatcgatgatggtttagtggatcttaagattattgaaaaagacgaagcaaacaaagaacttgttactgaagttcaaaacgatggtatggttggctcacgtaaaggtgttaacgcacctggtgtttcaatcaacttacctggtatcacagaaaaagatgctagtgacatccgttttggtttagacaacgatatcaactttatcgctgcaagttttgttcgtaaacctcaagatgttttagatatccgtgaattattagaagaaaaacacatggaacatgttcaaatcttccctaagattgaatcacaagaaggtatcgacaacattgacgatatcatgaaagtttcagacggtttaatgattgctcgtggtgacatgggtgttgaaattccatttgaaaacgttcctttcgtacaaaagaacttgatcaagaaatgtaatgctattggcaaaccagttatcacagctacacaaatgttggactcaatgcaagaaaacccacgtcctacacgtgctgaagttaatgacgttgctaacgctgttattgatggtactgacgcaacaatgctttcaggtgaaagtgctaacggtgactacccagtagaagctgttgcaacaatggcccgcattgatgaaagaacagaaaaatcattaacagatcgcgatgcatatgcattgaaagcatacagcaagactaacttgacagaatcaattggtcaagctgttgcacatactgcacgtaacttaggtatcaagacaatcgttgctgctacagaatcaggttctacagcacgtatgatttctaaataccgtccacaagctgatatcttggctgttacatttgacgaacgtacacgtcgtggtttaacagttaactatggtgtatacccagttatggctaagaaacctgctaatacagatgatatgttcaacttggctacacaaacagctcaagaacatggttttgctaaagaaggcgacctaatcttgatcactgctggtgttcctgttggcgaacgtggcacaacaaacgttatgaagatccaattaattggttcaaaattaacacaaggccaaggtgttggcgatgaaacaatcgttggcaaggctgttgttgcttcaaatgctaaagaagcagctgaaaaagctgttgatggtggtatcttagttgttaaagcaactgacaaagattacttaccagcaatcgaaaaatcaagtgctatcgttgttgaaaacggtggtttaacatcacacgctgctgttgttggtatcgctatgggtatcccagttgttgttggtgctaaagacgcaacagaagctatcaaagatggcgaagttgttactgttgattcacgtcgtggtattgtttaccgcggtgcaacaaacgctctttaa

SEQ ID NO: 553 - protein, 586 aa, Lactobacillus sakei subsp. sakei 23K
MKKTKIVSTLGPASNSVEIITKLIEAGANVFRFNFSHGDHEEHLSRMNMVREAEKATGKTVGIMLDTKGAEIRTTVQQGKKFELHTGEVVRISMDDTLEGTPEKIAVTYPGLYDDTHVGGHVLIDDGLVDLKIIEKDEANKELVTEVQNDGMVGSRKGVNAPGVSINLPGITEKDASDIRFGLDNDINFIAASFVRKPQDVLDIRELLEEKHMEHVQIFPKIESQEGIDNIDDIMKVSDGLMIARGDMGVEIPFENVPFVQKNLIKKCNAIGKPVITATQMLDSMQENPRPTRAEVNDVANAVIDGTDATMLSGESANGDYPVEAVATMARIDERTEKSLTDRDAYALKAYSKTNLTESIGQAVAHTARNLGIKTIVAATESGSTARMISKYRPQADILAVTFDERTRRGLTVNYGVYPVMAKKPANTDDMFNLATQTAQEHGFAKEGDLILITAGVPVGERGTTNVMKIQLIGSKLTQGQGVGDETIVGKAVVASNAKEAAEKAVDGGILVVKATDKDYLPAIEKSSAIVVENGGLTSHAAVVGIAMGIPVVVGAKDATEAIKDGEVVTVDSRRGIVYRGATNAL

SEQ ID NO: 554 - DNA, 1794 bp, Prochlorococcus marinus str. MIT 9312
  CDS (1)..(1794): transl_table=11
atgtcgaatattgatttaaaaagaagaacaaaaatagtagcaactattggacctgcaactcagtctgaagagataattacaaatttaattaaagcaggagtaacaacattcagattaaatttctcacatggagatcataatgatcacgctgagagaattaaaactataagggaggtttcacaaaagctagatattgatattggtattctgcaagatcttcaaggacctaaaattaggttaggacgattcaaggatggtccagtaaaagtaaaaaaaggggataaatttacactaacctccaatgaagttgaatgttcaaatactattgcgaatgtaacttacgagaatctttctcaagaagttagtgaagggaaaagaatactattagatgatggtaaaattgaaatgattgttgaaaaagtagatactaaagctaatcttttagaatgtttggttactgtaggtggtgttttatcaaataataaaggtgtaaatttcccagatgttcaattatctgtaaaagcattaacagaaaaagataaagaggatttaaaatttggtttatctgagggagttgactggatagctctgagtttcgtaagaaatccttccgatattaatgaaattaaagatttaataaacaaaaatggtcattcaactccagtagttgcaaaaatagaaaaatttgaagcaatagatcaaattgatgctgtattacctttatgtgatggagttatggttgcaagaggggatttgggagtagaaatgcctgctgaagaagttccacttttacaaaaggatttaataagaaaagctaattcattaggtataccaataattaccgcgactcaaatgcttgattccatggcttctaatccaagaccgactagagccgaagtaagcgatgtcgccaatgcaatactggatggaacagatgcagtaatgctttcaaacgaaactgccgttggcgattatcctgtagaggcagtacaaacgatggcaacaatagcaagaagaattgagagggattatcctcttaaagctattgagagccacttacctagcacgataccaaatgctattagtggagctgtaagtaatatagctagacaactagatgcaggagcaataattcctttaacaaaatcaggttctactgctcgaaatgtaagtaaatttagaccgccaactcctattttggcaactacaactgaaaggagtgtagcgagaagacttcaacttgtttggggagtcaccccgatagtagtaaataatgatgaaagaacagcaaaaacatttagtttagctatgcaaattgctcaagaaatgggaatattaaaacaaggagatttagtcgttcaaactgcaggtacactaactggtataagtggctctacagatttaataaaagttggtttagtaaggaagatactttcaagagggatctcaataggtgaaattggagttacaggtaaagcaagaaaaataaatactaaacttgatttgtcattaatttgccctggcgaaattttatttgttaataaagaattattggaaaatgttccattgagcaaaaatattgcaggtattgttacgaaccaaaatgtagatgatgtttatgccttttttaacaaaaacaataagaagatttctacaatctgtaatgtagaaaacattgataataatcaaattattaatggtgatctagtaactttacagcttaacgaaggtgtaatttatatgggacaaattgaagatgatgaagaagctatagataaatataaatatgtctag

SEQ ID NO: 555 - protein, 597 aa, Prochlorococcus marinus str. MIT 9312
MSNIDLKRRTKIVATIGPATQSEEIITNLIKAGVTTFRLNFSHGDHNDHAERIKTIREVSQKLDIDIGILQDLQGPKIRLGRFKDGPVKVKKGDKFTLTSNEVECSNTIANVTYENLSQEVSEGKRILLDDGKIEMIVEKVDTKANLLECLVTVGGVLSNNKGVNFPDVQLSVKALTEKDKEDLKFGLSEGVDWIALSFVRNPSDINEIKDLINKNGHSTPVVAKIEKFEAIDQIDAVLPLCDGVMVARGDLGVEMPAEEVPLLQKDLIRKANSLGIPIITATQMLDSMASNPRPTRAEVSDVANAILDGTDAVMLSNETAVGDYPVEAVQTMATIARRIERDYPLKAIESHLPSTIPNAISGAVSNIARQLDAGAIIPLTKSGSTARNVSKFRPPTPILATTTERSVARRLQLVWGVTPIVVNNDERTAKTFSLAMQIAQEMGILKQGDLVVQTAGTLTGISGSTDLIKVGLVRKILSRGISIGEIGVTGKARKINTKLDLSLICPGEILFVNKELLENVPLSKNIAGIVTNQNVDDVYAFFNKNNKKISTICNVENIDNNQIINGDLVTLQLNEGVIYMGQIEDDEEAIDKYKYV

SEQ ID NO: 556 - DNA, 1413 bp, Shigella dysenteriae Sd197
  CDS (1)..(1413): transl_table=11
atgaaaaagaccaaaattgtttgcaccatcggaccgaaaaccgaatctgaagagatgttagctaaaatgctggacgctggcatgaacgttatgcgtctgaacttctctcatggtgactatgcagaacacggtcagcgcattcagaatctgcgcaacgtgatgagcaaaactggtaaaaccgccgctatcctgcttgataccaaaggtccggaaatccgcaccatgaaactggaaggcggtaacgacgtttctctgaaagctggtcagacctttactttcactactgataaatctgttatcggcaacagcgaaatggttgcggtaacgtatgaaggtttcacaactgacctgtctgttggcaacaccgtactggttgacgatggtctgatcggtatggaagttactgccattgaaggtaacaaagttatctgtaaagtgctgaacaacggcgacctgggtgaaaacaaaggtgtgaacctgcctggcgtttccattgccctgccagcactggctgaaaaagacaaacaggacctgatctttggttgcgaacaaggcgtagactttgtcgctgcttcctttattcgtaagcgttctgacgttatcgaaatccgtgagcacctgaaagcgcacggcggcgaaaacatccacatcatctccaaaatcgaaaaccaggaaggcctcaacaacttcgacgaaatcctcgaagcctctgacggcatcatggttgcgcgtggcgacctgggtgtagaaatcccggtagaagaagttatcttcgcccagaagatgatgatcgaaaaatgtatccgtgcacgtaaagtcgttatcactgcgacccagatgctggattccatgatcaaaaacccacgcccgactcgcgcagaagccggtgacgttgcaaacgccatcctcgacggtactgacgcagtgatgctgtctggtgaatccgcaaaaggtaaatacccgctggaagcggtttctatcatggcgaccatctgcgaacgtaccgaccgcgtgatgaacagccgtctcgagttcaacaatgacaaccgtaaactgcgcattaccgaagcggtatgccgtggtgccgttgaaactgctgaaaaactggatgctccgctgatcgtggttgctacccagggcggtaaatctgctcgcgcagtacgtaaatacttcccggatgccaccatcctggcactgaccaccaacgaaaaaacggctcatcagttggtactgagcaaaggcgttgtgccgcagctggttaaagagaccacttctactgatgatttctaccgtctgggtaaagaactggctctgcagagcggtctggcacacaaaggtgacgttgtagttatggtttctggtgcactggtaccgagcggcactactaacaccgcatctgttcacgtcctgtaa

SEQ ID NO: 557 - protein, 470 aa, Shigella dysenteriae Sd197
MKKTKIVCTIGPKTESEEMLAKMLDAGMNVMRLNFSHGDYAEHGQRIQNLRNVMSKTGKTAAILLDTKGPEIRTMKLEGGNDVSLKAGQTFTFTTDKSVIGNSEMVAVTYEGFTTDLSVGNTVLVDDGLIGMEVTAIEGNKVICKVLNNGDLGENKGVNLPGVSIALPALAEKDKQDLIFGCEQGVDFVAASFIRKRSDVIEIREHLKAHGGENIHIISKIENQEGLNNFDEILEASDGIMVARGDLGVEIPVEEVIFAQKMMIEKCIRARKVVITATQMLDSMIKNPRPTRAEAGDVANAILDGTDAVMLSGESAKGKYPLEAVSIMATICERTDRVMNSRLEFNNDNRKLRITEAVCRGAVETAEKLDAPLIVVATQGGKSARAVRKYFPDATILALTTNEKTAHQLVLSKGVVPQLVKETTSTDDFYRLGKELALQSGLAHKGDVVVMVSGALVPSGTTNTASVHVL

SEQ ID NO: 558 - DNA, 1413 bp, Sodalis glossinidius str. 'morsitans'
  CDS (1)..(1413): transl_table=11
atgaaaaagactaaaattgtttgtaccatcggcccgaaaaccgaatccgaagaggtactgtccagcctgcttgatgcaggtatgaacgtcatgcgtctcaatttttcccatggtgattatgaagagcacggtcagcgcatcaaaaatctgcgtgcggtgttgaaaagaaccgatcagcaggccgcgattctgcttgatactaagggccccgaaatccgcaccatgaaattggtaaacggcgccgatgtctcgctgcgcgccggccaaacctttacctttacgaccgatcagagcattattggcaacagtgaacgcgttgcggtcacctatccggggttcacccaggatctggcggtaggtaataccattctggtcgatgacggtctgctgggcatgaccgtgaccagcgtcacccaggaccaggttgtatgtaaggtactcaacaatggcgatttgggtgaaaacaaaggggttaacctgcccggtgtgtccattcccctacccgcgctggcggaaaaagataaacgcgacttgatttttggctgcgaacaaggcgtcgattttatcgctgcctcctttattcgcaaacgttccgacgtactggaaatccgcgaatacctggaacagcacggcggcagccatatccagatcatctctaaaatcgaaaaccaggaagggctgaataatttcgacgaaatcctcgaagcctccgacggcattatggtagcccgcggcgatctcggtgtcgaaattccggtggaagaagtgattttcgcgcagaaaatgatgatcgaaaagtgtaaccgggcgcgcaaggtggtgattaccgcgacccaaatgctcgactcgatgatcaaaaacccgcgtccgacccgcgcggaagccggcgacgtggccaacgccattctggatggtacggacgccgtgatgctgtccggcgagagcgccaaaggtaaatacccgctggaagccgtgaccattatggccactatctgccagcgcaccgatcgaatgctgccgagccgcatcgacagcctgaacgatagccgcaaacttcgcattaccgaagcggtctgccgcagcgcggtcgaaaccgcagaaaaactggaatcgccgctgattgtagtcgcgaccgagggcggcaaatccgccaagtcagtgcgtaaatatttcccgaaagcggaaattctggccctgaccacgaacccgctgaccgcccgccagcttctgctgagcaaaggggtgtcctgccagcttgtcgaagaaatcgcgtcgaccgatgatttctaccgcatcggcaaggcaatggcgttggaaactggtttagcggccaagggcgacattatcgtcatggtgtccggcgcgctggtaccgagcggcaccaccaacaccgcctcggtgcatatgctgtaa

SEQ ID NO: 559 - protein, 470 aa, Sodalis glossinidius str. 'morsitans'
MKKTKIVCTIGPKTESEEVLSSLLDAGMNVMRLNFSHGDYEEHGQRIKNLRAVLKRTDQQAAILLDTKGPEIRTMKLVNGADVSLRAGQTFTFTTDQSIIGNSERVAVTYPGFTQDLAVGNTILVDDGLLGMTVTSVTQDQVVCKVLNNGDLGENKGVNLPGVSIPLPALAEKDKRDLIFGCEQGVDFIAASFIRKRSDVLEIREYLEQHGGSHIQIISKIENQEGLNNFDEILEASDGIMVARGDLGVEIPVEEVIFAQKMMIEKCNRARKVVITATQMLDSMIKNPRPTRAEAGDVANAILDGTDAVMLSGESAKGKYPLEAVTIMATICQRTDRMLPSRIDSLNDSRKLRITEAVCRSAVETAEKLESPLIVVATEGGKSAKSVRKYFPKAEILALTTNPLTARQLLLSKGVSCQLVEEIASTDDFYRIGKAMALETGLAAKGDIIVMVSGALVPSGTTNTASVHML

SEQ ID NO: 560 - DNA, 1341 bp, Aster yellows witches'-broom phytoplasma AYWB
  CDS (1)..(1341): transl_table=11
atgaacaaaactaaaataatttgtaccttaggacctgcttcttatgaaaaaaacattttacaagctttaattcaaacaggtttgaatgtagcaagatttaatttttctcacgctcaatacgaacaaactaaacttttaatgaaaactattaaaactattagcgataaattagacaaacatacaggacttatgttagataccaaagggcctgaaattagaactcacaaattggatggtttagtaacaattcaaaaagattctgaagtaagaatatctatgacagaagttttaggtaatgctaaacttttttcagttagttatactaatttatacaatgaattaaaagttggcgatatgattaatattgatgatggatatttatctttggaagttgtaggcaaagatgaatccaaacaacaattagttactaaagccaaaaatactcactccatcaaatctcgcagaggtgtaaatgttcctaaagttaatttagaaatggactttatttctcctaaagattatcaagatattgtttttgctgcccaacaagattttgattatattgctgcttcatttgttagaaagtctcaagatgtccaagatattagaaaaattttacaagaacaaggaaattcaaacatccaaattatttctaaaatagaaaatcaagaaggtgttgataatttagaagaaatcattcaagaatcagacggcattatggttgcaagaggtgatttaggaatagaagttgatggtgaattagtaccgctttaccaaacgcgtattattaataaatgtttagaatacggtaaaccagttgtagtagctactcaaatgttagaatccatgcaaagaaacccacgcccaaccaaagccgaaacttctgatgtttttaatgcagttaaagaaggtacaacctttactatgttatcaggcgaaagtgcttcaggtgaatatcctgtagaagctgtaacttatatgaaaaaaattaactatcaagctgaaaaagtagttaattatcaagctttatcacaagtatatcaacctaaaaacttcaaagaaaatcttttattaagtgctgttgaattggcttttcgcacttttgttaaagcaattgttgtttatgatttagaagatgcttataatgtttctaaatttcatccatccgtccctgttttggctttagttaaaactgaacaagaagctcgtcgtttattattaaattttggtgtttttccttttgtttctgaaaataaattacaaaccaaattggaagaacttacccaaaagcaaattagtaattgtattgttattaaagatgggaagatttattttaaataa

SEQ ID NO: 561 - protein, 446 aa, Aster yellows witches'-broom phytoplasma AYWB
MNKTKIICTLGPASYEKNILQALIQTGLNVARFNFSHAQYEQTKLLMKTIKTISDKLDKHTGLMLDTKGPEIRTHKLDGLVTIQKDSEVRISMTEVLGNAKLFSVSYTNLYNELKVGDMINIDDGYLSLEVVGKDESKQQLVTKAKNTHSIKSRRGVNVPKVNLEMDFISPKDYQDIVFAAQQDFDYIAASFVRKSQDVQDIRKILQEQGNSNIQIISKIENQEGVDNLEEIIQESDGIMVARGDLGIEVDGELVPLYQTRIINKCLEYGKPVVVATQMLESMQRNPRPTKAETSDVFNAVKEGTTFTMLSGESASGEYPVEAVTYMKKINYQAEKVVNYQALSQVYQPKNFKENLLLSAVELAFRTFVKAIVVYDLEDAYNVSKFHPSVPVLALVKTEQEARRLLLNFGVFPFVSENKLQTKLEELTQKQISNCIVIKDGKIYFK

SEQ ID NO: 562 - DNA, 1842 bp, Synechococcus sp. JA-3-3Ab
  CDS (1)..(1842): transl_table=11
atgcattcgagcgagtcttttcgacgcaccaaaattgttgccactatcggccctgccagctccaaccccgccatcctaagggaaatgatcctgcaaggggcaaccacccttcgcctcaacttctcccatggggatcacgacctgcaccgccgcaacatccgcctcatccgccaaaccgctatggacctcggcatccaggtcgccattttgcaagacctgcaggggcccaaaattcgcctcggcaagttcgccgaaggctcgatcacccttaggagcggggatcccttcgtgttgaccagcaagcccattttgggatcccaggagcgcagttgggtcacctacgacaagctagcccaagaggtgccggaaggggcgacgatcctcctcgacgacggtcgggtggagatgcgggtggaggcggtggatcccgaggcgggggagctcttctgccgcaccattgtcggcggcaccctctccgacaacaagggggtgaacttccccggcgtgcgcctcagcatccgcgccgttaccgaaaaagacaaagaagacctctacttcggcctcaaccaaggggtggactgggtggccctcagctttgtgcgggatccctcggatgtgctggagctgcgggaactgatggccgctgtcggcaagcgggttcctatcattgtcaagatcgaaaaacacgaggccatccaacaactgccccagatcctggccctcagcgacggggtaatggtggcgcggggagatctgggcgtagagctgccggcggaagaggtgccgattttgcagaagcggatcattgccatggccaactgcctggggatcccggtgatcaccgctacccaaatgctggacagcatggcccacagccctcgtcccactcgggccgagatctcggatgtggccaatgctattttggacggcaccgatgccgtcatgctctccaacgagacggcggtaggcaaatatcccgtcgaggcggtggcgaccatggcccgcattgctgtgcgcatcgaacgggattacttcagcccgatctatgtcgatcgccgccaacacctgcgcaccctcaccctgcaggagctgagtcaaaataacggcagccccggtggcaatggctcgccccggcccaaaaccctggtcaccgactcaatcagccgcgccgtaggggagattgcccaggagttggatgcggtggcggtgatgaccctgaccaaaaccggggctacggctcgcaatgtctcccggtttcgcccgcgcaccccgatcttggctgtaactcctcatgtagaggtggcgcggcaactgcagttggtgtggggggtacggcccttgttggtcatggatttgcctaccacccgccagacctttcaggccgccatcaacgtggctcaggaagaaggcttgcttaaagatggcgacttggtggtgctcagcgccggcactttgccaggcgtatccggctccaccgatctgattaaggtagaggtagtcaaggcagtggtggccaaaggcagagggtttggcaaaggcactgtcagcggcccggcccgcatcctcagatctagcctcgatgccagcaagatcactgccggcgacatcctggttgctcgcgctaccgatgccaactatgtggaggcgatcaaacaggcggccggggtgatcaccgaagaagatggggcctcctcccatgcggcggtgatcggtctgcggttaggggtgccggtgctggtgggagttaaggatgctacgcgcctcatccgcgacggcgccatcgtcaccctagacccagaaaaaggcacggtgacctcaggagcagatgggctgggcttttag

SEQ ID NO: 563 - protein, 613 aa, Synechococcus sp. JA-3-3Ab
MHSSESFRRTKIVATIGPASSNPAILREMILQGATTLRLNFSHGDHDLHRRNIRLIRQTAMDLGIQVAILQDLQGPKIRLGKFAEGSITLRSGDPFVLTSKPILGSQERSWVTYDKLAQEVPEGATILLDDGRVEMRVEAVDPEAGELFCRTIVGGTLSDNKGVNFPGVRLSIRAVTEKDKEDLYFGLNQGVDWVALSFVRDPSDVLELRELMAAVGKRVPIIVKIEKHEAIQQLPQILALSDGVMVARGDLGVELPAEEVPILQKRIIAMANCLGIPVITATQMLDSMAHSPRPTRAEISDVANAILDGTDAVMLSNETAVGKYPVEAVATMARIAVRIERDYFSPIYVDRRQHLRTLTLQELSQNNGSPGGNGSPRPKTLVTDSISRAVGEIAQELDAVAVMTLTKTGATARNVSRFRPRTPILAVTPHVEVARQLQLVWGVRPLLVMDLPTTRQTFQAAINVAQEEGLLKDGDLVVLSAGTLPGVSGSTDLIKVEVVKAVVAKGRGFGKGTVSGPARILRSSLDASKITAGDILVARATDANYVEAIKQAAGVITEEDGASSHAAVIGLRLGVPVLVGVKDATRLIRDGAIVTLDPEKGTVTSGADGLGF

SEQ ID NO: 564 - DNA, 1860 bp, Synechococcus sp. JA-2-3B'a(2-13)
  CDS (1)..(1860): transl_table=11
atgcatttgagggattcttttcgacgcaccaaaattgttgccaccatcggccctgccagctcaaatccagccattctcagggagatgatcctgcaaggggcaaccacccttcgcctcaacttctcccatggggatcacgagctacaccgccgcagcattcgcctgatccgccaaaccgcgatggatctgggcatccaggtcgccattttgcaagacctgcaggggcccaaaatccgcctgggcaagttcgccgaaggctcgatcaccctcaaggcaggggatccctttgtgttgaccagcaaacctgtcttgggatcccaagagcgcagttgggtcacctacgacaagctggcccaagaagtgcccgaaggagcgacgatcctcatcgacgatggtcgagtggagatgcgggtggaagccgtggatccggaagcgggcgaactcttctgccgcaccattgtcgggggtaccctctccaacaacaagggggtcaatttccccggtgtgcgcctgagcatccgcgccgtgaccccaaaagacaaagaagatctctacttcggcctcaaccaaggggtggattgggtggccctcagctttgtgcgggatccctctgatgtgctggagctgcgggagctcatcgcctctgccaaacggccttcttcgggctcagccgacaagcgggtacccatcatcgtcaagatcgagaaacacgaggccattgaacagctgccccagattttggccctcagcgacggtgtgatggtggcgcggggagatctgggggtagagctgcctgcggaagaggtgccgatcctgcagaagcgggtgatcgccctggccaactccctggggatcccggtaattacggccacccaaatgctggacagcatggtgcacagcccccggcctacccgtgccgaaatctccgatgtggccaacgccattttggatggcaccgatgccgtcatgctctccaacgagacggctgtgggcaaataccctgtcgaggccgttgccaccatggcccgcattgccgtgcgcaccgagcgcgattactttgacctgacctacgccgaccgacgacaacgccttcgcgcccttgccatgcaggagctgagccaaaacaacggcaacagtcctgccgggatgcggcccaaaaccctgatcaccgactcgatcagccgcgccgtgggggagatcgcccaagagttggatgctgtagccgtgatgaccctgaccaaaacaggggctaccgctcgcaatgtctctaagtttcgcccccgcactcccatcctagccgtaaccccccatgtggaagtggcacggcggctgcagttggtttggggggtacatccgctgttggttatggatttggccaccacccgccagacctttcaagcggccatcagcttggctcaggaagatggcttgctcaaggatggcgacttggtggtgctcagtgcaggaaccctgccaggcgttgcgggatccaccgatctgatcaaggtggatgtggtgaaagcggtggtggctcaaggcaaagggtttggcaaaggcattgtcagcggcccggcccgcatcttgagatccagcctcgatgccagcaaaatcaccgccggagacattttggttgcccaatccaccgacgccaactatgtggaggccatcaaacaggcagccggcgtgattaccgaagaagagggagcctcctctcatgcagcagtcattggcctgcggctgggggtgccggtgctggtgggggtcaaggatgctacccgcttaatccgggatggatctatcgtcactctgaacccagaaaaaggcatagtgaccgcaggagccgatggcttgggcttttaa

SEQ ID NO: 565 - protein, 619 aa, Synechococcus sp. JA-2-3B'a(2-13)
MHLRDSFRRTKIVATIGPASSNPAILREMILQGATTLRLNFSHGDHELHRRSIRLIRQTAMDLGIQVAILQDLQGPKIRLGKFAEGSITLKAGDPFVLTSKPVLGSQERSWVTYDKLAQEVPEGATILIDDGRVEMRVEAVDPEAGELFCRTIVGGTLSNNKGVNFPGVRLSIRAVTPKDKEDLYFGLNQGVDWVALSFVRDPSDVLELRELIASAKRPSSGSADKRVPIIVKIEKHEAIEQLPQILALSDGVMVARGDLGVELPAEEVPILQKRVIALANSLGIPVITATQMLDSMVHSPRPTRAEISDVANAILDGTDAVMLSNETAVGKYPVEAVATMARIAVRTERDYFDLTYADRRQRLRALAMQELSQNNGNSPAGMRPKTLITDSISRAVGEIAQELDAVAVMTLTKTGATARNVSKFRPRTPILAVTPHVEVARRLQLVWGVHPLLVMDLATTRQTFQAAISLAQEDGLLKDGDLVVLSAGTLPGVAGSTDLIKVDVVKAVVAQGKGFGKGIVSGPARILRSSLDASKITAGDILVAQSTDANYVEAIKQAAGVITEEEGASSHAAVIGLRLGVPVLVGVKDATRLIRDGSIVTLNPEKGIVTAGADGLGF

SEQ ID NO: 566 - DNA, 1446 bp, Chlamydophila felis Fe/C-56
  CDS (1)..(1446): transl_table=11
atgatcgcaagaacgaaaatcatttgtactataggtccagcaacaaataccccagaaatgctagagaagctcttagacgcaggaatgaatgttgctaggttaaattttagccatggtactcatgaaagtcatggtcagacaatccgtctccttaaagaattgcgagaaagtaagggtgctcctttagccatcatgttagatactaagggacccgaagttcgcttgggaaaggttcctacaccaatcaaggtatctcggggtcagaaaatcaccttagtagggaaagatatcgaagggtctatggaagagggaattactttacatcctcggtgtgtgtttccttttgtgcgtgaaggtgcagaagtcctgatagatgatggatatattcaagcgattgtggtttctaccggtgatgatcatctggaattagaatttattaattccggagagttaaaatccaataagtctttgagtatcagagaaatagatcttgcattgccattcatgacggataaggatatcgctgatcttaagttcggggttgaacaaggtgttgatgttattgcagcttctttcgttcgctgtgcagaagatatagaaagcatgcgtaaatgcctagcagattttggacgtgcagatatgccaattattgctaagatagaaaatcggttgggcgtggaaaatttctctaagattgcccaggcttcagacgggattatgattgcccgaggggatttaggaattgagctttctgttgtagaagtccccactttacaaaagttcatggcaagagtgtctcgtgaaactggacgtttttgtattaccgctacgcaaatgttagaatctatgattcgcaatgtattgccaactcgtgctgaagtttcggatattgctaatgctatttatgacggtacgtctgcagtaatgttatcgggagaaacagcttcaggaagttatcctatagcagccgttaaaattatgcgatctgtgattcaggagacagaaaaaaatctcaattatagctctttccttaatcttaatgatagtgaatgtgctgttaaggtatctccttatcttcaatctataggcttatcaggaattcaaattgcagaaaaagcagaggctagagctattattgtttatacggaatctggaggatctccgatttttctttccaaataccgtcctcgcttcccaatcattgctgttacacctaatcgagatgtgtactataggcttgccttagagtggggtgtgtaccctatgcttacagaggaatccgtccgtgctgtatggcggcatcaagcttgtgtttatggtatcgaaaggggaattttatcaaattacgataaagttttagtcctgagtcgtggtgcgcaaatgaaagatacaaataatctgactttgacaacagtaaatgacatcattacagcatcagctaaataa

SEQ ID NO: 567 - protein, 481 aa, Chlamydophila felis Fe/C-56
MIARTKIICTIGPATNTPEMLEKLLDAGMNVARLNFSHGTHESHGQTIRLLKELRESKGAPLAIMLDTKGPEVRLGKVPTPIKVSRGQKITLVGKDIEGSMEEGITLHPRCVFPFVREGAEVLIDDGYIQAIVVSTGDDHLELEFINSGELKSNKSLSIREIDLALPFMTDKDIADLKFGVEQGVDVIAASFVRCAEDIESMRKCLADFGRADMPIIAKIENRLGVENFSKIAQASDGIMIARGDLGIELSVVEVPTLQKFMARVSRETGRFCITATQMLESMIRNVLPTRAEVSDIANAIYDGTSAVMLSGETASGSYPIAAVKIMRSVIQETEKNLNYSSFLNLNDSECAVKVSPYLQSIGLSGIQIAEKAEARAIIVYTESGGSPIFLSKYRPRFPIIAVTPNRDVYYRLALEWGVYPMLTEESVRAVWRHQACVYGIERGILSNYDKVLVLSRGAQMKDTNNLTLTTVNDIITASAK

SEQ ID NO: 568 - DNA, 1734 bp, Desulfitobacterium hafniense Y51
  CDS (1)..(1734): transl_table=11
atgcgccgcaccaaaatagtatgtaccatcggaccgtccagtgaatccaatgagaagattcgccaattacttaaggccggcatgaatgtagcccgtttaaatttctctcatggaacccatggtgagcatggcaagcggatacgaaccttaagagaagaagcacagaaactcggtgttcatttaggggttcttctggataccaaaggcccggaaatcagaacgggaacggttccggaggagggagttcaattaaacagcggtgatacctttattcttgataccgatctatcgactctggggtccgcagagcgggtgggtataacctaccttcagctttggcaggaggttcatcagggtacgcatatccttcttgatgatggtctcatcgaccttgaagtcattgccagtgaggaaggaaagatcatcaccaaaatccaaaatggcggagttcttaaatcgaaaaaaggggtcaatgtgccaggtgttccgattcagctgccggcgattacggaaaaagatcgtgatgatatcatctttggcttaagggaaggaatcgactttattgctgcttcttttgcccgcaaggctgccgatattttggccgtaaggcgtttggttgaggaagaaggggccaatgtcaagattatcgctaagattgaaaaccgcgaaggtatcgagcatttagatgagatcctggaggttgccgacggtctgatggtagcccgcggggatctgggagtggaggtgcctgtagaagaggtccccattcatcaaaaggacatgattgaaaaatgccatcatctgggtaaacccgtcatcgtggctacacagatgctggattccatgatccgcaacccgcggccgacccgggcggaagccagtgatgtggctaatgccattttagacggtaccgatgccatcatgctttccggggagacggctgccggacagtatccggtagaagctgtggagatgatgaataagatagctctgcagatcgaaaaacattatgaaccgcggaagatttatgacccccatatcaatattgccgaagccatcagtcatgccagctataccgtagccagagatctggaggcggccgctattcttactcctactcattccgggttgacggcccgcatgatctccaagtaccgtcccacctccctgattattgctgccacaccttttgttcatgtagcccgccaactctctttgacctggggaatttatcctttgctgattcccgagagcttaggcacggatcagcttttatctgtttctgtgaatgaagcgatttcccatcacctgatcaagaccggtgatgtggttgtcattaccgcaggggttcccgttggtaaagtagggaccaccaatatcatcaaagttcaggtcatcggggatgtgatcgcgaaaggaacggggattggccgcaaagcttattccggaacggcacggatagccacttcggctgctttggagcttttccaaaaaggagatatcctggtagcgccttataccgataaagagctgatccccttaatcgccaaagccggggcaattctggtggaagaagggggactcacctcccatggggcgatagccgccttaaactatggcattccggctattgtcggtgccgccgatgtgctgatgaaggttaaggatgggcaagtgctgactgtggatgctttggcaggtgtggtctatgagggcaccgtcagtattatctag

SEQ ID NO: 569 - protein, 577 aa, Desulfitobacterium hafniense Y51
MRRTKIVCTIGPSSESNEKIRQLLKAGMNVARLNFSHGTHGEHGKRIRTLREEAQKLGVHLGVLLDTKGPEIRTGTVPEEGVQLNSGDTFILDTDLSTLGSAERVGITYLQLWQEVHQGTHILLDDGLIDLEVIASEEGKIITKIQNGGVLKSKKGVNVPGVPIQLPAITEKDRDDIIFGLREGIDFIAASFARKAADILAVRRLVEEEGANVKIIAKIENREGIEHLDEILEVADGLMVARGDLGVEVPVEEVPIHQKDMIEKCHHLGKPVIVATQMLDSMIRNPRPTRAEASDVANAILDGTDAIMLSGETAAGQYPVEAVEMMNKIALQIEKHYEPRKIYDPHINIAEAISHASYTVARDLEAAAILTPTHSGLTARMISKYRPTSLIIAATPFVHVARQLSLTWGIYPLLIPESLGTDQLLSVSVNEAISHHLIKTGDVVVITAGVPVGKVGTTNIIKVQVIGDVIAKGTGIGRKAYSGTARIATSAALELFQKGDILVAPYTDKELIPLIAKAGAILVEEGGLTSHGAIAALNYGIPAIVGAADVLMKVKDGQVLTVDALAGVVYEGTVSII

SEQ ID NO: 570 - DNA, 1761 bp, Lactobacillus salivarius UCC118
  CDS (1)..(1761): transl_table=11
atgaaaaagaccaagatcgtaagtacccttggaccagctagttctgacctagatacaattgttaagttaatcgaagcaggtgcaaatgttttccgttttaatttctcacacggtgatcatgaagaacacttaggccgcatgaatttagttcatgaagctgaaaaaattactggtaaaacagtaggtttcttattagatacaaagggtgcagaaattcgtacaactgttcaaaaagaaggcaagattcattttgcaatcggtgatgaagtacgtatttctatggacgattctattgaaggtacaaaagaaaaaatcgctgtaacataccctggtttatacgatgacgttcacgaaggtggacatgtattgtttgacgacggtttgattgatatgcaaatcgaaaagaaagacgatgcaaacaaagaacttgtatgtaaagtattaaacgaaggtacacttggttctcgtaaaggtgttaatgctcctggtgtttctatcaacttacctggtattacagaaaaagactctgatgatatccgctttggtttagaccaagacattaactacattgctgcttccttcgtacgtaagccacaagatatcttagatattcgtgaattacttgaagaaaagcacatggaacatgtacaaatcttccctaagattgaatctcaagaaggtatcaacaactttgatgaaatcttgaaagtttctgatggtttaatgatcgctcgtggtgacatgggtgttgaaatcccagctgaaaatgttcctttggtacaaaaatcattaatcaagaagtgtaacttagctggtaagccagttatcacagctacacaaatgcttgattctatgcaagaaaacccacgtcctacacgtgctgaagcttctgacgttgctaacgctgtatttgatggtacagatgcaacaatgctttcgggtgaatctgcaaatggtgactaccctgtagaatccgttgctacaatggcacgtatcgacatcaagtctgaaaatgcattacgtcaacacaaagcattgacattggatgcatttgataagacagacgttacagaagcaattggtcgttcagttgctgaaacagcagaaaacttgaacattaagacaattgttgctgctacaaaatctggtcatacagcacgtatgatttctaagtaccgtccaaatgctgacattttagctgttacatttgatgatcgtacacgtcgtggtttaacagttaactggggtgtacaacctgtattggctgatgctccttcatcaactgatgaaatgttccaattagctacagaagaagctaagaaggctggtttagctaaggaaggcgacttgatcttaatcgttgctggtgttcctgtaggtgaaaaaggcactacaaacatcatgaagatccaattaattggttctaagttagtttcaggtcaaggtgttggtgatgaaactgttatcggtaagacagttgttgcaacatctgctgatgaagcaaacaagaacgctgttgaaggtggaatccttgtaacaaagacaactgacaaagattacttaccagctattgaaaaatcatctgctttaatcgttgaaaatggtggtttaacatctcatgcagctgtagtaggtatttctatgggtattcctgtagttgttggtgctaaggatgcaacatcattgatcaagagcggtgaagttgtaacagttgatagccgtcgtggtattgtataccatggtgcatcaaacgctctttaa

SEQ ID NO: 571 - protein, 586 aa, Lactobacillus salivarius UCC118
MKKTKIVSTLGPASSDLDTIVKLIEAGANVFRFNFSHGDHEEHLGRMNLVHEAEKITGKTVGFLLDTKGAEIRTTVQKEGKIHFAIGDEVRISMDDSIEGTKEKIAVTYPGLYDDVHEGGHVLFDDGLIDMQIEKKDDANKELVCKVLNEGTLGSRKGVNAPGVSINLPGITEKDSDDIRFGLDQDINYIAASFVRKPQDILDIRELLEEKHMEHVQIFPKIESQEGINNFDEILKVSDGLMIARGDMGVEIPAENVPLVQKSLIKKCNLAGKPVITATQMLDSMQENPRPTRAEASDVANAVFDGTDATMLSGESANGDYPVESVATMARIDIKSENALRQHKALTLDAFDKTDVTEAIGRSVAETAENLNIKTIVAATKSGHTARMISKYRPNADILAVTFDDRTRRGLTVNWGVQPVLADAPSSTDEMFQLATEEAKKAGLAKEGDLILIVAGVPVGEKGTTNIMKIQLIGSKLVSGQGVGDETVIGKTVVATSADEANKNAVEGGILVTKTTDKDYLPAIEKSSALIVENGGLTSHAAVVGISMGIPVVVGAKDATSLIKSGEVVTVDSRRGIVYHGASNAL

SEQ ID NO: 572 - DNA, 1629 bp, Escherichia coli UTI89
  CDS (1)..(1629): transl_table=11
atggtttcagcactttggactgtagaactcaacgactcaaaaacaggcactcacgttgggctgagacacaagcacacattcctctgcacgctttttcgatgtcacctatccttagagcgaggcacaaccactttcgtaataccggattcgctttccggcagtgcgcccagaaagcaagtttctcccatccttctcaacttaaagactaagactgtcatgaaaaagaccaaaattgtttgcaccatcggaccgaaaaccgaatctgaagagatgttagctaaaatgctggacgctggcatgaacgttatgcgtctgaacttctctcatggtgactatgcagaacacggtcagcgcattcagaatctgcgcaacgtgatgagcaaaactggtaaaaccgccgctatcctgcttgataccaaaggtccagaaatccgcaccatgaaactggaaggcggtaacgacgtttctctgaaagcgggtcagacctttactttcactactgataaatctgttatcggcaacagcgaaatggttgcggtaacgtatgaaggtttcactactgacctgtctgttggcaacaccgtactggttgacgacggtctgatcggtatggaagttaccgccattgaaggtaacaaagttatctgtaaagtgctgaacaacggcgacctgggcgaaaacaaaggtgtgaacctgcctggcgtttccattgccctgccagcactggctgaaaaagacaaacaggacctgatctttggttgcgaacaaggcgtagactttgttgctgcttcctttattcgtaagcgttctgacgttatcgaaatccgtgagcacctgaaagcgcacggcggcgaaaacatccacatcatctccaaaatcgaaaaccaggaaggcctcaacaacttcgacgaaatcctcgaagcctctgacggcatcatggttgcgcgtggcgacctgggtgtagaaatcccggtagaagaagttatcttcgcccagaagatgatgatcgaaaaatgtatccgtgcacgtaaagtcgttatcactgcgacccagatgctggattccatgatcaaaaacccacgcccgactcgcgcagaagccggtgacgttgcaaacgccatcctcgacggtactgacgcagtgatgctgtctggtgaatccgcaaaaggtaaatacccgctggaagcggtttctatcatggcgaccatctgcgaacgtaccgaccgcgtgatgaacagccgtctcgagttcaacaatgacaaccgtaaactgcgtattaccgaagcggtatgccgtggtgccgttgaaactgctgaaaaactggatgctccactgatcgtggttgctactcagggcggtaaatctgctcgcgcagtacgtaaatacttcccggatgccaccatcctggcactgaccaccaacgaaaaaacggctcaccagttagtactgagcaaaggcgttgtgccgcagctggttaaagagatcacttctactgatgacttctaccgtctgggtaaagaactggctctgcagagcggtctggcacacaaaggtgatgtcgtagttatggtttctggtgcactggtaccgagcggcactactaacaccgcatctgttcacgtcctgtaa

SEQ ID NO: 573 - protein, 542 aa, Escherichia coli UTI89
MVSALWTVELNDSKTGTHVGLRHKHTFLCTLFRCHLSLERGTTTFVIPDSLSGSAPRKQVSPILLNLKTKTVMKKTKIVCTIGPKTESEEMLAKMLDAGMNVMRLNFSHGDYAEHGQRIQNLRNVMSKTGKTAAILLDTKGPEIRTMKLEGGNDVSLKAGQTFTFTTDKSVIGNSEMVAVTYEGFTTDLSVGNTVLVDDGLIGMEVTAIEGNKVICKVLNNGDLGENKGVNLPGVSIALPALAEKDKQDLIFGCEQGVDFVAASFIRKRSDVIEIREHLKAHGGENIHIISKIENQEGLNNFDEILEASDGIMVARGDLGVEIPVEEVIFAQKMMIEKCIRARKVVITATQMLDSMIKNPRPTRAEAGDVANAILDGTDAVMLSGESAKGKYPLEAVSIMATICERTDRVMNSRLEFNNDNRKLRITEAVCRGAVETAEKLDAPLIVVATQGGKSARAVRKYFPDATILALTTNEKTAHQLVLSKGVVPQLVKEITSTDDFYRLGKELALQSGLAHKGDVVVMVSGALVPSGTTNTASVHVL

SEQ ID NO: 574 - DNA, 1449 bp, Deinococcus geothermalis DSM 11300
  CDS (1)..(1449): transl_table=11
atgaaacactttgacagggcaaccaagattgtcgccacgatcggcccggcgagccgaaatccagagacgctcgggcgcatgatcgatgcgggcctgaatgtggtccgcatgaatttcagtcacggggacccggaggaccaccgtcagacggtgcagctggtgcgcgagttggcggccaagaagggcgtgaccatcggtattctgcaagatctccagggtccgaagatccgggtaggccgcttccgcgagggcgccgtcaagctggagccggggcagaagtttaccatcacgatggacgatgtggagggtgacgagacgcacgtcagcagcacctacaagggtctggcactggatgtgcatcccggcatgatcctgctgctcgacgacgggaacttggcgctcaaagttgatcaggtgcgcggtcaagagattctgacgaccgtcgtgatcggcggagtcctgaagaacaacaagggcatcaatgtgccgcaggccgaccttgctgtgcctgcgctctccgacaaggacgtacaggacatggagttcggcgcgcagctgggggtggactgggtggcgctctcgtttgtgcgttcgcgtgacgacctgctgctggcccgccattacctcgcccgcttcggcagccgggccaagctgatggcgaagatcgagaaaccgcaggcagtggaccgcttcgaggacatcttgcgagaggtggacggcatcatggtagcgcgcggcgacctgggggtggagatgcgccctgagcaggtgccgacgatccagaagcgcctgattcgtctgtgccgcgaggccgggaagccggtgatcaccgccacccagatgctcgagagcatgatcaatctgccgcgccccacccgtgccgaggcgtccgacgtggcgaatgcgatctatgacggtaccgacgcggtgatgctctcggccgagtcggcggcgggccaatacccggtcgaggcggtggcgatgatggaccgcatcgcgcgcgaagccgaagccagcgagcactacgagctgatgcagcgtcagctcgttgtagaaaccgagctggcgcaggattccattgcctttgctgcttgctctatcggcgagaagctggaagcgtccgccattgtgacctttaccagcactggcggagcagcaatgcgtgtggcaaagtaccgtccccccctcgccatcctggccctaacccccaatgagcagacccgcaaccagctcgccctctcgtggggtgtcgtgccgatgctcagcgaggatccacacgataccgacgacatggtgcgcatcgccaatgacgaactgaagaaaagcggcctcgccgatgtaggcgaccggtacgtcatcaccgccggcgtgccctttggcgtgcgcggcaccaccaacatgctgcgtgtcgagcgactgcgtgaggaagatctgagcgaaagggtttaa

SEQ ID NO: 575 - protein, 482 aa, Deinococcus geothermalis DSM 11300
MKHFDRATKIVATIGPASRNPETLGRMIDAGLNVVRMNFSHGDPEDHRQTVQLVRELAAKKGVTIGILQDLQGPKIRVGRFREGAVKLEPGQKFTITMDDVEGDETHVSSTYKGLALDVHPGMILLLDDGNLALKVDQVRGQEILTTVVIGGVLKNNKGINVPQADLAVPALSDKDVQDMEFGAQLGVDWVALSFVRSRDDLLLARHYLARFGSRAKLMAKIEKPQAVDRFEDILREVDGIMVARGDLGVEMRPEQVPTIQKRLIRLCREAGKPVITATQMLESMINLPRPTRAEASDVANAIYDGTDAVMLSAESAAGQYPVEAVAMMDRIAREAEASEHYELMQRQLVVETELAQDSIAFAACSIGEKLEASAIVTFTSTGGAAMRVAKYRPPLAILALTPNEQTRNQLALSWGVVPMLSEDPHDTDDMVRIANDELKKSGLADVGDRYVITAGVPFGVRGTTNMLRVERLREEDLSERV

SEQ ID NO: 576 - DNA, 1770 bp, Lactobacillus delbrueckii subsp. bulgaricus ATCC 11842
  CDS (1)..(1770): transl_table=11
atgaaaaaaacaaagattgttagtactttagggccagcttcagacgatattgaaactattaccaagttagccgaagcaggcgcaaacgtattccgtttcaacttctcacacggtaaccacgaagaacacttggcaagaatgaacatggttcgtgaagttgaaaagaagactggcaagcttttgggcatcgctttggacaccaagggtgctgaaatcagaaccactgaccaagaaggcggcaagttcactatcaacactggtgacgaaatccgcgtgtcaatggacgcaaccaaggccggcaacaaggacatgatccacgttacctacccaggtctgttcgacgacactcacgtaggcggcactgtattgatcgacgacggtgctgttggtttgactatcaaggccaaggacgaagaaaagcgcgaattggtttgtgaagctcaaaacactggtgtcatcggctcaaagaagggtgttaacgctccaggtgttgaaatccgcctcccagggattactgaaaaggacactgacgacatccgctttggtttgaagcacggtattaacttcatctttgcttcatttgtacgtaaggctcaagacgttcttgacattcgcgcactttgcgaagaagctaacgcatcatacgttaagatcttcccaaagattgaatcacaagaaggtattgacaacatcgacgaaatcttgcaagtttcagatggtttgatggttgcccgtggtgacatgggtgttgaaatcccattcatcaacgtgccatttgttcaaaagactttgatcaagaagtgcaacgctttgggcaagccagttatcactgctactcaaatgctggactcaatgcaagaaaacccacgtccaacccgtgccgaagtaactgacgttgctaacgccgttcttgacggtactgacgcaactatgctgtcaggtgaatcagcaaacggtttgtacccagtacaatcagttcaagctatgcacgacatcgatgttcggactgaaaaggaattggacacccggaacactctggctctgcaacgctttgaagaatacaagggctcaaacgttactgaagctatcggtgaatcagttgtccgcactgctcaagaactgggcgttaagactatcatcgctgctactagctccggctacacagctcgtatgatctccaagtaccgtccagacgcaaccatcgttgccttgactttcgacgaaaagatccaacactcattgggtatcgtttggggcgttgaaccagttttggcaaagaaaccttcaaacactgacgaaatgttcgaagaagctgcccgcgtagctaaggaacacggtttcgttaaggatggcgacctggtaatcatcgttgccggcgtaccattcggccaatcaggtactactaacttgatgaagctgcaaatcatcggcaaccaacttgctcaaggtttgggcgtaggcactggctcagttatcggcaaggctgttgttgcgaacagcgctgaagaagccaacgctaaggttcacgaaggcgacatcctggtagctaagactactgacaaggactacatgccagctatcaagaaggccagcggtatgatcgttgaagcttccggcttgaccagccacgcagctgttgtcggcgtatcactcggcattccagttgttgtcggtgttgctgacgcaacttcaaagatcgctgacggctcaactttgactgttgacgcacgtcgcggcgcaatttaccaaggtgaagtttcaaacctgtaa

SEQ ID NO: 577 - protein, 589 aa, Lactobacillus delbrueckii subsp. bulgaricus ATCC 11842
MKKTKIVSTLGPASDDIETITKLAEAGANVFRFNFSHGNHEEHLARMNMVREVEKKTGKLLGIALDTKGAEIRTTDQEGGKFTINTGDEIRVSMDATKAGNKDMIHVTYPGLFDDTHVGGTVLIDDGAVGLTIKAKDEEKRELVCEAQNTGVIGSKKGVNAPGVEIRLPGITEKDTDDIRFGLKHGINFIFASFVRKAQDVLDIRALCEEANASYVKIFPKIESQEGIDNIDEILQVSDGLMVARGDMGVEIPFINVPFVQKTLIKKCNALGKPVITATQMLDSMQENPRPTRAEVTDVANAVLDGTDATMLSGESANGLYPVQSVQAMHDIDVRTEKELDTRNTLALQRFEEYKGSNVTEAIGESVVRTAQELGVKTIIAATSSGYTARMISKYRPDATIVALTFDEKIQHSLGIVWGVEPVLAKKPSNTDEMFEEAARVAKEHGFVKDGDLVIIVAGVPFGQSGTTNLMKLQIIGNQLAQGLGVGTGSVIGKAVVANSAEEANAKVHEGDILVAKTTDKDYMPAIKKASGMIVEASGLTSHAAVVGVSLGIPVVVGVADATSKIADGSTLTVDARRGAIYQGEVSNL

SEQ ID NO: 578 - DNA, 1434 bp, Myxococcus xanthus DK 1622
  CDS (1)..(1434): transl_table=11
atgcgaagagcgaagattgtctgcaccctcggtcccgccagccagagccaggagatgctcgaagcgctcctggagaacggcatggacgtggctcgcctgaacttctcccacggcagccacgagcagcacgcggagaacatcgcgaagctgcgcgccgcgtcgctgaaggttcgcaaggcggtgggcatcctcggcgacctgcaaggcccgaagattcgcactggccgtttcgtgaagggcagcaccgagctgaaggaaggcggcaccttccacatcaccacggatgaaacggtcccgggcacggacgaaatcgtgtccacgacgtacccgttcctggccgcggacgtgaatccgggggaccgcatcctcctggatgacggcctgctggagctgaaggtcctggagacggacaagcagaagctcatccgcacgcaggtcatccacggcggcacgctgaagaacaacaagggcatcaacctgcccggcgtggcggtgcgcgcggaggcgctgacgccgaaggaccgtgaggacctggtgttcgggatcaaggccggcgtggattacatcgcgctgtccttcgtgcgccagccgtccgacctggacaccgcgcgccaggccatggccgaggtgggccgcacggtgcccatcatcgccaagctggagaagccggaggccattgcccggctggacgccatcctggacaagacggacggcgtgatggtggcgcgcggcgacctgggcgtggagattccccccgaggaagtgccggccgtccagaaggacatcatccggcgctccaacctgcgcggcctgcccgtcatcgtggccacgcagatgctgaactccatgattgataacccgcgccccacgcgcgccgaggccagcgacgtggccaacgccgtgttcgacggcgcggacgcggtgatgctgtcgggcgagacggccagcggcaagttccccatcgagtccgtgcagatgatggagcgcatcatcctggcggccgagtcctccgcgcgcacgacgcagtcgctgatgcgcgtgctggagacgccggtggggctgcccaaccacttcccggacgtcatcgcgcgcgtggcctgcgaggcggccaaggcgagcaacgcctcgctcatcgcggccttcacgctgtcgggtgtgacggcgcgcctgctgtcgcactaccggcccccggtgccgattgtcgccttcagccccaaccaggaagtgcgccgccggctgtcgctgttgtggggcgtggtgccgcgcgtgctggagcccacccaggacaccgaggccatggtgaagcgcgtggaggaagagctcctggcgcgaggcctgggccgcaagggcgaccgcatcgtcatcgtgttcggcgcgcccgtggggcagccgggcaagatcaacagcctgcgcctgcacaccatccagggctga

SEQ ID NO: 579 - protein, 477 aa, Myxococcus xanthus DK 1622
MRRAKIVCTLGPASQSQEMLEALLENGMDVARLNFSHGSHEQHAENIAKLRAASLKVRKAVGILGDLQGPKIRTGRFVKGSTELKEGGTFHITTDETVPGTDEIVSTTYPFLAADVNPGDRILLDDGLLELKVLETDKQKLIRTQVIHGGTLKNNKGINLPGVAVRAEALTPKDREDLVFGIKAGVDYIALSFVRQPSDLDTARQAMAEVGRTVPIIAKLEKPEAIARLDAILDKTDGVMVARGDLGVEIPPEEVPAVQKDIIRRSNLRGLPVIVATQMLNSMIDNPRPTRAEASDVANAVFDGADAVMLSGETASGKFPIESVQMMERIILAAESSARTTQSLMRVLETPVGLPNHFPDVIARVACEAAKASNASLIAAFTLSGVTARLLSHYRPPVPIVAFSPNQEVRRRLSLLWGVVPRVLEPTQDTEAMVKRVEEELLARGLGRKGDRIVIVFGAPVGQPGKINSLRLHTIQG

SEQ ID NO: 580 - DNA, 1761 bp, Haloquadratum walsbyi DSM 16790
  CDS (1)..(1761): transl_table=11
atgcgaaacgctaaaatcgtctgtacgctcggaccagcgtctgacgaacagtcgacaattcgggctctcgtcaacgcaggtatgagtgttgcccggcttaacgccagtcatggcacacctgaccatcgacggttagttatcgatcgaattagaaatgttgataaagtaactgataaacccgtggctgcgatggttgacttacaggggcctgaagtacggacagctccgtcgtccgattcaatatctattggttcagatagtgagattcgattcaccaccggtgatgaaataacccctgaggtaatcggtctctcatattcaattgatgctgttgaccctggtgataccgtgttacttgatgatggtcgaatcgaaacaacagttcgaagtgttgattcggatggtgtcattgcgcatgtcgactccggtggcgaactcggtggtcgaaaaggggtcaatgtcccgggcgtcaatcttgatattgacctccttactgagagcgaccgagaggaccttcgtgttgctgctgaagcgaatgctgattttgtcgccgcgtcgttcgtccggtcagcggctgatgtatacatgatcagcgacgcgcttgacgctcttggcggtgatatccctgttgttgcaaaaatagagcgcgctggtgctgttgaaaatcttgatgagattatcgatgcagcctatggaatcatggtcgcacgtggtgatctgggtgttgagatgccacttgaggaggtgccagttattcaaaagcgcattatcactcaatgtcacgacactggaaccccggtcatcactgcgactgagatgcttgattcaatggttcaggcgcgtcgcccaacgcgtgcagaggcttcagatgtcgccaatgcagttcttgatgggaccgatgcagtgatgctttctggtgaaacagcgatcggtgataaccctgtccgtgttgttgagacaatggacaggatcgtccgacagatcgaatcaagtgctgaatatggtaccattgagcaagagcatgttccgactgctgcagagaattcacgcacggaggcacttgcacggtcagcgcggtatcttgctcgtgacgttggtgcaagtgctattgttgcagcgtctgagtctggctatacagctcgaaaaacagcgaaatttcgtccgggagtaccggttattgcaataacaccaaatgaccgtgttcgtcgacaattaacgctttcatggggagtagcctcaacatattctgggtctcacggagatattgagggaatgatggaggatgctgttgatgcagcgcttgatgcaaacgttgccagttcaggggatacgattgttgtgctttcagggatgatgacagaacttgaagggacgaatacaacaaatatgctcaaagtacacgttgttgctgaaacaattgcaactggacggaaagttgttggaggtcgcactgctggaccactggcaacgccaactgacggcagacttgatgagatcccgcatggagcaatcctcgcgcttcctgctgattttgatgctgaatttgatcatgatgcagcgatgcttggtggaattattgatgcacgcccaggtatgaccggctatcctgctgttattgcacgcgaacttgatattccgatgatctcaggtgcaccattaccccctcagatctcggatggcaccgcgattacaatccatgctgagcgaggtattgtatatgagggcgatctcacccgctcacatgatcaggaccgaaactga

SEQ ID NO: 581 - protein, 586 aa, Haloquadratum walsbyi DSM 16790
MRNAKIVCTLGPASDEQSTIRALVNAGMSVARLNASHGTPDHRRLVIDRIRNVDKVTDKPVAAMVDLQGPEVRTAPSSDSISIGSDSEIRFTTGDEITPEVIGLSYSIDAVDPGDTVLLDDGRIETTVRSVDSDGVIAHVDSGGELGGRKGVNVPGVNLDIDLLTESDREDLRVAAEANADFVAASFVRSAADVYMISDALDALGGDIPVVAKIERAGAVENLDEIIDAAYGIMVARGDLGVEMPLEEVPVIQKRIITQCHDTGTPVITATEMLDSMVQARRPTRAEASDVANAVLDGTDAVMLSGETAIGDNPVRVVETMDRIVRQIESSAEYGTIEQEHVPTAAENSRTEALARSARYLARDVGASAIVAASESGYTARKTAKFRPGVPVIAITPNDRVRRQLTLSWGVASTYSGSHGDIEGMMEDAVDAALDANVASSGDTIVVLSGMMTELEGTNTTNMLKVHVVAETIATGRKVVGGRTAGPLATPTDGRLDEIPHGAILALPADFDAEFDHDAAMLGGIIDARPGMTGYPAVIARELDIPMISGAPLPPQISDGTAITIHAERGIVYEGDLTRSHDQDRN

SEQ ID NO: 582 - DNA, 1752 bp, uncultured methanogenic archaeon RC-I
  CDS (1)..(1752): transl_table=11
atgaggaagaccaagatcgtttgtactatcggccctgcgtgcgatagccaggacatgctggaaaagctggccgtagccggaatgaacgtagccaggctgaacatgtctcatgcagatcacgagcatactgttcagactatcaataacattcgcatggtttcagaggcgataggcaagccgatcggcatactgatggacctccagggcccgaagatccgggtcggcaccctgcagcagccggcaaacctgaagccgggaggaacttttaccctgaccaccagagacgtgcctggagacagccaggaagtcaacgtccccttcaaagagcttccccagtcggtgagcacgggccagacgctgctcctcgacgacgggctgatcgagctaaaggtggacgctgtcaccgagacggatatacggacaaaagtagtcaggggcggagagctgaaatccaaaaaaggcatcaacctgccccagagcacgatcaggattccttcgatcaccgaaaaagacgtaagagatctcgagttcggcatcgagcatgaagtcgatatgatcgccatgtctttcgttcgaaagcctcaggacgtcctcgatctgaggaaaaagatcgaagacaatgactccgatatccccattatttcgaagatcgagaagcacgaggcggtcaagaacatcgacggcatcatagacgttgtcgacggcgtgatggttgcccgcggcgatctggggatcgagattcccatggccgaggtgccaatcgtacagaaaatgatcatctcgaaatgcattgcccgagggatcccggttattacggccacccagatgctggactctatgatcaggaacccgatacctacccgggcagaggctacggacgtggccaacgcagttttcgacggcacagacgccctgatgctgtccggagagaccgccttcggcgaatatcctgtcaaagccgtagagaccatggccagaatcgcgaagtatacggaagagtctacttattacaagcatgcgatagctgcaaaagccccaaagccctctctatcaatgacggatgcggtcgcccagagcacgactgagtccgccagagtactcaaagcgcaggcgatcatcaccgcaactcagaccggctattccgccaggaaagtctccaaataccggccgcagctgcccattcttgcagtgaccaacgatccgaaggtggtaaaccgtctcacgctttcgtgggcggtcttacccttactgatcggcagcccggggaacctcgacgagctgattcaggactctgtggacgcctgcctgcaaaagggctacgtcaagaacggggacctggtcgtgataacggctggcgtgatgaccggcattcctggcggcactaacatcatgaaaatccacgttgtggcaaaagagcttgccagaggcataggcgtgggcaaggacatcgtgaaaggcgtggccagggtgattaagtctccctccgagttcacaaatatccgtagcggcgatattctggtgatcaaagaggtcgatgtcgatcacatagacgacgtgaagccggcgcgtgcgataatctcggaggaaaccggattgacgtcctacagtgctattataggcagagagctcaatatccccgttgtagtgggcataaagaacgctacgagaattattcaggatggcagcactattactgttgactcagtgcgaggcatggtctacgagggatccatcaatctgccgggcgaataa

SEQ ID NO: 583 - protein, 583 aa, uncultured methanogenic archaeon RC-I
MRKTKIVCTIGPACDSQDMLEKLAVAGMNVARLNMSHADHEHTVQTINNIRMVSEAIGKPIGILMDLQGPKIRVGTLQQPANLKPGGTFTLTTRDVPGDSQEVNVPFKELPQSVSTGQTLLLDDGLIELKVDAVTETDIRTKVVRGGELKSKKGINLPQSTIRIPSITEKDVRDLEFGIEHEVDMIAMSFVRKPQDVLDLRKKIEDNDSDIPIISKIEKHEAVKNIDGIIDVVDGVMVARGDLGIEIPMAEVPIVQKMIISKCIARGIPVITATQMLDSMIRNPIPTRAEATDVANAVFDGTDALMLSGETAFGEYPVKAVETMARIAKYTEESTYYKHAIAAKAPKPSLSMTDAVAQSTTESARVLKAQAIITATQTGYSARKVSKYRPQLPILAVTNDPKVVNRLTLSWAVLPLLIGSPGNLDELIQDSVDACLQKGYVKNGDLVVITAGVMTGIPGGTNIMKIHVVAKELARGIGVGKDIVKGVARVIKSPSEFTNIRSGDILVIKEVDVDHIDDVKPARAIISEETGLTSYSAIIGRELNIPVVVGIKNATRIIQDGSTITVDSVRGMVYEGSINLPGE

SEQ ID NO: 584 - DNA, 1629 bp, Shigella flexneri 5 str. 8401
  CDS (1)..(1629): transl_table=11
atggtttcagcactttggactgtagaactcaacgactcaaaaacagacactcacgttgggctgagacacaagcacacattcctctgcacgctttttcgatgtcacctatccttagagcgaggcaccaccactttcgtaataccggattcgctttccggcagtgcgcccagaaagcaagtttctcccatccttctcaacttaaagactaagactgtcatgaaaaagaccaaaattgtttgcaccatcggaccgaaaaccgaatctgaagagatgttagctaaaatgctggacgctggcatgaacgttatgcgtctgaacttctctcatggtgactatgcagaacacggtcagcgcattcagaatctgcgcaacgtgatgagcaaaactggtaaaaccgccgctatcctgcttgataccaaaggtccggaaatccgcaccatgaaactggaaggcggtaacgatgtttctctgaaagctggtcagacctttactttcaccactgataaatctgttatcggcaacagcgaaatggttgcggtaacgtatgaaggtttcactactgacctgtctgttggcaacaccgtactggttgacgatggtctgatcggtatggaagttaccgccattgaaggtaacaaagttatctgtaaagtgctgaacaacggtgacctgggcgaaaacaaaggtgtgaacctgcctggcgtttccattgctctgccagcactggctgaaaaagacaaacaggacctgatctttggttgcgaaaaaggcgtagactttgttgctgcttcctttattcgtaagcgttctgacgttatcgaaatccgtgagcacctgaaagcgcacggcggcgaaaacatccacatcatctccaaaatcgaaaaccaggaaggcctcaacaacttcgacgaaatcctcgaagcctctgacggcatcatggttgcgcgtggcgacctgggtgtagaaatcccggtagaagaagttatcttcgcccagaagatgatgatcgaaaaatgtatccgtgcacgtaaagtcgttatcactgcgacccagatgctggattccatgatcaaaaacccacgcccgactcgcgcagaagccggtgacgttgcaaacgccatcctcgacggtactgacgcagtgatgctgtctggtgaatccgcaaaaggtaaatacccgctggaagcggtttctatcatggcgaccatctgcgaacgtaccgaccgcgtgatgaacagccgtctcgagttcaacaatgacaaccgtaaactgcgcatcaccgaagcggtatgccgtggtgccgttgaaactgctgaaaaactggatgctccgctgatcgtggttgctacccagggcggtaaatctgctcgcgcagtacgtaaatacttcccggatgccaccatcctggcactgaccaccaacgaaaaaacggctcatcagttggtactgagcaaaggcgttgtgccgcagctggttaaagagatcacttctactgatgatttctaccgtctgggtaaagaactggctctgcagagcggtctggcacacaaaggtgacgtcgtagttatggtttctggtgcactggtaccgagcggcactactaacaccgcatctgttcacgtcctgtaa

SEQ ID NO: 585 - protein, 542 aa, Shigella flexneri 5 str. 8401
MVSALWTVELNDSKTDTHVGLRHKHTFLCTLFRCHLSLERGTTTFVIPDSLSGSAPRKQVSPILLNLKTKTVMKKTKIVCTIGPKTESEEMLAKMLDAGMNVMRLNFSHGDYAEHGQRIQNLRNVMSKTGKTAAILLDTKGPEIRTMKLEGGNDVSLKAGQTFTFTTDKSVIGNSEMVAVTYEGFTTDLSVGNTVLVDDGLIGMEVTAIEGNKVICKVLNNGDLGENKGVNLPGVSIALPALAEKDKQDLIFGCEKGVDFVAASFIRKRSDVIEIREHLKAHGGENIHIISKIENQEGLNNFDEILEASDGIMVARGDLGVEIPVEEVIFAQKMMIEKCIRARKVVITATQMLDSMIKNPRPTRAEAGDVANAILDGTDAVMLSGESAKGKYPLEAVSIMATICERTDRVMNSRLEFNNDNRKLRITEAVCRGAVETAEKLDAPLIVVATQGGKSARAVRKYFPDATILALTTNEKTAHQLVLSKGVVPQLVKEITSTDDFYRLGKELALQSGLAHKGDVVVMVSGALVPSGTTNTASVHVL

SEQ ID NO: 586 - DNA, 1404 bp, Clostridium perfringens ATCC 13124
  CDS (1)..(1404): transl_table=11
atgagaagaacaaaattagtatgcactatcggaccagctagtgaaaacgaagaaatcttaacaaaaataatcgaagcaggtatgaacgcttcaagacacaatttctcacatggtgaccatgaagaacataaaggaagaatggttaaagtaagagaaatatcaaaaaaattaggtaaagaagtagctatattattagatactaaaggacctgaaataagaactggaaaattcgagccaagcaaagttgaattaactgctggaactgaatttactatatatgctggagcagaagacgtaataggagacactactaagtgttcagttacatatgctggattagctaaagacgttaaagctggagatactatcttaatagacgacggtttagttggattagaagttgtatctgtagaaggaaacgctgttaaatgtgtagtaagaaacactggattagttggaactcacaaaggagttaacgttcctggagtatcaataaaattaccagctatgactgataaagatagagctgacttaatattcggttgtgaaatgggcgttaacatggttgctgcttcattcataagaaaagcagaagacgttaaagctataagagaagtattaattgctaacggtggagctgatatacaaatattctcaaaaatcgaaaaccaagaaggtgttgataacatagatgctatcatcgaagcttcagacggtatcatggtagctagaggagaccttggtgttgaaataccaatggaagacgttccttcagttcaaaaaatgatcatcgaaaaatgtaacaatgctggaaaaccagttataactgctactcaaatgttagactcaatgatgagaaacccaagaccaacaagagctgaggtttcagacgtaactaacgctatcttagatggtactgatgctatcatgttaagtggtgagtcagctaacggaagctggccagtagaagctgttgaaactatggttaaaatagctactaaatcagaagaaatgttaagctacgaattagcttcatcaaaagctaaaaaacatataccagctgtaccaggagttatctcaagagctgcttgtaatgctgcacacgagttaaaatcagctgctatagtttcattaactcaatcaggagctactgctaagagaatatctcaatgcagaccagatgcaccaatcgttactgtaactccaaatgaaagagttgctaagaaagttgctttatgcttcggagtttacccagttgttgctgaaaatgctacaatggaaaacgctgttgaaatagctaaaaatgctggattcgttaaagctaatgacactgctgtagttgttgcaggtgtaccagctaacgaaggaaacactaacatagtaaaagttgaagttgtaaaataa

SEQ ID NO: 587 - protein, 467 aa, Clostridium perfringens ATCC 13124
MRRTKLVCTIGPASENEEILTKIIEAGMNASRHNFSHGDHEEHKGRMVKVREISKKLGKEVAILLDTKGPEIRTGKFEPSKVELTAGTEFTIYAGAEDVIGDTTKCSVTYAGLAKDVKAGDTILIDDGLVGLEVVSVEGNAVKCVVRNTGLVGTHKGVNVPGVSIKLPAMTDKDRADLIFGCEMGVNMVAASFIRKAEDVKAIREVLIANGGADIQIFSKIENQEGVDNIDAIIEASDGIMVARGDLGVEIPMEDVPSVQKMIIEKCNNAGKPVITATQMLDSMMRNPRPTRAEVSDVTNAILDGTDAIMLSGESANGSWPVEAVETMVKIATKSEEMLSYELASSKAKKHIPAVPGVISRAACNAAHELKSAAIVSLTQSGATAKRISQCRPDAPIVTVTPNERVAKKVALCFGVYPVVAENATMENAVEIAKNAGFVKANDTAVVVAGVPANEGNTNIVKVEVVK

SEQ ID NO: 588 - DNA, 1425 bp, Clostridium perfringens ATCC 13124
  CDS (1)..(1425): transl_table=11
atgcaaaaaacaaaaatgatatttacaattggtcctgcaagtgattcagaagaaattctaagagagttcataagaattggtatgaatgcagctagattaaacttctcacatggagaccatgcaagtcataaagaaaagatagaacttattaagagacttagaaaagaagaaaaatcagctacagctatcttattagacattaagggtcctaaaataagaacacataattttaaaaatggcgaagctgaattaaaaaatggtgatgaattcacattctcttgcggagatgaaatattaggtgataacactaaatgttcaatctcttataaagaactatatgaagacataaaacctggtggatcaatacttgttgatgatggacttttagaatttaaagtaaaggaagtccgtggaactgatataatatgtgaagttattgaaggaggtactataaaagaccataaaggtgtaaatgtacctaatgtaccaatcaaactccctgcagtaactgaaaaggatagatctgacttaatatttggttgcgaaatggaagtagactttgtagcagcttctttcataagaaaacctgaggatgtacttgaagttagagaaattctagactctcatggtggaaaagatataaaaataatatcaaaaatagaaagccaagaaggtgtagataacataaaagaaataattaaggttactgatggtgtaatggttgctagaggtgatatgggagtagaaattcctatagaaaatgtacctataattcaaaaaaatataattaagaaatgtaatcaagcagggaaaatagttataacggcaactcaaatgttagattctatgataagaaatccaagacctactagagctgaagcttctgacgtatgtaatgccatatttgatggtacagatgccataatgcttagtggagaaagtgcttctggtagcttccctatagaggcagcaatgacaatgtctagaatagcaaaaaaagcagaagctaacttagactataattatcttttaagaagattaaaggatccaaatccaaatccagatgcctttgcagatgccataagttattcagcatcaaaaacagctagcaaattccctacaaaagctatagtagcagccactcagactggttcaacagctaagatattatcaaaatataaacctagctgtccaataatagctattactccatatgaaaaagttagaagaagcctagctttaaactttggaataatttctaagaaatgcgcttattttaatagcacagatgagatcatagaggaagctagaaaagtagctaaagaattccaaatagctgaaactggagataatataatggtagctgctgggttcccaacatcaataactggtggaacaaacatgctaaaaattgaaaaaatataa

SEQ ID NO: 589 - protein, 474 aa, Clostridium perfringens ATCC 13124
MQKTKMIFTIGPASDSEEILREFIRIGMNAARLNFSHGDHASHKEKIELIKRLRKEEKSATAILLDIKGPKIRTHNFKNGEAELKNGDEFTFSCGDEILGDNTKCSISYKELYEDIKPGGSILVDDGLLEFKVKEVRGTDIICEVIEGGTIKDHKGVNVPNVPIKLPAVTEKDRSDLIFGCEMEVDFVAASFIRKPEDVLEVREILDSHGGKDIKIISKIESQEGVDNIKEIIKVTDGVMVARGDMGVEIPIENVPIIQKNIIKKCNQAGKIVITATQMLDSMIRNPRPTRAEASDVCNAIFDGTDAIMLSGESASGSFPIEAAMTMSRIAKKAEANLDYNYLLRRLKDPNPNPDAFADAISYSASKTASKFPTKAIVAATQTGSTAKILSKYKPSCPIIAITPYEKVRRSLALNFGIISKKCAYFNSTDEIIEEARKVAKEFQIAETGDNIMVAAGFPTSITGGTNMLKIEKI

SEQ ID NO: 590 - DNA, 1404 bp, Clostridium perfringens SM101
  CDS (1)..(1404): transl_table=11
atgagaagaacaaaattagtatgcactatcggaccagctagtgaaaacgaagaaatcttaacaaaaataatcgaagcaggtatgaacgcttcaagacacaatttctcacatggtgaccatgaagaacataaaggaagaatggttaaagtaagagaaatatcaaaaaaattaggtaaagaagtagctatcttattagatactaaaggacctgaaataagaactggaaaattcgagccaagcaaagttgaattaactgctggaactgaatttactatatatgctggagcagaagatataataggagacactactaagtgttcagttacatatgctggattagctaaagacgttaaagctggagatactatcttaatagacgacggtttagttggattagaagttgtatctgtagaaggaaacgctgttaaatgtgtagtaagaaacactggattagttggaactcacaaaggagttaacgttcctggagtatcaataaaattaccagctatgactgataaagatagagctgacttaatatttggttgtgaaatgggcgttaacatggttgctgcttcattcataagaaaagcagaagacgttaaagctataagagaagtattagttgctaacggtggagctgatatacaaatattctcaaaaatcgaaaaccaagaaggtgttgataacatagatgctatcatcgaagcttcagacggtatcatggtagctagaggagaccttggtgttgaaataccaatggaagacgttccttcagttcaaaaaatgatcatcgaaaaatgtaacaatgctggaaaaccagttataactgctactcaaatgttagactcaatgatgagaaacccaagaccaacaagagctgaggtttcagacgtaactaacgctatcttagatggtactgatgctatcatgttaagtggtgagtcagctaacggaagctggccagtagaagctgttgaaactatggttaaaatagctactaaatcagaagaaatgttaagctacgaattagcttcatcaaaagctaaaaaacacataccagctgtaccaggagttatctcaagagctgcttgtaacgctgcacacgagttaaaatcagctgctatagtttcattaactcaatcaggagctactgctaagagaatatctcaatgcagaccagatgcaccaatcgttactgtaactccaaatgaaagagttgctaagaaagttgctttatgcttcggagtttacccagttgttgctgaaaatgctacaatggaaaacgctgttgaaatagctaaaaatgctggattcgttaaagctaatgacactgctgtagttgttgcaggtgtaccagctaacgaaggaaacactaacatagtaaaagttgaagttgtaaaataa

SEQ ID NO: 591 - protein, 467 aa, Clostridium perfringens SM101
MRRTKLVCTIGPASENEEILTKIIEAGMNASRHNFSHGDHEEHKGRMVKVREISKKLGKEVAILLDTKGPEIRTGKFEPSKVELTAGTEFTIYAGAEDIIGDTTKCSVTYAGLAKDVKAGDTILIDDGLVGLEVVSVEGNAVKCVVRNTGLVGTHKGVNVPGVSIKLPAMTDKDRADLIFGCEMGVNMVAASFIRKAEDVKAIREVLVANGGADIQIFSKIENQEGVDNIDAIIEASDGIMVARGDLGVEIPMEDVPSVQKMIIEKCNNAGKPVITATQMLDSMMRNPRPTRAEVSDVTNAILDGTDAIMLSGESANGSWPVEAVETMVKIATKSEEMLSYELASSKAKKHIPAVPGVISRAACNAAHELKSAAIVSLTQSGATAKRISQCRPDAPIVTVTPNERVAKKVALCFGVYPVVAENATMENAVEIAKNAGFVKANDTAVVVAGVPANEGNTNIVKVEVVK

SEQ ID NO: 592 - DNA, 1512 bp, Rhodococcus jostii RHA1
  CDS (1)..(1512): transl_table=11
atgaccgagtcggtcacgcgcaccgcaccgcaccgcagtgaagtcgtcagcgagtcggcgagcaccacacgccacttcgacagccacactgctccactacgccacacgaagatcgtatgcacacttggacctgctaccgccaccggtgaccgtattcgcgaactcgtcgaaagcggtatggacgtggcgcggctgaatttcagccacggcgaacacgccgaccacgaggagaactacaaacgcgtccgggcggcctcggacgcgacggggaaggcggtcggtgtcctcgccgacctgcagggcccgaagatccggctcggccggttcgccgaggggcgcaccacgtgggccaacggtgaggaagtgcggatcaccgtcgacgaggtcgagggcacccacgaccgggtgtcgaccacctacaagcagctcgccgaggacgccaaggccggtgaccgcctgctggtcgacgacggcaaggtcggtctcgtcgtctccggggtggacggcaacgacgtgatctgccgggtcaccgagggcggcccggtcagcaacaacaagggtgtgtccctgccggggatgaacgtgtcggtcccggcgctgtcggagaaggacatcgccgacctcgagttcgcgctcggtctcggtgtcgacttcatcgccctgtcgttcgtgcggtcgccggccgacgtggaactggttcacgccgtgatggatcgggtcggtcgccggatcccggtgatcgcgaagctcgagaagccggaggcgatcgacaacctcgaggcgatcgtgctggcgttcgacgcggtgatggtcgcccgtggtgacctgggggtggagttgccgctcgaacaggtgccgctggtgcagaagcgggcgatccagatcgcccgggagaacgcgaagccggtcatcgtcgcgacgcagatgctggagtcgatgatcgagaactcgcggcccacccgcgccgaggcgtccgacgtcgcgaacgcggtcctcgacggtgcggacgcggtgatgctgtcgggtgagacgtcggtgggcaagtacgtgatggagacggtgcgcacgatggcgcggatcgtcgaggcggtggagaacgagtccactcaggtgccgccgctcacgcacgtgccgcggaccaagcgcggtgtcatctcctatgcggcccgcgacatcggggagcggctggatgcgaaggcgctggtcgcgttcacccagtccggggacacggtgcgccggttggcgcggctgcacacgccgttgccgttgctggcgttcaccccgctgccggaggtgcgcagccagttgtcgctgacgtggggtaccgagacgttcatcgtcgatccggtcgagagcaccgacgcgatggtgcggcaggtcgaccacgcgctgctcgggttgggccggtaccagaagggggaactggtggtcatcgtggccgggtcgccgcccggcaccgtcggctcgaccaacctgatccacgtccacagaatcggcgaagaggaccactga

SEQ ID NO: 593 - protein, 503 aa, Rhodococcus jostii RHA1
MTESVTRTAPHRSEVVSESASTTRHFDSHTAPLRHTKIVCTLGPATATGDRIRELVESGMDVARLNFSHGEHADHEENYKRVRAASDATGKAVGVLADLQGPKIRLGRFAEGRTTWANGEEVRITVDEVEGTHDRVSTTYKQLAEDAKAGDRLLVDDGKVGLVVSGVDGNDVICRVTEGGPVSNNKGVSLPGMNVSVPALSEKDIADLEFALGLGVDFIALSFVRSPADVELVHAVMDRVGRRIPVIAKLEKPEAIDNLEAIVLAFDAVMVARGDLGVELPLEQVPLVQKRAIQIARENAKPVIVATQMLESMIENSRPTRAEASDVANAVLDGADAVMLSGETSVGKYVMETVRTMARIVEAVENESTQVPPLTHVPRTKRGVISYAARDIGERLDAKALVAFTQSGDTVRRLARLHTPLPLLAFTPLPEVRSQLSLTWGTETFIVDPVESTDAMVRQVDHALLGLGRYQKGELVVIVAGSPPGTVGSTNLIHVHRIGEEDH

SEQ ID NO: 594 - DNA, 1785 bp, Synechococcus sp. CC9311
  CDS (1)..(1785): transl_table=11
atggcccagatcgatctaacccgtagaaccaagatcgtggccaccatcgggcccgcaacggaaagtcctgaacggatccgtgaactcatccaagccggagcgaccacgtttcgactgaatttctcccatggagatcacagcgagcatgctgaaagaatcgccacgattcggcaggtggcccacgaattgggagcccacatcggcattcttcaggatttacagggtccgaagatccgcttaggccgcttcgaagaaggtccgatcacgctcgccaaaggtgatcaattcgcactcacggctaagcaggtgcgatgcaaccagacggttgcaactgtcacctacgacaagctggccgaagaagtgactgctggcagtcgcatccttcttgatgacggccgcgtcgagatgaaagttgagcgtgtggatggagtcgatcagacccttcactgctcggtcacggttcctggcgtgctgtccaataacaagggggtgaatttccccgatgtgcagctctctgtgagagcgctcaccacaaaagatcgtcaagatctggcttttggtcttcagcagggtgtggactgggtagcgctgagcttcgtgcgcaatccctctgacatgcaggagatcagagaactgattcggaagcacggatacagcactcccgtcgttgcaaaaatcgaaaagttcgaggcgatcgatcaaatcgacgcgattttgccgctttgtgatggcgtgatggtggcacgaggtgatctgggggtggaaatgcctgcagaagaagtccctcttcttcaaaaagatctgatccacaaagccaacagccttgggattccgatcatcacggcgacccagatgctcgattccatggcctcgagccctaggcctactcgtgctgaggtcagtgacgttgccaacgccatccttgatggcactgatgcggtcatgctgtccaacgagaccgctgttggtgactttcctgttgaggctgttgaaacgatggccacgatcgccagacggatcgagcgggattacccacaacggccaattgacacccatctgccgagcacgatcccgaatgcgattagtggggccgtgagcagcattgctcggcaactcaacgcagcggcaatcctgccgttaacaaaaagcggtgctaccgcccataacgtcagtaagttccggccgtccactccgatacttgcgattaccagcgaggtcaacgtggcgcgcaagcttcagttggtttggggtgtgacaccactgctaatagaaactcagaagagcaccaccgccaccttcacgttggcaatggcttacgcccaagagatcggtgtggtcaaagacggtgatctttgcgtgcaaacggcaggaacgctcgctggaattagtggttctactgacctgatcaaagtcgggatcgtgagtgctgtgctcggccgaggtacgggctttggcagtggctcagtcagtggaaaggttcgaattgcgatttcggctagtgattgcgcccgacttgaaccaggagacattcttgtggctcgggatacgtcagccgactacctcgacggaattcgcgacgctgctgccgttatcacagaacaaccaggggaggattcacacgctgctgtcatcgccaaacgcttgggtgttcccgtgattactggggtagtcaatgccacacaggatctcagagaaggcgaagttgtgaccttgcatgtgaaagatggtgtggttcatcggggaaccggcagcaacttggcgatgaaattagacaccatgctctga

SEQ ID NO: 595 - protein, 594 aa, Synechococcus sp. CC9311
MAQIDLTRRTKIVATIGPATESPERIRELIQAGATTFRLNFSHGDHSEHAERIATIRQVAHELGAHIGILQDLQGPKIRLGRFEEGPITLAKGDQFALTAKQVRCNQTVATVTYDKLAEEVTAGSRILLDDGRVEMKVERVDGVDQTLHCSVTVPGVLSNNKGVNFPDVQLSVRALTTKDRQDLAFGLQQGVDWVALSFVRNPSDMQEIRELIRKHGYSTPVVAKIEKFEAIDQIDAILPLCDGVMVARGDLGVEMPAEEVPLLQKDLIHKANSLGIPIITATQMLDSMASSPRPTRAEVSDVANAILDGTDAVMLSNETAVGDFPVEAVETMATIARRIERDYPQRPIDTHLPSTIPNAISGAVSSIARQLNAAAILPLTKSGATAHNVSKFRPSTPILAITSEVNVARKLQLVWGVTPLLIETQKSTTATFTLAMAYAQEIGVVKDGDLCVQTAGTLAGISGSTDLIKVGIVSAVLGRGTGFGSGSVSGKVRIAISASDCARLEPGDILVARDTSADYLDGIRDAAAVITEQPGEDSHAAVIAKRLGVPVITGVVNATQDLREGEVVTLHVKDGVVHRGTGSNLAMKLDTML

SEQ ID NO: 596 - DNA, 1749 bp, Syntrophomonas wolfei subsp. wolfei str. Goettingen
  CDS (1)..(1749): transl_table=11
atgagaaaaaccaagattatatgcaccattggcccggccagcgagcagattgagaacttactgcttatgatagaggccggcatgaatatcacccgccttaatttttcccatgggagctatgaagagcaccagaagagaattgccaacattcgcgaggcccgtaagaaggcgggagtaccagtggctataatgctggataccaaaggaccggagataagaaccggtcttcttaaggctggaaaggtgaagctggaagccgggcagcgttttgtgctaaccacccgccaagtagaaggagatgaaaacctggtacaggtcacttatgatcgcctgccccaggaggtggaaaagggcaatagcatactgctggctgatggcttgattaacctgcaggtgctggagaccagcgatacagacattatctgcgaggtggtcaatggtggggaactgggagagagaaaaggaatcaatgtgcccggagctcgtataaacatgcctttcctcagtgaaaaagataaagaggatataaactttggcatagagcaagaagttgatttcattgccgcttcctttgtgcgcacagcggatgatgtgctggaaataaggcgtcttttggagcggcgggatgccgacatagatataatagccaagattgaaagccagcaaggggtagaaaacctggaagacattatcaaagtagctgatggaataatggtagccagaggggatttgggagtggagataccggcggaggaagtaccgctggtgcaaaaaaacattatagagaaatgcagtccccggggaaagatggtgatcatcgccacccagatgctggattccatgatcgtaaacccccggcccacacgggcggaagtatctgatgtagccaatgctatttttgatggtgccgatgccatcatgctttcaggagaaacagccgccgggaaatatccggttgaggtggtcaagaccatggcccgcatagccgggcgggcggaagaagtattgccttaccaggaaattttgcggcagaggagactgcaaggagagctgtccataacggatgctatcagctttgccacctgtgccaccgccctgaatttgaacgcctcggccataattactccaaccgtaaccggtcttaccgccaagatggtagccaaataccggccccaggccagtgttgttgccgttaccactgaagagcggatattgaacaagctggctctggtgtggggcgtctaccccctcttgattcctgaaacctcaggcactgatgaattattcgaagaatcgataaaagctgccttagagtctgcctatattaacaacggagacctggtgatattgactgccggagtgcccatcggttccccgggaggcaccaatcttttaaaggttcatgttgtaggccggatactggcccaaggcatgggcataggcaaagacccggttaccgggcgggtaagaatagtagtttatccggaagacatggaaaagattaaagacggggatatcgttgtaaccaccagtgccgactgtgccctggccccccacctgcccagaattgccgccctggtagcggaggaaggaggcctgacctccaatgcggctattatgggtttgaatgctaacattcccgtcattgtaggagccagaaacgccaccggcctattggaggacgatatgctggtcaccctggatacccctcatggccgggtctaccagggaattgcccgagtacgctaa

SEQ ID NO: 597 - protein, 582 aa, Syntrophomonas wolfei subsp. wolfei str. Goettingen
MRKTKIICTIGPASEQIENLLLMIEAGMNITRLNFSHGSYEEHQKRIANIREARKKAGVPVAIMLDTKGPEIRTGLLKAGKVKLEAGQRFVLTTRQVEGDENLVQVTYDRLPQEVEKGNSILLADGLINLQVLETSDTDIICEVVNGGELGERKGINVPGARINMPFLSEKDKEDINFGIEQEVDFIAASFVRTADDVLEIRRLLERRDADIDIIAKIESQQGVENLEDIIKVADGIMVARGDLGVEIPAEEVPLVQKNIIEKCSPRGKMVIIATQMLDSMIVNPRPTRAEVSDVANAIFDGADAIMLSGETAAGKYPVEVVKTMARIAGRAEEVLPYQEILRQRRLQGELSITDAISFATCATALNLNASAIITPTVTGLTAKMVAKYRPQASVVAVTTEERILNKLALVWGVYPLLIPETSGTDELFEESIKAALESAYINNGDLVILTAGVPIGSPGGTNLLKVHVVGRILAQGMGIGKDPVTGRVRIVVYPEDMEKIKDGDIVVTTSADCALAPHLPRIAALVAEEGGLTSNAAIMGLNANIPVIVGARNATGLLEDDMLVTLDTPHGRVYQGIARVR

SEQ ID NO: 598 - DNA, 1758 bp, Lactobacillus brevis ATCC 367
  CDS (1)..(1758): transl_table=11
atgaagaaaaccaagatcgtaagtacccttggtcctgcaagtactgacgttgatacgattgttaagttaatcgaatctggcgccaacatcttccggttcaacttttcacatggtgaccacgaagaacacttaggccggttggaaaatgtccacaaggctgaaaagattaccggtaagaccgttggtatcatgttagatacgaagggtgccgaaattcggaccacggttgaaaagggcggcaagctccaattcaagacgggtgaccaattccggatctctatggacgattcactcgaagggaccaaggaaaagatcgctgtgacttaccctggtttgtacgatgatgtccacgaaggcggccacgtcttatttgatgatggtttattggacacggtcgttgataagaaagacgatgcaactaaggaattaatcgtaacggctcaaaacgatggtgtcttaggttctcgtaagggtgttaacgcacctggtgtttccattaacttacctgggatcactgaaaaggattctgacgatattcgttttggtttggaccacgaaattaacttcattgctgcttcattcgttcggaagccacaagatgtcatggacatccgtgaactcctcgaagaaaagcacatggaacacgttcaaatcttccctaagattgaatctcaagaaggtatcaacaactttgatgatatcatcaaggtttccgatggtttaatggttgctcgtggtgacatgggtgttgaaattccaacggaaaacgtacctttggttcaaaaagctttgatcaagaagtgtaacattttgggcaagccagttatcacggctacgcaaatgttagactcaatgcaagaaaacccacgtcctacacgtgccgaagcttctgacgttgctaacgccgtctttgatggtactgacgcaacaatgctttctggtgaaagtgctaacggtgaatacccagtagaatccgttgcaacgatgaaccggatcgatatcaaggctgaaaatgctttgaaggactttggtcgtgataacttagacttcgacaacggtgacgttacggaatctattggtgcttctgttgcgcgagttgctaacgaattgggcgttaagaccatcgttgctgctacggaaacaggctacacggcaaagatgatctccaagtaccggccaaatgctgatatcttggcagttacctttgacgaccggactcgtcgcggcttgatggttaactggggtgtctacccaatcgttaccgaaaagccatcaaacacggatgaaatgtttgatttagctgctgctaaggccgttgaaacgggcttagctaaggaaggcgacttgatcttaatcaccgctggtgtgccagttggcgaacgcggcacgactaacttgatgaagatccaattgatcggttcaaagttggtacaaggccaaggcgttggtgacgacacggtgattggtaaggccatcattgcgaacacggctgctgaagcaaatgctaaagttgttgaaggtggtatcttaattgctaagaacaccgacaaggactacttgccagctattgaaaagtcaagtgctgtcatcgttgaaaacggtggattgacttctcatgctgcagttgttggaatttccatgggaattccagttatcgttggtgccgttggcgctagtgataagatttctgatggtgaattgattacagttgactcacgtcgcggtatcgtttaccacggtgcttctaacgcactttaa

SEQ ID NO: 599 - protein, 585 aa, Lactobacillus brevis ATCC 367
MKKTKIVSTLGPASTDVDTIVKLIESGANIFRFNFSHGDHEEHLGRLENVHKAEKITGKTVGIMLDTKGAEIRTTVEKGGKLQFKTGDQFRISMDDSLEGTKEKIAVTYPGLYDDVHEGGHVLFDDGLLDTVVDKKDDATKELIVTAQNDGVLGSRKGVNAPGVSINLPGITEKDSDDIRFGLDHEINFIAASFVRKPQDVMDIRELLEEKHMEHVQIFPKIESQEGINNFDDIIKVSDGLMVARGDMGVEIPTENVPLVQKALIKKCNILGKPVITATQMLDSMQENPRPTRAEASDVANAVFDGTDATMLSGESANGEYPVESVATMNRIDIKAENALKDFGRDNLDFDNGDVTESIGASVARVANELGVKTIVAATETGYTAKMISKYRPNADILAVTFDDRTRRGLMVNWGVYPIVTEKPSNTDEMFDLAAAKAVETGLAKEGDLILITAGVPVGERGTTNLMKIQLIGSKLVQGQGVGDDTVIGKAIIANTAAEANAKVVEGGILIAKNTDKDYLPAIEKSSAVIVENGGLTSHAAVVGISMGIPVIVGAVGASDKISDGELITVDSRRGIVYHGASNAL

SEQ ID NO: 600 - DNA, 1428 bp, Leptospira borgpetersenii serovar Hardjo-bovis L550
  CDS (1)..(1428): transl_table=11
atgaaaatcctgaactggaaaaaaaccaaaatcgtttgtaccatcggtcctgcctcttcttccgaagagaccatcctttccatgctcaaagcgggaatggatatcgctcgaatgaatttctcgcacggaactcacgactctcataaaagagtttacgatacgttacgcaaatgcgaacaaaccttcggttttccattgggaatcatggccgatttgcaaggtccaaaaattcgaaccggaaaattaaaactcaattccattctactccataaaaatcaagagattcaaatcgttcccgacgcggatttccagggtgacgaacatacgatcggctgcacctatccgaatctaattcaagatattaaagaaggagataagatcctcatcgacgacggtaaactaattctgaaagtcatttttaaaaagtcggactccgcaattttaaaagtgatcgtaggcggcatcttatggagtaataaaggaattaatcttccgggaactccaatctccgctcccgctctttccgaaaaggacgtagaagatctgaaatttgcgctttctctcggggtagattacattgcacttagtttcgttcggacgagtgcggatttggaattagccagatctttattgcaaggaacctataccggattgatcgcaaaaatcgaaagaccggaagcgatcgaaaacatagaagaaatcatagaacgcgcagatggaatcatgattgcaagaggggatcttggggtcgagatcgaaacggaaaaagtcccgatccttcaaaaggaactcatctacaaactcaatcaagcgggcaaaccagtgatcacggcgacacagatgttggaatcaatgatcgaaaatccgagaccgacccgtgccgaagcaagcgacgtcgcaaacgcagttatggatggaacggacgcagtgatgctctctgcggaatccgcaagcggccattatcctttggaatcggtggagatcatgtcgaagatcattcaagaaacggaaaccatcaaccatatctatgaaatccactggaatattaagaagacattcttagaatccgaaagaaccgccttaggaaatgccgcgagagaaatcgctcacggaattcacgcaaaagcgatcgttaatttcactagaagcggctattccgctttgatcacttcggaaatgagaccgaaggttccgatctattcgtttactccctttgccactacagcaagaaaaatgaaactctaccgaggtgtgatacctttcgtaatgccttttttcacaagattggaagatatgatcgcatacatgaatcagaaactcaaagaggacgaatttctctttccgggagacaagattgtgattctttccggcgctccaggaactacaatacgtagcgtcgattttttacagatttatcaaatccattga

SEQ ID NO: 601 - protein, 475 aa, Leptospira borgpetersenii serovar Hardjo-bovis L550
MKILNWKKTKIVCTIGPASSSEETILSMLKAGMDIARMNFSHGTHDSHKRVYDTLRKCEQTFGFPLGIMADLQGPKIRTGKLKLNSILLHKNQEIQIVPDADFQGDEHTIGCTYPNLIQDIKEGDKILIDDGKLILKVIFKKSDSAILKVIVGGILWSNKGINLPGTPISAPALSEKDVEDLKFALSLGVDYIALSFVRTSADLELARSLLQGTYTGLIAKIERPEAIENIEEIIERADGIMIARGDLGVEIETEKVPILQKELIYKLNQAGKPVITATQMLESMIENPRPTRAEASDVANAVMDGTDAVMLSAESASGHYPLESVEIMSKIIQETETINHIYEIHWNIKKTFLESERTALGNAAREIAHGIHAKAIVNFTRSGYSALITSEMRPKVPIYSFTPFATTARKMKLYRGVIPFVMPFFTRLEDMIAYMNQKLKEDEFLFPGDKIVILSGAPGTTIRSVDFLQIYQIH

SEQ ID NO: 602 - DNA, 1455 bp, Leptospira borgpetersenii serovar Hardjo-bovis L550
  CDS (1)..(1455): transl_table=11
atgaagagcgaattctccgtaattagaaaaacgaaaattatttgtaccatcgggcctgcaaccgccgataaaaaaatgattcaggcgcttgccgaagccgggatgaacgtggcgcgtctaaacatgtcccacggaaatcacgattttcatagaagtattattcgtaatattaagtctctcaataaggacattctaaaaaatccgatcgcgattctacttgatacacaaggaccggagatcagaacgggagaccttcaggtggatcacctagatctaaaggtgggcgagacgttcgtctttcatatcattcccggggaagaatccgaggaacaatccgtgtttgttaactataaggatatcgtaaaagatttaaaagtgggcgatcctgtgaccgtagacaacggactcatcaaccttatcgtagaagagattaacgactcggcgctcaagtgtaaggttctagacggaggaaaattaggttccagaaaacacatcaatcttcccggaattcgagtgaatcttccgtcgatcacgccgaaggatcacaaggatatcctattcggattggaagaggacgtggactttatcgctctttctttcgttcgttccgccgaagacatcaatcaattgaaacaaatcatagaagaaaacgaaggacacgcacaggttatcgcaaagatagaggaccaagaagccgttcgtaacatgaaagaaatcgtggaagtttcggacggtgtgatggtcgcgagaggggatttgggggtggaagttccaatcgaggaattgccgatccttcaaagggcgatcatcaaagaatgtgccctcaaagggaaaagagtcatcgtcgcgactcatcttttggaatcgatgattaacaatccttctcctacaagagccgaagtcaccgacgtcgcgaatgcggtctatgaagaggtggacgccatcatgttatcgggagaaaccgccgccggtaagtttccgatccgatgtgtggagatgatggacaagatagcacaacgtgtcgagaaggcaggcggtgtcgattacgttaaggacaaaattcctcaggataaaaaggaacagatggcgaggtccgctgcggaacttgcggattcccttaaatgtcctgcgattatcgtcattacgagaaggggaactacggcgctcaacgtagcaggttttcatccgcattatcctttgatctacgcatttaccaatatgactacggttaggcgtaaactctggctcactcgcggcgtaattccatatcgaatcgatttttccaaggatcctgaaaaaacgatccggctcgcgatcgaaactctcaaaaaggcgggaaaaatcgaggatggggaccaggttgtgattttatcggatatcatcgccggagaagatcgagtggagacgatccaaatccgcgaagtaaaaacatattttaatgcggaaaagctttga

SEQ ID NO: 603 - protein, 484 aa, Leptospira borgpetersenii serovar Hardjo-bovis L550
MKSEFSVIRKTKIICTIGPATADKKMIQALAEAGMNVARLNMSHGNHDFHRSIIRNIKSLNKDILKNPIAILLDTQGPEIRTGDLQVDHLDLKVGETFVFHIIPGEESEEQSVFVNYKDIVKDLKVGDPVTVDNGLINLIVEEINDSALKCKVLDGGKLGSRKHINLPGIRVNLPSITPKDHKDILFGLEEDVDFIALSFVRSAEDINQLKQIIEENEGHAQVIAKIEDQEAVRNMKEIVEVSDGVMVARGDLGVEVPIEELPILQRAIIKECALKGKRVIVATHLLESMINNPSPTRAEVTDVANAVYEEVDAIMLSGETAAGKFPIRCVEMMDKIAQRVEKAGGVDYVKDKIPQDKKEQMARSAAELADSLKCPAIIVITRRGTTALNVAGFHPHYPLIYAFTNMTTVRRKLWLTRGVIPYRIDFSKDPEKTIRLAIETLKKAGKIEDGDQVVILSDIIAGEDRVETIQIREVKTYFNAEKL

SEQ ID NO: 604 - DNA, 1503 bp, Streptococcus thermophilus LMD-9
  CDS (1)..(1503): transl_table=11
atgaataaacgcgtaaaaatagttgctacacttggtcctgcggttgaaatccgtggtggcaagaaatttggtgaagatggttactggagtgaaaaacttgaccctgatgcatctgctaaaaacattgctcaattgatcgaggaaggtgctaacgttttccgtttcaacttctcacatggtaaccacgctgagcaaggtgaacgtatggatgtcgtacgtatggctgaatctattgctggtcaaaaagtaggtttccttcttgacactaagggacctgaaatccgtactgaattgtttgaaggtgatgctaaagagtatgcatacaaaactggtgaacaaatccgtattgctactaaacaaggtctcaaatcaactcgcgacgttattgctttgaacgttgctggtgcacttgacattttcgacgatgtagaagttggtaaacaagttcttgtggatgatggtaaacttggtcttcgtgttgtagacaaggatgctgaaaaacgtgaattcatcgttgaagttgaaaatgatggtattattgctaaacaaaaaggtgtaaacatcccttacactaaaattcctttcccagcacttgctgaacgtgataatgctgatattcgttttggtctcgaacaaggtattaactttatcgcaatctcatttgtacgtactgcgaaagacgtacaagaagtacgtgctatctgtgaagaaactggaaacggccacgttaaattgttggctaaaatcgaaaaccaacaaggtatcgataatatcgatgaaatcattgaagctgctgatggtatcatgatcgctcgtggtgacatgggtatcgaagtaccattcgaaatggttccagtttaccaaaaaatgattatcactaaagtaaatgctgctggtaaatttgttgttacagctacaaacatgcttgaaacaatgacagaaaaaccacgtgcaactcgtgctgaagtatctgacgtgtttaatgctgttatcgatggtactgatgcgacaatgctttctggtgagtctgcaaacggtaaatatccagttgaatcagttcatacaatggctacaattaataaaaacgctcaagctcttcttaaagagtatggtcgtcttgatccatcaacatttgatcgctcaagtaaaactgaagttgttgcatctgcagttaaagaagctaccaactcaatggatatcaaacttattgttgcacttactgaatctggtaacacagctcgtttgatttctaaataccgtccagaagctgacatcttggcagtaacattcgatgaacttactcaaaaatcattgatgcttaactggggtgttattccaattgttactgaaacaccttcatctactgatgatatgtttgaagttgctgagcgtgttgctcttgaatcaggtcttgtagaatcaggtgataacattgttattgttgctggtattccagttggttctggtaatacaaatactatgcgtatccgcacagttaaataa

SEQ ID NO: 605 - protein, 500 aa, Streptococcus thermophilus LMD-9
MNKRVKIVATLGPAVEIRGGKKFGEDGYWSEKLDPDASAKNIAQLIEEGANVFRFNFSHGNHAEQGERMDVVRMAESIAGQKVGFLLDTKGPEIRTELFEGDAKEYAYKTGEQIRIATKQGLKSTRDVIALNVAGALDIFDDVEVGKQVLVDDGKLGLRVVDKDAEKREFIVEVENDGIIAKQKGVNIPYTKIPFPALAERDNADIRFGLEQGINFIAISFVRTAKDVQEVRAICEETGNGHVKLLAKIENQQGIDNIDEIIEAADGIMIARGDMGIEVPFEMVPVYQKMIITKVNAAGKFVVTATNMLETMTEKPRATRAEVSDVFNAVIDGTDATMLSGESANGKYPVESVHTMATINKNAQALLKEYGRLDPSTFDRSSKTEVVASAVKEATNSMDIKLIVALTESGNTARLISKYRPEADILAVTFDELTQKSLMLNWGVIPIVTETPSSTDDMFEVAERVALESGLVESGDNIVIVAGIPVGSGNTNTMRIRTVK

SEQ ID NO: 606 - DNA, 1413 bp, Solibacter usitatus Ellin6076
  CDS (1)..(1413): transl_table=11
atgccaaatacaaaaattgtagccacacttgggccggccacagatgcgcccggtgtcttgcgtcaactgctcgccgcaggcgtcgatgtttttcgactgaatgcatcgcacggagcacaggatgcgcatgccgcgcggatcgacgcggtgcgagctgcggcgcgcgaggcgcacgttcacgccgggattctgctggatttgcaggggccgaagatccggctcgggcgctttgaaaatggcggagtgacgctggtgaccgacgccatatttacgatcacgacagagcaggtgatgggcacctccgagcgcgcatcgacgggctattcgcggttcgcgaaggacgtgaaggcgggcgatcgcattctgctcgccgatggcatcatcgaactgatcgcgctcgaatcggacggtgtcagtgtgcaaacccgtatcgtgaacggcggtccgatcggcgaccacaaggggatcaatcttccgggggtgcaggtgagcattccctctctgaccgagaaggacctggccgatctgcattttggattgaacgccggagtcgatatcgtggcgctttcgtttgtgcgcacggcggacgatgtgcggcagttgcgcgaccggctcggggggcggccggtctcgattgtcgccaagatcgaaaagccggagggctacgagaatatcgagccgattctggatgtgacggatggcgtgatggtggcgcgcggggacctgggcgtagagatttcgctggagcgtgtgccgcgaattcagaaatcgatcatccggcgcgcgcggcgcaagggtcggttcgtgattacggcgacgcagatgctggaatccatgatcgagaatccacggcccacacgggccgaggtgagcgatgtcgccaatgcgatttacgatggcacggacgcggtgatgctgtcggcggagacgtcggtcggcaagtatccggtggaagccgtgcgctacatggcgaagatcgcggcggagagcgaggattcgattcgcaagaagggatatatcgacccgcctcaccaaccgcagccatcgaacgcggagatcctggcggatgcggcgcatcacgccgcgcgcgattcgggggcggcggcgatcgtggtgttcagttcgcgcggatctagtgcgcggctggtatcgcggtaccgtccgccggtaggggtgttcgcgatcacgccgcacgatactacggcgcggcaactctccgtcagttacggcgtgaccccgctgctggcgccggatgtctcgagcacggatgaaatgttgagccagatggaccgcgtgctcattgaaggcgggtatctgcagaaggggcagctggtggtgtttgtcgcaggtcagccggtggggcggcccggaacgacgaacctgatgaagctgcatcgcgtgggtctgggatag

SEQ ID NO: 607 - protein, 470 aa, Solibacter usitatus Ellin6076
MPNTKIVATLGPATDAPGVLRQLLAAGVDVFRLNASHGAQDAHAARIDAVRAAAREAHVHAGILLDLQGPKIRLGRFENGGVTLVTDAIFTITTEQVMGTSERASTGYSRFAKDVKAGDRILLADGIIELIALESDGVSVQTRIVNGGPIGDHKGINLPGVQVSIPSLTEKDLADLHFGLNAGVDIVALSFVRTADDVRQLRDRLGGRPVSIVAKIEKPEGYENIEPILDVTDGVMVARGDLGVEISLERVPRIQKSIIRRARRKGRFVITATQMLESMIENPRPTRAEVSDVANAIYDGTDAVMLSAETSVGKYPVEAVRYMAKIAAESEDSIRKKGYIDPPHQPQPSNAEILADAAHHAARDSGAAAIVVFSSRGSSARLVSRYRPPVGVFAITPHDTTARQLSVSYGVTPLLAPDVSSTDEMLSQMDRVLIEGGYLQKGQLVVFVAGQPVGRPGTTNLMKLHRVGLG

SEQ ID NO: 608 - DNA, 1491 bp, Arthrobacter sp. FB24
  CDS (1)..(1491): transl_table=11
atgagacgcgcaaaaatcgtggcaacgttcggaccggctatttccagcttcgagaacaccctcgcagttgttgaagccggcgtggatgttgcccgcatgaacatgagccacggcgactactcggtgcacgacgtgacgtacgagaacgtccgcagggcatccaagcagctcggaaagcccgtggccatcatggctgacctccagggccccaagatccgcctgggccgcttcgttgacggcccgcacgagctggctgtcggcgacatcttcaccatcaccaccgaagacgtcccgggcacgaaggacatctgctccaccacgctcaagagcctgaccgacgacgtcaacgtcggcgatgcgctgctgatcgacgacggcaaggtggccttgcgcgccctcgaggtcgacgacgtcaaggtggtcgcccaggtgactgtcggcggcatggtctccaacaacaagggcatcaacctgcccggtgttgccgtcaacgtccccgcgctgagcgaaaaggatgaggacgatctgcgctgggccatgcgccgcggcgtggacatggttgccctctccttcgtgcgtgacgcttcggacatcaagcgcgtccacgaaatcatggacgaagagggacgccgcgtgccggtgatcgccaagatcgagaagccgcaggccgttgagcagctgcacgagatcatcgacgcgttcgacgccatcatggtggcccgtggcgacctcggcgtggagctgccgctcgaagaggtgccgatcgtccagaagcgcgccatcgaactggcccgccgctgggccaagccggtcatcgttgccacccaggtgctcgagtcgatgatcgacaacccgcgccccacccgtgcagaggcttcggactgcgccaacgcagtgctcgacggcgccgacgcagttatgctttccggcgagacgagcgtgggcaagtacccgatcgagaccgtcaaggtcatggcacggatcatcgaatccaccgaggtccacggcctggagcgcgtacccccgctgggcaccaagcccaagacccgtggcggcgccatcacccgtgccgccgtcgaaattgccgaccagctggacgccaagtacatctgtgcgttcacccagtccggtgactcggcccgccgcctctcccgcctgcgtccggtccgtccggtcttcgcgttcactccggtggagcacgtgtggaaccagctcgcactgacctggggcatccagccggtcctggtccccatggtggaccacaccgacgagatgaccgcgcaggtggaccgcagcctgctggaactgaacctggtggaagacggcgacctggtggttatcgctgccggttcccctcccggaaaggccggttcaaccaactcgctgaaggtgcacaaggtgggcgacctgtccgacaccggccgctccggcgaaggtgttagcaacaaggaaaagctcggaccctggccggaaaagaagaagaaggcctag

SEQ ID NO: 609 - protein, 496 aa, Arthrobacter sp. FB24
MRRAKIVATFGPAISSFENTLAVVEAGVDVARMNMSHGDYSVHDVTYENVRRASKQLGKPVAIMADLQGPKIRLGRFVDGPHELAVGDIFTITTEDVPGTKDICSTTLKSLTDDVNVGDALLIDDGKVALRALEVDDVKVVAQVTVGGMVSNNKGINLPGVAVNVPALSEKDEDDLRWAMRRGVDMVALSFVRDASDIKRVHEIMDEEGRRVPVIAKIEKPQAVEQLHEIIDAFDAIMVARGDLGVELPLEEVPIVQKRAIELARRWAKPVIVATQVLESMIDNPRPTRAEASDCANAVLDGADAVMLSGETSVGKYPIETVKVMARIIESTEVHGLERVPPLGTKPKTRGGAITRAAVEIADQLDAKYICAFTQSGDSARRLSRLRPVRPVFAFTPVEHVWNQLALTWGIQPVLVPMVDHTDEMTAQVDRSLLELNLVEDGDLVVIAAGSPPGKAGSTNSLKVHKVGDLSDTGRSGEGVSNKEKLGPWPEKKKKA

SEQ ID NO: 610 - DNA, 1758 bp, Listeria welshimeri serovar 6b str. SLCC5334
  CDS (1)..(1758): transl_table=11
atgaaaaaaacgaaaattgtatgtacaattggtcctgcaagtgagtcagttgacacattagttcagttgattgaagcaggaatgaacgttgcacgtcttaatttctctcacggagattttgaagagcacggtgcgcgtatcgtaaatatccgtgaagcatcgaaaaaaactggtaaacaagttgctatcttacttgatacaaaaggtccagaaatccgtacaaatgacatggttggtgggaaattagaattccaaacaggtgatgttgtacgtgtttcaatgactccagttgaaggaacaaaagaaaaattctctgttacttacggagaactttatgatgatgtagaaatcggatcttccattttacttgatgatggtttaatcggtcttgaagtaatcgaaaaagacgaagctaatcgcgaactagtaactaaagtacttaacccaggtgtacttaaaaataaaaaaggcgttaacgtgccaaacgtttctatcaatttaccaggaatcacagaaaaagatgctgctgatatccgttttggtttagaacaaggtatcgattttatcgctgcatcttttgtacgtcgtgctacagatgttcttgaaatcactaagattttggaagagcataacgcaacacacgtacaaatcattcctaaaatcgaaaatcaagaaggcgttgacaatatcgacgaaatcttgcaagtatcccaaggtctgatggttgctcgtggtgacctaggtgttgaaattccagctgaagaagttccgattgtacaaaaagaacttatcagaaaatgtaataagcttggtaaaccagttattacagcaacacaaatgcttgattccatgcaacgtaatccgcgtccaactcgcgctgaggcaagtgacgtagcgaatgcgatttttgatggaacagatgcaattatgttatccggtgaaacagctgctggggattatccggtagaagcagttaaaatgatggcgaaaatcgctattcgtacagaagaagtacttgttgctcaagataaatttgcacttaaacttcatgaaaatacggatatgactgaagcaattggtcaagcagttggtcatacagcgaaaaacctaaacgttcaaacaatcgttgctgcgactcaaagtggtcatacagcgcgcatgatctctaaatatcgtcctaaatctcatatcgttgctgtaacattcaacgagcatgtgtatcgtggtttagctctttcatggggtgtttatcctcgtctagctactccagtaagcaacacagatgaaatgttcgaccttgcagtgaaagaatctcttgcttctggcgttgcaaaacaaggcgacctaatcattattacagctggtgttccagttacagaaagcggaacaacaaacgtgatgaaaatccaattaattggtgaaaaagtagttaaaggtcaaggaattggtagcaaatctgttattggtaaagcaattgttgcaaaatccaatgcagaagcgcttgaaaaagcagaagaagacggaatcttaatcgttaaaacaacagataaagaaatccttcctgcattcgagaaaagtgcggcagttgttgtggaagaaggcggcttaactagccatgcagcagttgttggaatcaatcttggaattcctgtcatcgttggcgctaaagatgcaacatctcttgtaaaagacggtgaaactatcactgttgattctcgtcaaggcgttgtttataacggcaaaacagcaactcactaa

SEQ ID NO: 611 - protein, 585 aa, Listeria welshimeri serovar 6b str. SLCC5334
MKKTKIVCTIGPASESVDTLVQLIEAGMNVARLNFSHGDFEEHGARIVNIREASKKTGKQVAILLDTKGPEIRTNDMVGGKLEFQTGDVVRVSMTPVEGTKEKFSVTYGELYDDVEIGSSILLDDGLIGLEVIEKDEANRELVTKVLNPGVLKNKKGVNVPNVSINLPGITEKDAADIRFGLEQGIDFIAASFVRRATDVLEITKILEEHNATHVQIIPKIENQEGVDNIDEILQVSQGLMVARGDLGVEIPAEEVPIVQKELIRKCNKLGKPVITATQMLDSMQRNPRPTRAEASDVANAIFDGTDAIMLSGETAAGDYPVEAVKMMAKIAIRTEEVLVAQDKFALKLHENTDMTEAIGQAVGHTAKNLNVQTIVAATQSGHTARMISKYRPKSHIVAVTFNEHVYRGLALSWGVYPRLATPVSNTDEMFDLAVKESLASGVAKQGDLIIITAGVPVTESGTTNVMKIQLIGEKVVKGQGIGSKSVIGKAIVAKSNAEALEKAEEDGILIVKTTDKEILPAFEKSAAVVVEEGGLTSHAAVVGINLGIPVIVGAKDATSLVKDGETITVDSRQGVVYNGKTATH

SEQ ID NO: 612 - DNA, 1449 bp, Aeromonas hydrophila subsp. hydrophila ATCC 7966
  CDS (1)..(1449): transl_table=11
ttgcacggcggaaactccttaaccatgaagactgacatgaaaaagaccaaaatcgtctgcaccatcggtcccaagaccgaatccaaagaaatgctggccaagatgctggacgccggcatgaacgtcatgcgcctgaacttctcccacggcgactacgccgagcacggtggtcgcatcagcaacctgcgcgctgtcatggccgaaaccggcaagcacgcagccattctgctggacaccaagggtccggaaatccgtaccatcaagctggaaggcggcaacgacgttgccctggtcgctggccagaccttcaccttcaccaccgaccagaccgtggttggcaacaaagacaaagtggccgtgacctatgccggtttcgccaacgacctgcgcgtcggcaaccgcatcctggttgacgatggcctgatcggtctggacgttatcgagatcaccgagcgcgaagtcatctgtaaagtactgaacaacggcgatctgggcgagaacaagggcatcaacctgccgggcgtctccatcaagctgccggccctggccgagaaagacaagcgcgacctgatcttcggttgcgagcaaggcgttgatttcgttgccgcttccttcattcgcaagaaagaagacgtgctggaaatccgtgagcacctgaaagcccacggtggcgagaacatccagatcatctccaagatcgaaaaccaggaaggcctggacaacttcgacgagatcctggctgtttccgacggcatcatggttgctcgtggcgacatgggtgtcgaaatcccggttgaagaagttatcttcgcccagaagatgatcatcgagaagtgcaacaaagcccgcaaagtggtcatcaccgccacccagatgctggactccatgatcaagaacccgcgtccgacccgcgccgaagccggcgacgtggccaacgccatcctggacggtaccgacgcagtcatgctgtccggtgagtccgccaagggcaaatacccgctggaagccgtgaccatcatggccaccatctgcgagcgtaccgatgccgtgatgccgtccaacctgtctgctgccaacgacagcaacaagctgcgcatcaccgaagcggtatgtaaaggcgcggtagaaacctccgagaagctggacgccccgctgatcgtggttgccaccgaaggcggcaagtctgccaaggccatccgcaagtacttcccgaaagcctggatcctggccatcaccaccaacaagaagaccgctgcccagctggtactgaccaagggtgtggttgctcacgtggttgacagcatcgcctccaccgacgatttctatcgcatcggtaaagaagcggcgctggccagcggcatgggtctgaagggtgacgtggttgtcatggtctccggtgccctggtaccgagcggcaccaccaacaccgcttctgttcacgttctttaa

SEQ ID NO: 613 - protein, 482 aa, Aeromonas hydrophila subsp. hydrophila ATCC 7966
MHGGNSLTMKTDMKKTKIVCTIGPKTESKEMLAKMLDAGMNVMRLNFSHGDYAEHGGRISNLRAVMAETGKHAAILLDTKGPEIRTIKLEGGNDVALVAGQTFTFTTDQTVVGNKDKVAVTYAGFANDLRVGNRILVDDGLIGLDVIEITEREVICKVLNNGDLGENKGINLPGVSIKLPALAEKDKRDLIFGCEQGVDFVAASFIRKKEDVLEIREHLKAHGGENIQIISKIENQEGLDNFDEILAVSDGIMVARGDMGVEIPVEEVIFAQKMIIEKCNKARKVVITATQMLDSMIKNPRPTRAEAGDVANAILDGTDAVMLSGESAKGKYPLEAVTIMATICERTDAVMPSNLSAANDSNKLRITEAVCKGAVETSEKLDAPLIVVATEGGKSAKAIRKYFPKAWILAITTNKKTAAQLVLTKGVVAHVVDSIASTDDFYRIGKEAALASGMGLKGDVVVMVSGALVPSGTTNTASVHVL

SEQ ID NO: 614 - DNA, 1446 bp, Acidothermus cellulolyticus 11B
  CDS (1)..(1446): transl_table=11
atgagccggcgggcgaaaatcgtttgtacgctcggtccggcgacggcgtctccggagactattcggcaactggtagcggcggggatggacgtcgcccggttgaacgccagtcacggtcggcatgccgagcacgaagagatgtaccgctgggtacgcaaggcctccgacgagctcggccgcgctgtgggcgtgctcgttgacttgcagggtccgaaaatccgcctcggtcggatcgccggcgggccggtgacgctggccgctggtgacgagttcaccatcaccactgaggatgtgcccggcagcgcggccctggtgtctaccacgtatcccggtttacccaccgacgtgcatccagggatgcgcattcttgttgacgacgggcgggtgagtctggaggtgcttgacgtcagcggaacgcgggtccgtacccgggtgatcgacggtggggtgatctccgatcacaaggggctcaatgttcccggagccgctctctccgtgcccgcgctgagcgacaaggacgtcgacgacctccggtgggcgttgcgtctcggcgtcgacatggtcgcgctctcgtttgtccgttcggcggcggattatgccgacgtcgcccgggtcatggacgaggagggccggcgggttccggtcatcgcgaaaatcgagaagccccaagcggttgagcaattggacgccattacggaggcttttgacggattcatgattgcccgcggtgacctcggcgtggaaatgccgatcgaacaagtcccgttggtgcagaagcgggtcatcgccgcggcgcggcgggcggcgaaacccgtcatcgtcgcgactcagctcctcgactccatgattagcgcgacccggccgacccgcgccgaggtctcggactgcgcgaacgccgtccttgatggagccgacgcgctcatgctctccggcgaaacgagcgtcggcgcacatcccgttttaacggtccagaccatggcgcgcatcatcgaacgggtcgaggaggaagccctcgctgaattgcccgacgtcggcggccggccccgcaccaagggaggcgctatcgcgcacgccgccgtcgttctcggtgccgatctcgacgcgaagtacctcgtcgccttcacggaatcgggtgagagtgcgcggcggctggcccggtaccggtcgcccattccgctcctcgcgttcacgccggtgccggcgacccgttcctgccttgccctgacgtggggggtggagacgttccttgtcgcgccggtctcccacaccgacgagatggtccgccaagtggatcgcgcgctgctcgagattgaccgttgccgccgcggggacctcgtcgtcgtcattgccggtacgccgcccggggtctccggctcgaccaacatgctgcgggtgcaccggatcggcgacacgatggacgccgaccatccggcgtttcaactctga

SEQ ID NO: 615 - protein, 481 aa, Acidothermus cellulolyticus 11B
MSRRAKIVCTLGPATASPETIRQLVAAGMDVARLNASHGRHAEHEEMYRWVRKASDELGRAVGVLVDLQGPKIRLGRIAGGPVTLAAGDEFTITTEDVPGSAALVSTTYPGLPTDVHPGMRILVDDGRVSLEVLDVSGTRVRTRVIDGGVISDHKGLNVPGAALSVPALSDKDVDDLRWALRLGVDMVALSFVRSAADYADVARVMDEEGRRVPVIAKIEKPQAVEQLDAITEAFDGFMIARGDLGVEMPIEQVPLVQKRVIAAARRAAKPVIVATQLLDSMISATRPTRAEVSDCANAVLDGADALMLSGETSVGAHPVLTVQTMARIIERVEEEALAELPDVGGRPRTKGGAIAHAAVVLGADLDAKYLVAFTESGESARRLARYRSPIPLLAFTPVPATRSCLALTWGVETFLVAPVSHTDEMVRQVDRALLEIDRCRRGDLVVVIAGTPPGVSGSTNMLRVHRIGDTMDADHPAFQL

SEQ ID NO: 616 - DNA, 1422 bp, Clostridium novyi NT
  CDS (1)..(1422): transl_table=11
atgcaaagaactaagatggtttttacaattggacctgcaagtgagaacaaagaatatttaagagaacttattttagctggaatgagtgcagctagacttaacttttcacatggtgattttgaagaacatggtgcaagaattaagactataagagaattaagaaaagaattaaacaagcaagtagctatagttctagatactaaaggacctgaaatcagaactaaagaatttgatggaaaagtacaattagttaaaggaagcaaattcactgtatattgtacagaagacgtaatgggagatgcaactaaatgtagcatcacttacactgaactatacaaagacgttaaaccaggaaacactatcttaatagatgatggtttagtagctcttactgtagaatcaatcgaagatactaaaatccactgtgtagttgcaaacgacggtgttgtatctagcaaaaagggagttaacgttccaaacgtaagcatcaaacttccagctatcactgaaaaagacaagggagatttaatcttcggttgtcaagaagaagttgatatggttgctgcttcattcataagaaaagcagatgatgttaaagctataagaaaagttttagaagaaaatggtggaagccacataagaatattctctaaaatagaaaaccaagaaggtgtagataatgttgatgaaatattagaagcatctgatggtatcatggtagctagaggagacatgggagttgaaattcctatagaacaagttccaatagttcaaaaaatgataatcaacaaatgtaacaaagctggaaaaccagttataacagcaacacaaatgttagattctatgatcagaaacccaagaccaacaagagcagaagcatcagacgtagcaaacgctatatttgatggaacagatgctacaatgctaagtggagaatctgcaaacggagattacccaatccaagcagctcaaactatggctagaatagctcaaactgcagaaaagtatgttgatcacaaagctgctctagaaaagagaaaagcagaaaaagtaactaatgtagcagacgctataagcttaagcgcttgtgaagcagctatggaattaaacgctgctgcaatcatcgttccaactaaatctggagcaactgctagaatgatcgctaaatatagaccagcatgcccaatcatcgctgtaacaccagaagataagataacaagaagattatctttatcaagcggagtatatccaataactgctacagcattcaactcaactgatgaaatgatcgaaaaatcagttgcatttgctaaagaagcaggacacgttaaagatggagatactgttgttgtagctgctggacttccaatacatgaatcaggcactactaacatgatcaaagtacacgttgtaggaaaatag

SEQ ID NO: 617 - protein, 473 aa, Clostridium novyi NT
MQRTKMVFTIGPASENKEYLRELILAGMSAARLNFSHGDFEEHGARIKTIRELRKELNKQVAIVLDTKGPEIRTKEFDGKVQLVKGSKFTVYCTEDVMGDATKCSITYTELYKDVKPGNTILIDDGLVALTVESIEDTKIHCVVANDGVVSSKKGVNVPNVSIKLPAITEKDKGDLIFGCQEEVDMVAASFIRKADDVKAIRKVLEENGGSHIRIFSKIENQEGVDNVDEILEASDGIMVARGDMGVEIPIEQVPIVQKMIINKCNKAGKPVITATQMLDSMIRNPRPTRAEASDVANAIFDGTDATMLSGESANGDYPIQAAQTMARIAQTAEKYVDHKAALEKRKAEKVTNVADAISLSACEAAMELNAAAIIVPTKSGATARMIAKYRPACPIIAVTPEDKITRRLSLSSGVYPITATAFNSTDEMIEKSVAFAKEAGHVKDGDTVVVAAGLPIHESGTTNMIKVHVVGK

SEQ ID NO: 618 - DNA, 1422 bp, Pelobacter propionicus DSM 2379
  CDS (1)..(1422): transl_table=11
atgaaactgccagaccacaaaacgaaaatcatctgcaccatcggtccggcttcttcaagccggaaggtcatggaggagatgcttatggccggaatgaacgtggcccggctcaatttttcccatggttccttcgagagccaccgccaggtgattggcgacctgcgcgccgcttcccgtgccaccggcaagcggctggccatcatggcggacctccctggaccgaagatgcgcatcggcacgctcaaggatgaaccggtggaactgaaaccgggggattccatcgtgctgaccagcgatgacatcgacggtgatcgggagagggtgtcagtgtctttcaagcgacttccccaggtggtcacccccggtaatgccctctacctcaacgatggcatcatccagatcgaagtcgtgtccgtcattggcaacgacgttgcctgcagggtcgtggtgggaggagaactccgttcacgcaaggggctcaaccttccggatattgatctcggcatcagcgctttcacggaacgtgatcatgagtgcctgacgtttgccgcccaggagggggtggacgccgtcagccagtctttcgtggaaaacggcgacgacatcagggcggtgcggcgtgcggccgaggatatggactaccacccctttatcatcgccaagatcgagcgctccaacgccctggaacagatggatgatatcctcgatgcctccgacggcatcatgatcgcccggggagacctgggggtggaggtgcccatagagaggatcgccatcatccagaaggatttgatgcgcaaggccaacaggcgcgccaaaccggtcatcacggcaacccagatgctggagtccatgaccgagacccgacgccccacccgtgccgaggctacggatgtggctaacgccatcctggacggcaccgattgcgtcatgctctcgggagagtccgccatggggaagtatcccgtggatgccgtggccatgctcgccagcatagcggctgccgtggagccccacaagcggcagatcacggtgaaagaactgtacgggggaggggatttcaagggcacgctcaagccggcgcacctgatcgccgtgtcggtggaggcgagcgttacctacgcatccccggcggcggtgttcgccccgacccgcagtggcgctaccgcccggagcctgtcgctcttcaggctgccggtctgggtcgcggcggtgagttcccgccaccagacttgccaggacctggccttctcctacggcgtgtttcccgtgcacgagacagggcatcccgaggattgggatgcctttgtgcgcaggtgggttgagatgtatcgggcgccgggagatattgccatcctgacggaggggccctccacacggcaccccgacgcccacaaccggatggaaatcatccaactgtaa

SEQ ID NO: 619 - protein, 473 aa, Pelobacter propionicus DSM 2379
MKLPDHKTKIICTIGPASSSRKVMEEMLMAGMNVARLNFSHGSFESHRQVIGDLRAASRATGKRLAIMADLPGPKMRIGTLKDEPVELKPGDSIVLTSDDIDGDRERVSVSFKRLPQVVTPGNALYLNDGIIQIEVVSVIGNDVACRVVVGGELRSRKGLNLPDIDLGISAFTERDHECLTFAAQEGVDAVSQSFVENGDDIRAVRRAAEDMDYHPFIIAKIERSNALEQMDDILDASDGIMIARGDLGVEVPIERIAIIQKDLMRKANRRAKPVITATQMLESMTETRRPTRAEATDVANAILDGTDCVMLSGESAMGKYPVDAVAMLASIAAAVEPHKRQITVKELYGGGDFKGTLKPAHLIAVSVEASVTYASPAAVFAPTRSGATARSLSLFRLPVWVAAVSSRHQTCQDLAFSYGVFPVHETGHPEDWDAFVRRWVEMYRAPGDIAILTEGPSTRHPDAHNRMEIIQL

SEQ ID NO: 620 - DNA, 1410 bp, Psychromonas ingrahamii 37
  CDS (1)..(1410): transl_table=11
gtgagaaaaactaaaatagtttgtactattggtccaaaatcagaatcaaaagagatgttaggtaaattagtcaaaaatggcatgaatgtaatgcgccttaacttctcgcacggtgattttaacgaacatggtggtcgaattaatactatccgtgaaatttgccgagaaacgggtaaaaatgttgccattttattagataccaaaggtcctgaaattcgtacagttaaactaaccaacggtgctgatgtattattaacggcaggacaagagttcactttaacaacggatcaaactgttgtgggtgacaacactgtggtagccgtaacttatgaaaatctaaccaatgatttagcggtaggtaacacggtattacttgatgacggcctaattgaactaaccgttaaacgtattaccgatacagaggttatctgtgatgttatgaacaccggtgaactgggcgaaaataaaggcgttaaccttccaggtgttaaagttcagctgcctgctctgtctcctaaagataaaggcgatttaatatttggttgtgaacaacaagttgattttattgcagcatcatttattcgtaaaaaagaagacgtattggaaatccgtgagttattaaaagctcacggtggcgaaaaaattcacatcatctctaaaatagaaaaccaagaaggtgttgataactttgatgaaatcctagcagcttcagacgctattatggtcgctcgtggtgacttaggcgttgaaattgcagttgaagaagtgatcttcgcacaaaaaatgatgatcgaaaaagcaaatgctgctcgaaagcctgttattacagcgacacaaatgcttgattcaatgatcaaaaatccacgaccaacgcgtgctgaagcgggcgatgttgccaatgctatcttagatggcactgatgcagtcatgctttcaggtgaaagtgctaaaggaaaataccctgcagaagcggttgaaattatggcaactatctgtgagcgaaccgatcaagtcatgcatgtcagagttgataatattacaaaagatatccgtatcacagaagcagtatgcagcggtgcagttaacaatgcagagcaactagatgctaaattaatcatagtagcaacgggtgccggcaagtctgcacgctctttacgtaaatactttccaaggactcaaatcctggcgttaaccagtaatccaaaaacagcacaacaacttgcattagtaaaaggggtttctgctaaaattgttgaagctcaaaattcaatggaagagttctaccaacttggtatggatatgagtaaacagcttggtcttgttactgctggtgataaagtcataatagtcgctggtgcgcttgtggcttccggtacgacaaacacttcttctgtacacgttattgtttaa

SEQ ID NO: 621 - protein, 469 aa, Psychromonas ingrahamii 37
MRKTKIVCTIGPKSESKEMLGKLVKNGMNVMRLNFSHGDFNEHGGRINTIREICRETGKNVAILLDTKGPEIRTVKLTNGADVLLTAGQEFTLTTDQTVVGDNTVVAVTYENLTNDLAVGNTVLLDDGLIELTVKRITDTEVICDVMNTGELGENKGVNLPGVKVQLPALSPKDKGDLIFGCEQQVDFIAASFIRKKEDVLEIRELLKAHGGEKIHIISKIENQEGVDNFDEILAASDAIMVARGDLGVEIAVEEVIFAQKMMIEKANAARKPVITATQMLDSMIKNPRPTRAEAGDVANAILDGTDAVMLSGESAKGKYPAEAVEIMATICERTDQVMHVRVDNITKDIRITEAVCSGAVNNAEQLDAKLIIVATGAGKSARSLRKYFPRTQILALTSNPKTAQQLALVKGVSAKIVEAQNSMEEFYQLGMDMSKQLGLVTAGDKVIIVAGALVASGTTNTSSVHVIV

SEQ ID NO: 622 - DNA, 1494 bp, Arthrobacter aurescens TC1
  CDS (1)..(1494): transl_table=11
atgagacgcgcgaaaattgtggcaactttcggcccggctatctccagcttcgagaacaccctcgcggtgctggaggccggcgtcgacgttgctcgcatgaacatgagccacggcgactactccgtgcatgacaccacctacgaaaacgtccgcaaggctgcggcccagctcggtaagcccgtggccatcatggccgacctccaaggacccaagatccgtctgggccgctttgttgacggccctcacgagttggccgtgggcgatacgttcaccatcaccaccgaagacgtccccggtaccaaggacatctgctccaccacgctcaagagcctcactgaagacgtcaacgtgggcgacgccctgctcatcgacgacggcaaggtggcactgcgtgccatcgaggttgacgacgtcaaagttgtggccactgtgacggttggcggcaaggtctccaacaacaagggcatcaacctgcccggtgttgccgtcaacgtccccgcattgagcgaaaaggacgaggacgacctccgttgggccctcaagcgcggcgccgacctcattgccctctcgttcgtgcgtgatgcctctgacatcaagcgcgtccacgagatcatggatgaagaaggccgccgtgtgccggtgatcgccaagatcgaaaagccgcaggccgtggagcagctccacgaaatcatcgacgccttcgacgccatcatggttgcccgtggcgacctcggcgtggaactgccgctcgaagaggtgccgatcgtccagaagcgcgccattgaactggcacgccgctgggccaagcctgtcatcgtggcaacccaggtcctggaatccatgatcgacaacccgcgtccgacgcgcgccgaggcttccgactgcgccaacgcggttctcgacggcgccgacgcagtcatgctgtccggtgaaacctccgttggccagtaccccatcgagaccgttaaggtcatggcccggatcatcgagtccaccgaagtccacggccttgagcgcgtccccccgctgggcaccaagcccaagacccgcggtggcgcgatcacccgcgccgccgtcgagatcgccgaccagctggatgccaagtacatctgtactttcacccagtccggtgactcggcacgacgcctctcgcgtctgcgcccggtcaagccggtcttcgccttcaccccggtggagcacgtctggaaccagctggccctcacttggggcatccagccggttctggttccctccgtgggccacaccgacgagatgaccgcacaggtggacaagagccttctggaaatggatctcgtggacgaaggcgacctggttgtcatcgctgccggttcccctcccggacaggccggttcaacgaactcgctgaaggtccacaaggtaggcgacctcgccgacacctccaagaccgacgacggttcacgcaaggaacccgttggcccttggccggaaaagaagtccaaggccaagagctaa

SEQ ID NO: 623 - protein, 497 aa, Arthrobacter aurescens TC1
MRRAKIVATFGPAISSFENTLAVLEAGVDVARMNMSHGDYSVHDTTYENVRKAAAQLGKPVAIMADLQGPKIRLGRFVDGPHELAVGDTFTITTEDVPGTKDICSTTLKSLTEDVNVGDALLIDDGKVALRAIEVDDVKVVATVTVGGKVSNNKGINLPGVAVNVPALSEKDEDDLRWALKRGADLIALSFVRDASDIKRVHEIMDEEGRRVPVIAKIEKPQAVEQLHEIIDAFDAIMVARGDLGVELPLEEVPIVQKRAIELARRWAKPVIVATQVLESMIDNPRPTRAEASDCANAVLDGADAVMLSGETSVGQYPIETVKVMARIIESTEVHGLERVPPLGTKPKTRGGAITRAAVEIADQLDAKYICTFTQSGDSARRLSRLRPVKPVFAFTPVEHVWNQLALTWGIQPVLVPSVGHTDEMTAQVDKSLLEMDLVDEGDLVVIAAGSPPGQAGSTNSLKVHKVGDLADTSKTDDGSRKEPVGPWPEKKSKAKS

SEQ ID NO: 624 - DNA, 1422 bp, Leuconostoc mesenteroides subsp. mesenteroides ATCC 8293
  CDS (1)..(1422): transl_table=11
atgaaaaagacgaaaatcgtctcaacacttggtccgtcatcatctgatgtcgaaacaatcgtaaagttaatccaagcgggcgccaacgtattccgttttaacttttcacacggtgatcacgaagaacatttgggtcgtatgaatgctgttcacgaagccgaaaagattactggtaagacagttggtattttgttggacactaagggtgctgaaatccgtacaacaaagcaagctgacggcaagatcgaattccatacaggtgacacattgcgtattgcaatggatgaaaaccttgaaggaacgaaagaaaaaatcgccgttacatacgctggtttgttcgatgatgttaaagaaggtggacaagtcttgtttgatgatgggttgcttggtacaactgttatcgaaaaagattcagccactcgcgaattagttgttcgcgttgataatgatggtattttgggatcacgtaagggtgttaacgcacctggtgtttcaattaacttgccaggtattactgaaaaagatgctgatgacatccgttttggtttggatcacgaaatcaactatattgctgcttcattcgttcgtaagcctgaagatgtgcttgaaattcgtggactattgaaggaaaagaacatggaacatgttcaaattattcctaagattgaatcacaagaaggtattgacaaccttgatgcaattttggaagtttcagatgccttgatggtaccacgtggtgacatgggtgttgaaattcctgctgaaaacgtgcctttggttcaaaaagacatgattcgcaagatgaacaaggcaggtttacctgttattactgctacacaaatgcttgactcaatggaagaaaacccacgtcctacgcgtgccgaagcttccgatgttgccaacgctgtgtttgatggtactgatgcaacaatgttatcaggtgaatcagctaacggagactatccagttgaatctgttgccacaatggctgctatcgacgaaaaagctgaaacttcattgcgcgaaaacggtcgtcatgaggatattttcttcgatgagactgattcaacggaagctgttgcagcatctgttgctcgtatcgcacgcaatgtgaacgctaaggctgttgttgtatcaactaactctggttacactgcacgtatggtttcaaagcaccgtcctgatgttaacattttggccgttacttattcagaacgcgtacaacgtggtttgacattgaactatggtgttgttccagtagtttatgatgcaccaaagactattgacgaaatggttgacttagctaagaaggccgtaaaagaccaaggattggctaattcaggtgatactattgttattgcagcaggtgtaccaatgtcacaatcaggtacaacaaacatgttgactgttcaaacagtataa

SEQ ID NO: 625 - protein, 473 aa, Leuconostoc mesenteroides subsp. mesenteroides ATCC 8293
MKKTKIVSTLGPSSSDVETIVKLIQAGANVFRFNFSHGDHEEHLGRMNAVHEAEKITGKTVGILLDTKGAEIRTTKQADGKIEFHTGDTLRIAMDENLEGTKEKIAVTYAGLFDDVKEGGQVLFDDGLLGTTVIEKDSATRELVVRVDNDGILGSRKGVNAPGVSINLPGITEKDADDIRFGLDHEINYIAASFVRKPEDVLEIRGLLKEKNMEHVQIIPKIESQEGIDNLDAILEVSDALMVPRGDMGVEIPAENVPLVQKDMIRKMNKAGLPVITATQMLDSMEENPRPTRAEASDVANAVFDGTDATMLSGESANGDYPVESVATMAAIDEKAETSLRENGRHEDIFFDETDSTEAVAASVARIARNVNAKAVVVSTNSGYTARMVSKHRPDVNILAVTYSERVQRGLTLNYGVVPVVYDAPKTIDEMVDLAKKAVKDQGLANSGDTIVIAAGVPMSQSGTTNMLTVQTV

SEQ ID NO: 626 - DNA, 1770 bp, Nostoc punctiforme
  CDS (1)..(1770): transl_table=11
atgcaattaagagattctctgcgccggacaaaaattgtcgctactattggccccgccactagtagtcctgaaatgctcaaggcgattattgaagcgggagccacgacgctacggctaaacttctcccacggaactcatgccgaccatcagcgtagtattcgcttaattcggcaaaccgcttttgaattaaatcaaccagtggctattctccaagacttgcagggcccaaaaattcgcttggggaagtttgacaacgggtctatagttttggcaaaaggcgatcgcttcaccttgacaaaccgtccggtggtaggtacgcaggaaattagctgcgtcacctacgattatttagccgaagaagtcccagttggtgcaaaaatcctcctcgatgatggacgagtagaaatggtcgtggaggagattaaccgagacaaaggtgatttgcattgtcgcattaccgtgcctggtaaactttctaacaacaaaggtgtaaactttcccggcgtttacctgtcaattaaggcaatgaccgacaaagaccgagaggatctgatgtttggtctagatcaaggtgtagattgggtggcactttcctttgtccgcaatccgcaggacatgatcgaaattaaagaactaatttctagtacaggcaagcaagtgccagtggttgccaaaattgaaaaacatgaagccattgaacaaatggaggcagttctggctttgtgtgatggcgtgatggttgccagaggtgatttaggcgtagaattgcccgcagaagatgttccggtactccaaaagcggctaattgctacagcaaatcgcttagggattcccatcatcaccgccacccaaatgttagacagcatggtgagcaatccccgtcccactcgcgcggaagtgtcagatgtggcaaacgcgattttagatggcacagacgcggtgatgctctccaatgaaaccgccgtcggtagcttccctgtagaagcagtagcgacaatggcgcggattgccgagcggatggagcaggaagaagcccaacacttaaacttgcgttccgtgagagattcccggcgctccattcctaatgcgattagtcaagctgtaggtcaaattgccgaacaactaggtgcagctgcaattatgaccttaacgcaaactggggcaactgctcgcaatgtctctaagttccgtcccaatacaccgattttggctgttaccccccatgtgaatgtagcgcggcagctacaaatggtgtggggagtaaaaccgctattggtgctaggattaccttccactggtcagaccttccaagctgcgattaatgtggctcaggagttgaagttactgtcggagggagatttagtagtaatgactgctggcacactccagggaatttccggctccacagatttgattaaggttgaggtggtgacggcggtattaggtcacggaattggattaggacaaggtttagtgagtggtcgcgcacgggtagctaatactggcatggatgttagtaactttaatcctggagacatattagttgcaccgcgcactagtgccgattttgtcgaggctattcgtaaatctgcggggattattacggaagaggaaagtctcacaagtcatgctgccgttattggcttacgtctcggcgtgccagtgattgttggcgtgaagcaggcaacgcaggtgattcgcgatggagcgattataacgctggatctgcaacggggtttgatttactctggggcagtgagaacgccttag

SEQ ID NO: 627 - protein, 589 aa, Nostoc punctiforme
MQLRDSLRRTKIVATIGPATSSPEMLKAIIEAGATTLRLNFSHGTHADHQRSIRLIRQTAFELNQPVAILQDLQGPKIRLGKFDNGSIVLAKGDRFTLTNRPVVGTQEISCVTYDYLAEEVPVGAKILLDDGRVEMVVEEINRDKGDLHCRITVPGKLSNNKGVNFPGVYLSIKAMTDKDREDLMFGLDQGVDWVALSFVRNPQDMIEIKELISSTGKQVPVVAKIEKHEAIEQMEAVLALCDGVMVARGDLGVELPAEDVPVLQKRLIATANRLGIPIITATQMLDSMVSNPRPTRAEVSDVANAILDGTDAVMLSNETAVGSFPVEAVATMARIAERMEQEEAQHLNLRSVRDSRRSIPNAISQAVGQIAEQLGAAAIMTLTQTGATARNVSKFRPNTPILAVTPHVNVARQLQMVWGVKPLLVLGLPSTGQTFQAAINVAQELKLLSEGDLVVMTAGTLQGISGSTDLIKVEVVTAVLGHGIGLGQGLVSGRARVANTGMDVSNFNPGDILVAPRTSADFVEAIRKSAGIITEEESLTSHAAVIGLRLGVPVIVGVKQATQVIRDGAIITLDLQRGLIYSGAVRTP

SEQ ID NO: 628 - DNA, 1428 bp, Fusobacterium nucleatum subsp. vincentii ATCC 49256
  CDS (1)..(1428): transl_table=11
gtgagtagtttgaaaaaaacaaaaatagtttgtactattggtcctgtgactgaatcagtagaaacattaaaagaattactaaatagagggatgaatgtaatgagattaaatttctctcatggtgattatgaagagcatggaataagaataaaaaattttagacaggctatgtctgaaactggaattagaggaggcttgttacttgatactaagggtccagaaataagaactatgactttaaaagatggaaaagatgtaagtattaaggctggacaaaaatttacttttacgacagatcaatcagttgttggagataatgaaagagtagcggtaacttatgaaaattttgcaaaagatttaaaagttggaaatatggttcttgttgatgatggattacttgaactagatgttacagaaataaaaggaaatgaagttatatgtgtagctagaaatagtggtgatttagggcaaaagaaaggaataaatttacctaatgtttctgttaatttgccagcattatctgaaaaagatatagaagatttaaaatttggttgtcaaaataatgttgattttgtagctgcttcatttataagaaaagctgatgatgtaagacaagttagaaaagttcttaaagaaaatggtggagaaagaatacaaataatttctaaaatagaaagtcaagaaggacttgataattttgatgaaattttagcagaatctgatggtataatggtagcaagaggagatttaggagtagaaattcctgttgaagaagttccttgtgcacaaaaaatgatgataaaaaaatgtaatagagcaggaaaagttgtaattactgcaactcaaatgcttgattcaatgataaaaaatccaagacctacaagagcagaagcaaatgatgttgctaatgctatatttgatggtacagatgcaataatgctttcaggagaaacagcaaaaggaaaatatccattagcagctgttgaggttatgaataaaatagccaaaaaagttgatgctacaataccagcattttatgtagatggggttataaataaacatgatataacttctgctgttgctgagggaagtgctgacataagtggaagattaaatgcaaaacttatagtagttggtacagaatctggaagagctgcaagagatatgagaagatattttcctaaggcaaatattttagcaataactaataatgaaaaaactgcaaatcaattagttttatcaagaggagtaatttcttatgtagatgcttcaccaaagactttggaagaattctttattttagcagaagttattgcaaaaaaattaaatttagttgaaaataatgatataattatagcaacttgtggagaaagtgtatttatacaaggaacaactaactcaataaaagttatacaagtaaaagcttag

SEQ ID NO: 629 - protein, 475 aa, Fusobacterium nucleatum subsp. vincentii ATCC 49256
MSSLKKTKIVCTIGPVTESVETLKELLNRGMNVMRLNFSHGDYEEHGIRIKNFRQAMSETGIRGGLLLDTKGPEIRTMTLKDGKDVSIKAGQKFTFTTDQSVVGDNERVAVTYENFAKDLKVGNMVLVDDGLLELDVTEIKGNEVICVARNSGDLGQKKGINLPNVSVNLPALSEKDIEDLKFGCQNNVDFVAASFIRKADDVRQVRKVLKENGGERIQIISKIESQEGLDNFDEILAESDGIMVARGDLGVEIPVEEVPCAQKMMIKKCNRAGKVVITATQMLDSMIKNPRPTRAEANDVANAIFDGTDAIMLSGETAKGKYPLAAVEVMNKIAKKVDATIPAFYVDGVINKHDITSAVAEGSADISGRLNAKLIVVGTESGRAARDMRRYFPKANILAITNNEKTANQLVLSRGVISYVDASPKTLEEFFILAEVIAKKLNLVENNDIIIATCGESVFIQGTTNSIKVIQVKA

SEQ ID NO: 630 - DNA, 1785 bp, Synechococcus elongatus PCC 7942
  CDS (1)..(1785): transl_table=11
atgcaacccaacgactttcagcgccgcactaaaattgtcgccacgattggccctgcaacgtccaagcccgaggtgctacgggcgttgatcgaagctggcgcatcgacattacggctcaatttctcccacggaacccacgacgatcatcagcgcagcattcgcctgatccgtcagatctccttcgagctcaatcgtcccgttggcattctgcaagacttgcagggaccgaaaatccgcctcggtcgttttgccgatggcccaattacagtccaaaagggtgactccttcatcctgaccagccgcagtgtaccgggctcgcaaacaatcagctcggtcacctatgaaccgctggccgatgaagtgccggaaggcgcaacgattctgcttgatgatggccgcgtcgaaatgacggtggtcaaggtcgatcgccaaactcgtgagctgcactgcgaagtcgtggtgggtggcatcctctcgaataacaaaggggtcaacttccccggcgtctatctgtctgtcaaagccctgacggataaagaccgcgaagacctgatctttggtctggatcaaggggtggactgggtcgccctcagctttgtccgcaacccgcaggatgttctcgaaatcaaagaactgatctctcgggctgggaagtcagtgcccgtgatcgccaagattgagaagcacgaagcgatcgagcagatggaagccgtgctctcgctctgtgatggcgtgatggtggcgcggggtgacctcggcgttgagctgccagcagaagaagtgccgattctgcaaaaacgactgattcgcaccgccaatcgtctcggcattccggtgattaccgcgacccaaatgctggacagcatggtcagcaatccgcggccgacccgggctgagatttcggacgtcgctaacgccattctggatggcaccgacgcggtgatgctctccaacgaaacagccgtcggtaagtttccgattgaagccgtttcaaccatggccacgatcgcccatcggatcgaagctgagcagcaatacatcaccctcaacccgacgccgactagctcgattcccaatgcgatcagccaagcggtgggtcatatcgccgagcaattagatgcggccgcaattatgaccctgacccaaagcggcgcgacagcccgcaacgtctccaaattccgcccgaccacgccgattttggcggttacgcccaacattgatgtagcgcgtcagctgcaactggtttggggcgtgcagccgcttctggtcgttgatttgccttcgacgagccaaaccttccgcgctgccctcaacgtcgcccaagagcgcactttgctcaaagaaggcgatctggtagtgatgacagccggcaccctgccgggcgtttccggttccactgacttggtcaaggtcgaaatcgtcacggcagtgattgctcgggggattggcgttggacagggtagtgtcagtggcaaggctcgcgtcatccacaatgcagcggaagcggcgaccttggcccaaggtgaaattctgattgccacccagacctcagcggactacatcgaagcgattcgcaaagccagcggcattgtcacggaagaggaaggcttgaccagccatgccgccgtgattggcctgcgcctcggtattcccgtgattgttggcgtcaagaacgccactagcgtcgtgcgtgacggttcaatcctgacgctggatgtgaagcgcgggctactctactccggtgccgttggggctgttgctgccgagcagccgatttccgtctaa

SEQ ID NO: 631 - protein, 594 aa, Synechococcus elongatus PCC 7942
MQPNDFQRRTKIVATIGPATSKPEVLRALIEAGASTLRLNFSHGTHDDHQRSIRLIRQISFELNRPVGILQDLQGPKIRLGRFADGPITVQKGDSFILTSRSVPGSQTISSVTYEPLADEVPEGATILLDDGRVEMTVVKVDRQTRELHCEVVVGGILSNNKGVNFPGVYLSVKALTDKDREDLIFGLDQGVDWVALSFVRNPQDVLEIKELISRAGKSVPVIAKIEKHEAIEQMEAVLSLCDGVMVARGDLGVELPAEEVPILQKRLIRTANRLGIPVITATQMLDSMVSNPRPTRAEISDVANAILDGTDAVMLSNETAVGKFPIEAVSTMATIAHRIEAEQQYITLNPTPTSSIPNAISQAVGHIAEQLDAAAIMTLTQSGATARNVSKFRPTTPILAVTPNIDVARQLQLVWGVQPLLVVDLPSTSQTFRAALNVAQERTLLKEGDLVVMTAGTLPGVSGSTDLVKVEIVTAVIARGIGVGQGSVSGKARVIHNAAEAATLAQGEILIATQTSADYIEAIRKASGIVTEEEGLTSHAAVIGLRLGIPVIVGVKNATSVVRDGSILTLDVKRGLLYSGAVGAVAAEQPISV

SEQ ID NO: 632 - DNA, 1749 bp, Exiguobacterium sp. 255-15
  CDS (1)..(1749): transl_table=11
atgcgcagaactaaaattgtatgtacgattggaccggcgtcagaaaaacgtcttccagaaatgattgaagcgggtatgaacgttgctcgtcttaacttctcacacggtgactatgaagaacatggtgcccgcatcacggatatccgtcgtgcagcagaagaagcaaacaaattagttacgattcttttagatacaaaaggtccggaaatccgcacgcatacgtttgaagaaggtaaagccctcctcgtacgcggcaaacaagttatcgtcgtcagcggtgacgcaaacgaaatcgtcggtacagctgacaagttctctgtcacatacgacggtttatacgatgatgtcgaagtcggttcaatgattatgcttgatgacgggttaatcggactccgtgtcgcagaaaaactcgacaaccgtgaacttctttgcgacatcgaaaacgaaggaatcattaaaacgaaaaaaggggttaacttaccaaatgtaaaagttaacttgcctgctttgacagacaaagacatcgcagacatcgagttcggaattaagagcgacatcgatttgatcgctgcttcattcgtgcgtcgtgcgtctgacgttgttgcgattcgtcaattgctcgaaaaacacaatgccagccacatcaaaatcttcccgaaaatcgaaaaccaggaaggtgtcgccaacatcgaagaaatcatcgcgatttctgacggtttgatggtcgcacgtggtgatctcgggatcgaaattccgactgaagaagtcacgccgacacaaaaagatctcatcaaaatttgtaatgactacggtaaaccggtcatcacagcaacgcagatgcttgactcgatgcaacgtttcccgcgtccgacacgtgcggaagcatcagacgtcgccaacgcaattcttgatggaacagatgccatcatgctttcaggtgaaacagcagccggggactacccgattgaatctgttcaaatgatgcacacgattgcgaagcgtacggagaaaatgctcgactacaaaatgctcttgaaagatcgtcaaacacgcagtgagcacactgtgacggatgcgatcgctcaagcggttacgcatacagccatcaacctggacgcaaaagcaatcttgacaccgacacagtctggttacacagctgcccggatttcaaaataccgtccagagccaaacatcgttgccgtcacaccgagcgcgcgtgttgcacgtcaactcaacatcgtttggggtgtttatccgatcgttgtcgatcacctctcagacaacacggatgacatgttgacacttgctgctgatacagcaaaagaagcaggattcgtcacagacggtgacctcgtcgtcatctctgcaggtatcccggctcttacagcaggtacaacaaacatgttgaaaattcacatcgtcggtaaagaaatcacaaacggtcgcggaatcggtgaacgtggtgtcgttggcgaagtcgtcatcgcgcatacagctgaagaagcaaacgcaaaagcaaaaccaggcatgattcttgtcacgaactcaacggatcgcgacatgatgcctgcaatcgagatggctgcagcaatggtcacagtagacggcggattgactagccatgctggaatcgttggtccttcactcggtaaaccggttatcgtcggtgttgaaaacgccatgacaatcttcacggatggtcaacgtatttcaatcgatccgttaacaggtaaattgtacaacgcataa

SEQ ID NO: 633 - protein, 582 aa, Exiguobacterium sp. 255-15
MRRTKIVCTIGPASEKRLPEMIEAGMNVARLNFSHGDYEEHGARITDIRRAAEEANKLVTILLDTKGPEIRTHTFEEGKALLVRGKQVIVVSGDANEIVGTADKFSVTYDGLYDDVEVGSMIMLDDGLIGLRVAEKLDNRELLCDIENEGIIKTKKGVNLPNVKVNLPALTDKDIADIEFGIKSDIDLIAASFVRRASDVVAIRQLLEKHNASHIKIFPKIENQEGVANIEEIIAISDGLMVARGDLGIEIPTEEVTPTQKDLIKICNDYGKPVITATQMLDSMQRFPRPTRAEASDVANAILDGTDAIMLSGETAAGDYPIESVQMMHTIAKRTEKMLDYKMLLKDRQTRSEHTVTDAIAQAVTHTAINLDAKAILTPTQSGYTAARISKYRPEPNIVAVTPSARVARQLNIVWGVYPIVVDHLSDNTDDMLTLAADTAKEAGFVTDGDLVVISAGIPALTAGTTNMLKIHIVGKEITNGRGIGERGVVGEVVIAHTAEEANAKAKPGMILVTNSTDRDMMPAIEMAAAMVTVDGGLTSHAGIVGPSLGKPVIVGVENAMTIFTDGQRISIDPLTGKLYNA

SEQ ID NO: 634 - DNA, 1785 bp, Enterococcus faecium
  CDS (1)..(1785): transl_table=11
atgaaaaaaaccaaaatcgttagtacattaggaccagcaagtaactcagtagaaattatttctcaattgattgaatctggggcaaatgtcttccgctttaatttttctcatggtgaccatgaagaacaattatcacgtatgactatggtccgtgaagcagttaaaaagacaggaaaagatgtcggtattcttttagatacaaaaggagctgaaatccgtacaactgttcaaggcacaacagaagctgattttggtcgtgcaggatacatcaaatttgaagtaggagatcaaacacgcatctctatggatcctgaacatgtaggttcaaaagaaaaaatcgcggttacttacccaggattatttgacgatgttcacgttggcggacacattttatttgatgatggtttgatcgatatgcaaatcattgaaaaagacgaagcaaaccgtgaattagtcgtagaagttaaaaatgcaggtatgctaggatcacgtaaaggggtaaatgcaccaggcgtttctattagtttgccaggtattactccaaaagatgctgacgatattcgttttggtttagacaacgatatcgactttatcgctgcaagttttgtacgtaaagcacaagacgttctagatatccgcgaaatcttagaagaaaaagacatgactcatgttcaaatcttccctaaaatcgaatctcaagaaggtatcgacaacattgacgaaatcatcaaagtttctgacggtgttatgattgcccgcggagatatgggtgttgaaatcccagctgaactagtaccaatggttcaaaaacgcattatcaaaaaatgtaatgctgctggtatcccagttatcactgctacacaaatgttagaatcaatgcaagaaaacccacgtccaacacgtgcggaagcttctgacgttgctaacgctgtatttgatggcacagatgcaacaatgctatctggtgaatctgcaaacggggactacccagttgaagctgtttcaacaatggcacgtatcgaccaagaagctgaaaatgcattatcagaattaggtacattccaattgaacgaattcgataaaacagatgtaactgaaacaatcggtttatctgtagctcgtgctgcaaaaaatctaggcgtgaaaacaatcgttgctgcaactgaatcaggatacactgcaaaaatgatttcaaaatatcgtccagatgcagatatcttggctgttacttttgacgaacgcacaaaacgtggtttgatgttaaactggggcgtttacccaacagttgctgaaaaaccatcaacaactgatgaaatgtttgaactagcagctaaaaaagctgttgaattaggtttcgcatcagaaggcgatttaatcttgatcactgctggtgtaccagttggtgaacgcggaacaactaacgtgatgaaaattcaaatgattggttctaaattattagaagctcaaggcgttggacaaaaatctgtcgttgcaaatgcagttattgcttcatctgctgaagaagctgtaaaaaaagcaaaagacggaatggttctagttgtaccatcaactgacaaagaatatatgcctgcaatcgaaaaagcagctgctgttatcgttgaagaaggcggattgacttctcacgctgcagttgtaggaattgcacaagatattcctgtaatcgttggtgctaaaggcgcaacaacaacaattacagaaggtgaattgattaccgttgattcacgtcgcggcatcgtttaccgtggcgaaacaacagctatctaa

SEQ ID NO: 635 - protein, 594 aa, Enterococcus faecium
MKKTKIVSTLGPASNSVEIISQLIESGANVFRFNFSHGDHEEQLSRMTMVREAVKKTGKDVGILLDTKGAEIRTTVQGTTEADFGRAGYIKFEVGDQTRISMDPEHVGSKEKIAVTYPGLFDDVHVGGHILFDDGLIDMQIIEKDEANRELVVEVKNAGMLGSRKGVNAPGVSISLPGITPKDADDIRFGLDNDIDFIAASFVRKAQDVLDIREILEEKDMTHVQIFPKIESQEGIDNIDEIIKVSDGVMIARGDMGVEIPAELVPMVQKRIIKKCNAAGIPVITATQMLESMQENPRPTRAEASDVANAVFDGTDATMLSGESANGDYPVEAVSTMARIDQEAENALSELGTFQLNEFDKTDVTETIGLSVARAAKNLGVKTIVAATESGYTAKMISKYRPDADILAVTFDERTKRGLMLNWGVYPTVAEKPSTTDEMFELAAKKAVELGFASEGDLILITAGVPVGERGTTNVMKIQMIGSKLLEAQGVGQKSVVANAVIASSAEEAVKKAKDGMVLVVPSTDKEYMPAIEKAAAVIVEEGGLTSHAAVVGIAQDIPVIVGAKGATTTITEGELITVDSRRGIVYRGETTAI

SEQ ID NO: 636 - DNA, 1443 bp, Geobacter metallireducens GS-15
  CDS (1)..(1443): transl_table=11
atggataaatcgtcgcgcaaaaccaagatcgtagccaccctcggaccggccagctcctcgccggagatgatcagcaagctcatggaggcaggggcagaccttttccgcctcaacttctcccacggggccaacgaccagcgccgggagaccattgccaccatccggcgtctttctgccgcccggggaaaggagatcggcatcctggccgacctccaggggccaaagatcaggaccggccgcatggagaacggcgccatctccctgcgcaagggagaccccctcgacatcgtcaccgatgaggtcctcggcaccccgaccctcatctccaccatctacaaggccctcccccatgacgtgaagcccggctcccgcattctcatggacgacggcctcatcgagctgaaggtccattcggtggagggaaacctggtccgctgcaccgtggtggaggggggaaccctcaaggacctgaaggggatcaacctccccggagtccatgtctcggccccctccctctcggagaaggatctgcgggacctggagttctgcctggccgagggggtggactacatcgccctctcctttgtccggagcgccgaggacgtggaggggctcaagcggatcctcttcgagcgcggcatccacatccccgtggtggccaagatcgagaagcccgaggccctgcgcaatttcaagagcatcctcaaagcggccgacggtgtcatggtggcccggggcgacctgggtgttgagatcagcgccgagaaggtccccctcttccagaaaaaaatcatccgagcctgcaacgaggcggggaagccggttatcaccgccacccagatgctggaatcgatgatcagccacccgcgccccacccgggccgagacctccgacgtggctaacgccatccttgacgggaccgacgcggtcatgctctcgggagagaccgcctcggggcagttccccctggaagcggtgcggaccatggccaaggtggccctggatgtggagcgctacgctcagatggaggacaccctcccccagcggcgccacaacccgagcatcgccgaggcggtggccgaggccgcctgccgcgccgccgtcaccgtggacgcccgggccatctcggtcatgacccagtcggggagcaccgccgccctcatctccaagttccggccgccgctccccatcatcgcctttacccagtccctggagacccggcggcgcctctccctctactggggggtgaagccgctccccattggccccatgaccggcaccgacgagcagatcgcggccgtggaatcgacgttcctctcggcggggtaccgcaagggagacgtgatcgtcataaccatgggggtgccggtggaggcccgaggttccacgaaccttatgaaggtccacaagctggggacggggaagtttttcgagattttctga

SEQ ID NO: 637 - protein, 480 aa, Geobacter metallireducens GS-15
MDKSSRKTKIVATLGPASSSPEMISKLMEAGADLFRLNFSHGANDQRRETIATIRRLSAARGKEIGILADLQGPKIRTGRMENGAISLRKGDPLDIVTDEVLGTPTLISTIYKALPHDVKPGSRILMDDGLIELKVHSVEGNLVRCTVVEGGTLKDLKGINLPGVHVSAPSLSEKDLRDLEFCLAEGVDYIALSFVRSAEDVEGLKRILFERGIHIPVVAKIEKPEALRNFKSILKAADGVMVARGDLGVEISAEKVPLFQKKIIRACNEAGKPVITATQMLESMISHPRPTRAETSDVANAILDGTDAVMLSGETASGQFPLEAVRTMAKVALDVERYAQMEDTLPQRRHNPSIAEAVAEAACRAAVTVDARAISVMTQSGSTAALISKFRPPLPIIAFTQSLETRRRLSLYWGVKPLPIGPMTGTDEQIAAVESTFLSAGYRKGDVIVITMGVPVEARGSTNLMKVHKLGTGKFFEIF

SEQ ID NO: 638 - DNA, 1455 bp, Novosphingobium aromaticivorans DSM 12444
  CDS (1)..(1455): transl_table=11
atggccaagctcgatcctcgcggacgcaaggtaaagatcctcgccacggtcggccctgccagccgcgatccggaaatgctcgaaaagctgttccgcgccggcgccgacgccttccgcgtcaacatgagccacggcgaacacgcgattcacgccgagaccatcgccaacatccgcgcgctggaaaagaaggtgaaccggccgatcacgatcctgtgcgacctgcaggggcccaagcttcgcgtcggcaagttcaaggacggccgcgcggtcatccgccattcgggccacttcacgctcgatcgcaatcccgagccgggcgatgaaacccgcgtctgcctgccgcatcccgaactgttcggcgttcttcacaagggccagcgcctgctgatcgacgacggcaagctgcggctgcgggtgatccgcgccgacgagaacgagatcctctgttcggccgaagtcggcggcgtcatttccgatcgcaagggcgtcaacgttcccgatgcggtggtgcccgttcccgcgctgaccgacaaggatcggcgcgacctgtcgttcgcggttgagcagggggcggactggatcgcgctgtcgttcgtccagcggcccgaggacgtggccgaggcgcggcgcctgctgggcggccacggctcgctcatggccaagatcgaaaagccggcggcgatttcccggcttgaagagatcgtcgagctttcggacggcatcatggtcgcccgcggcgaccttggcgtcgagctgaaccctgaagaggtgccgccgctccagaagcgcatcgtcgaaaccgcgcgccgccagggcaagccggtggtcgtcgccacgcagatgctcgaatcgatgatcgaagcgccgacgccgacccgcgccgaagtttcggacgtcgccaatgcggtctatgacggcgccgacgcggtgatgctctcggccgaaaccgccgccggtgcctggccggaagaggcggtcaccatcatgcaccgcatcgccgcgcaggtcgaagccgatccgggctatggcgcgcgcgtccacttcttagagacgcttcccgatccgaccaccgccgacgcccttgcgcaggctgcggcgagcatcaccgagaccttgccgatttccgggatcatcgtgtttaccggatcgggttccaccgctcgccgcgtggcgcgcgaacgtcccggcgtgccgatgctcgtgctcacgccttcgcacaagacggcgcgcaaggtcgggctgctgtggggcgcccatgccgtcagcaccaaggacatcggcagcttcgaggagatgatcgccaagggcaagcgcatggcgctgcgccacggcttcggctcggccggatccaagctcgtcgcgctggcgggtgttccgttcggcacgccgggggcgaccaacctgctccacgtggtgacgcttaccggcgacgaactcacccgccacggcgaatga

SEQ ID NO: 639 - protein, 484 aa, Novosphingobium aromaticivorans DSM 12444
MAKLDPRGRKVKILATVGPASRDPEMLEKLFRAGADAFRVNMSHGEHAIHAETIANIRALEKKVNRPITILCDLQGPKLRVGKFKDGRAVIRHSGHFTLDRNPEPGDETRVCLPHPELFGVLHKGQRLLIDDGKLRLRVIRADENEILCSAEVGGVISDRKGVNVPDAVVPVPALTDKDRRDLSFAVEQGADWIALSFVQRPEDVAEARRLLGGHGSLMAKIEKPAAISRLEEIVELSDGIMVARGDLGVELNPEEVPPLQKRIVETARRQGKPVVVATQMLESMIEAPTPTRAEVSDVANAVYDGADAVMLSAETAAGAWPEEAVTIMHRIAAQVEADPGYGARVHFLETLPDPTTADALAQAAASITETLPISGIIVFTGSGSTARRVARERPGVPMLVLTPSHKTARKVGLLWGAHAVSTKDIGSFEEMIAKGKRMALRHGFGSAGSKLVALAGVPFGTPGATNLLHVVTLTGDELTRHGE

SEQ ID NO: 640 - DNA, 1413 bp, Cytophaga hutchinsonii
  CDS (1)..(1413): transl_table=11
atggtaaacaagaaaacaaagattattgcaactgtaggtccggcatgtaacacgaaggagaagttatgggagttggttcaagctggcgcgaacattttcagattgaatttttctcacggcactcacgatgtacatcaaggcgtaattaacgcgatccgcgaacttagaaaagaacacaatgttaacatagcaatccttcaggatttgcaaggtcctaagatccgtactgacgaagttgagaacaacggtgttgaacttgttgcaggtgcgcagattgttattactaaagaaaaaatgttaggtactaaagataaaattagtacttcttataaaatgcttacatcggatgttaaaaaaggcgatgctattttaattgatgatggtaatattgaattaaaagttttagaaacaggtaatggtgaagttacgtgtgtggttatttatggcggtatcttaaaatcacgtaaaggtatcaacctgccaaacacaattgtttccgaaccttcattaacagacaaggataaagaagatttattattcggtttgaaaaatgaagttgactggattgcgctttcttttgttagaagcgcagttgatctgaatgaattaaaagcaattattgctgaacatggtaaatcatgtaaagtaattgccaaggttgaaaaacctgaagcagttaaagatattgatgcgattattgaagcatctgatgcaatcatggttgcacgtggtgacctgggggttgaacttcagatggaagatgttccgatgatccagaaaatgatcattaaaaaatgtaatcagttagctaaacctgttattgtggcaacacaaatgatggaaagtatgattacaaacgcgcgtcctacacgtgccgaagcaagtgacgtagcgaacgcaatcattgatggtacagatacaatcatgttgtctgctgaaacagcttcaggaaactatccggtgatcacggttaaagcaatgacacgtatttgccaggcggtagaaaaagaagctgatatctataataaatcaacattagatgatattacaaataccagcgacagtgttatcgcttctgcatgtgaattagcggataaagtaaatgctaaagcaattatcggattgtctcaatccggttattctgctttcagaattgcaagccacaggccaaaagcaagcatttatatcgctacacatgatgagcaattaatgaatcagatgaaccttgtttggggtgtacaggctttcaggtttgaaaaatttacaacaacagacgaatcaatcgaagcggttaagaaaagccttgttgaaaaaggacttttaaagaaaggtgatatctacgttactacggcttctatgccaatggcagatattcagcttgcaaacagcctgaagttaggaattgttgaataa

SEQ ID NO: 641 - protein, 470 aa, Cytophaga hutchinsonii
MVNKKTKIIATVGPACNTKEKLWELVQAGANIFRLNFSHGTHDVHQGVINAIRELRKEHNVNIAILQDLQGPKIRTDEVENNGVELVAGAQIVITKEKMLGTKDKISTSYKMLTSDVKKGDAILIDDGNIELKVLETGNGEVTCVVIYGGILKSRKGINLPNTIVSEPSLTDKDKEDLLFGLKNEVDWIALSFVRSAVDLNELKAIIAEHGKSCKVIAKVEKPEAVKDIDAIIEASDAIMVARGDLGVELQMEDVPMIQKMIIKKCNQLAKPVIVATQMMESMITNARPTRAEASDVANAIIDGTDTIMLSAETASGNYPVITVKAMTRICQAVEKEADIYNKSTLDDITNTSDSVIASACELADKVNAKAIIGLSQSGYSAFRIASHRPKASIYIATHDEQLMNQMNLVWGVQAFRFEKFTTTDESIEAVKKSLVEKGLLKKGDIYVTTASMPMADIQLANSLKLGIVE

SEQ ID NO: 642 - DNA, 1434 bp, Oenococcus oeni PSU-1
  CDS (1)..(1434): transl_table=11
atgaaaaagacaaagattgtttctactttaggtcccgcatccaacgatctaaagattatttccgcattgataaataatgggattaatgttgcccgttttaatttcagtcacggtgaccatgatgagcatgctgctcgtatggccctagtccatgatgctgaaaaaaagaccggcaagttgatcggatttatgcttgatacgaaaggtgcagagattcgtacaactgttcaagatacaccgaacggtaagattgaattcaagaaaggtgacaggcttcgcatttcgatgaatgaaaagattaagggcacaaaagagaaaattgctgtgacctataagggactttatgacgacgtaaaagtcggtggtaaagttttgttcgatgatggcattatcgaaatgaccgttatcagtaaagattccgaaaaaaaagaactgcttgtccaagttgataacgatggagtgctgggcggaagaaaaggcgttaacgctcctggtgttgcaattaaccttcctggaattactaagaaggataaatcagatatcgagttcggtttggaacagggaattgacttcatcgctgcttcctttgttcgtaaggctcaggatgttcttgacatccgtaagttgttgaaaaagcatcatcaagaaaatcatgtcatgatttttcctaagattgaatctcaagaaggaattgataacttcgaatcaatcattgccgtttccgatggtttgatggtaccgcgtggtgatatgggagtcgagattccttatgaagaagtacctgtgattcaaaaaatgatgattcgttacatgaaccgtcttggaaagccggtcattactgctacccaaatgcttgattcgatgattgaaaatcctcgtgcaactcgtgccgaaattaacgatgtcgaaaatgctgtttgggatggcactgatgcgacgatgctttctggtgaatctgccaatggtagttggcctgttgaagctgttaagacgatgtctacatctgatgaatacgctgaaaatcatgttcacgacgacggcaataggatcgatttgagaaacgaaccaaagtcaagtgacacagaagttttggctcaggccgccgttgacgcagcacgcgaggctggtgctaaagcaattgttgcttctacagcatctggctacactgctcgcttaatttccaaatatcgacctgatatgccaattttggcaatcacttacgatgaaaaagttgctaggtctttgactgttaattatgctgtttatccggtcgttaaagatgctccggaaacaacagatgatctgattgaattggccaagaaaactgttcatgatgaaaaattggctaagagagacgacacaatcgttgttactgctggccttccaatcaaaaagcccggcacaaccaatttaattcatgttgtaaagctttaa

SEQ ID NO: 643 - protein, 477 aa, Oenococcus oeni PSU-1
MKKTKIVSTLGPASNDLKIISALINNGINVARFNFSHGDHDEHAARMALVHDAEKKTGKLIGFMLDTKGAEIRTTVQDTPNGKIEFKKGDRLRISMNEKIKGTKEKIAVTYKGLYDDVKVGGKVLFDDGIIEMTVISKDSEKKELLVQVDNDGVLGGRKGVNAPGVAINLPGITKKDKSDIEFGLEQGIDFIAASFVRKAQDVLDIRKLLKKHHQENHVMIFPKIESQEGIDNFESIIAVSDGLMVPRGDMGVEIPYEEVPVIQKMMIRYMNRLGKPVITATQMLDSMIENPRATRAEINDVENAVWDGTDATMLSGESANGSWPVEAVKTMSTSDEYAENHVHDDGNRIDLRNEPKSSDTEVLAQAAVDAAREAGAKAIVASTASGYTARLISKYRPDMPILAITYDEKVARSLTVNYAVYPVVKDAPETTDDLIELAKKTVHDEKLAKRDDTIVVTAGLPIKKPGTTNLIHVVKL

SEQ ID NO: 644 - DNA, 1764 bp, Pediococcus pentosaceus ATCC 25745
  CDS (1)..(1764): transl_table=11
atgaagaaaaccaaaatcgtttcaacacttggtcctgcaagtacttctgttgacacaattgttaaattaattgaagccggtgctaatgtattccgctttaacttttcacatggtgaccatgaagaacatctaggtcgttataacatggttaaagaagcagaaaagattactggcaagtcagtaggtattttgcttgatacaaagggtgctgaaatccgtacaactccacaaaaagatggtaaccaagaatatcacacaaatgataaggttcgcatctcaatggatgacactttggaaacaacaaaagaaaagattgctgttacatatgatggactttttgatgacgttcatgttggtggacacgttctttttgatgatggacttcttgattttaagattgacgaaaaagatgaagaaaaccgcgaattagttgctcatgcaactaacaatggtgttcttggatcacgtaagggtacaaatgctcctggtgtttcaattaacttacctggtattactgaaaaagatgctgatgatattcgttttggtcttgaatcaatgaacatcaacttcatcgctgcaagtttcgtacgtaagccacaagacgttcttgaaattcgtgaattgttggaagaaaagaacatggaagatgttcaaattttccctaagatcgaatcacaagaaggtattgacaacacagacgaaatcttgaaagtttcagatggtattatgattgctcgtggtgacatgggtgttgaaattccagctgaaaatgttcctttggtacaaaagacattgatcaagaagtgtaatgcagttggtttgcctgttatcacagcaactcaaatgcttgactcaatgatcgaaaacccacgtccaacacgtgctgaagcttctgacgttgctaatgctgtttgggatggtacagatgctactatgctttctggtgaaagtgctaatggtgactaccctgttgaagctgttgctacaatggctaagattgacgaaaaagctgaaaatgctatggctgaagacggaaatcttcaaatcaacacatttgatcaaagtgatgttacagaaacaattagtgctgctgttgctcgtgctgctaagaaccttggtgttaagactatcgttgctgcaacacaatcaggttacacagctcgtatgatttctaagtatcgtccagatgctgacattcttgcaatcacatttgacgaacgtgttcgtcgcggtttgatggttaactggggtgtacacccaatcatcgctgaccgtccatcaacaactgatgaaatgtttgaactagctgctaacaaagctgtagatcttggtcttgctaaagaaggagacttgattcttgttgttgctggtgttccagttggcgaaagtggaacaacaaacatcatgaagttacaactaattggttcaaagcttgcttctggtcaaggtgttggtgatgaaacagttattggtaaagcagttgttgctacatcagctgatgaagctaacaaaaaagctgttgaaggcggagtacttgttacaaagacaactgacaaagactatctaccagcaattgaaaaatcaagtgctttagtagttgaaaatggtggtttgacatcacacgctgcagtagttggtatttcaatgggaattcctgttattgttggtgtacaaaacgcaacttcaatcctttcagatgatgaattgattacagttgactcacgtcgtggtattatctaccatggtgcatcaaactcactataa

SEQ ID NO: 645 - protein, 587 aa, Pediococcus pentosaceus ATCC 25745
MKKTKIVSTLGPASTSVDTIVKLIEAGANVFRFNFSHGDHEEHLGRYNMVKEAEKITGKSVGILLDTKGAEIRTTPQKDGNQEYHTNDKVRISMDDTLETTKEKIAVTYDGLFDDVHVGGHVLFDDGLLDFKIDEKDEENRELVAHATNNGVLGSRKGTNAPGVSINLPGITEKDADDIRFGLESMNINFIAASFVRKPQDVLEIRELLEEKNMEDVQIFPKIESQEGIDNTDEILKVSDGIMIARGDMGVEIPAENVPLVQKTLIKKCNAVGLPVITATQMLDSMIENPRPTRAEASDVANAVWDGTDATMLSGESANGDYPVEAVATMAKIDEKAENAMAEDGNLQINTFDQSDVTETISAAVARAAKNLGVKTIVAATQSGYTARMISKYRPDADILAITFDERVRRGLMVNWGVHPIIADRPSTTDEMFELAANKAVDLGLAKEGDLILVVAGVPVGESGTTNIMKLQLIGSKLASGQGVGDETVIGKAVVATSADEANKKAVEGGVLVTKTTDKDYLPAIEKSSALVVENGGLTSHAAVVGISMGIPVIVGVQNATSILSDDELITVDSRRGIIYHGASNSL

SEQ ID NO: 646 - DNA, 1749 bp, Moorella thermoacetica ATCC 39073
  CDS (1)..(1749): transl_table=11
atgcggcacacgaagattgtctgtaccatgggcccggccagcgagcgggtcgaggtaatcaaggctatgatccgggcggggatgaacgtagcccggttcaatttttcccatggcagccacgccgagcacggggcgcggatggctgccgtgcgccaggcggcagctgaactgggcgccagggtagcgttaatgctggataataaggggcccgaaattcgcctgggagagatccagggcgaggtcaccctgaaggacggcgaccaggtgaccctgaccacagaacctattattggtgacgccaggcgtttgccggtgagctttgccggtctgccgggggacgtccggccgggccagatcattctcctggacgacggcctggtggagctggaggtcctggcgaccaccgccaccgagattcactgccgcgtccgtcacggcgatgttatttccagccataagggcgtcaacgtccccggggccgagatcagcctgcctccttttaccgagcaggatattaaagaccttgagttcggcctccagcaggggatagattttatcgccctctcctttgtccggacggccggggatgtcctggcagtacgccgggagcttgagaagcgcaacgccagggtagccattatcgccaagatagaaaaccatgccggggtcaataacatccacgagatccttgaggtggccgacggggtcatggtggcccggggtgacctgggggtagagatccccgtggaagaggtccccctggtgcagaaaaagattatcgaggcgtgtaacctggccggcaagccggttatcacggccacccagatgctggagtctatgattcataacccgcggccgacccgggccgaagccagcgatgtggccaatgccatctttgacggaacggatgccattatgctctccggggaaacggctacgggccgttatccggtagaggctgtggcgaccatggcccgcatcgcccgccgggccgagaggggtttgccctatggtgacctgttgacgaaaaagggtctggctgccgagcggacggccaccgatgccatcagccacgcgagctgcaccattgcctatgaactcgacgccgccgccattatcacccccacggcttccggttccaccgcccgccgggtggccaaataccgtccccgggcgcctatcctggccaccagccccaacgagaaggttttgaaccagctctgcctggtctggggggttgaacccctcctggtggagccgacaagcggcaccgacgaaatggttaatgccgcggtggcggcggccatactctccggccgggtgaaacagggcgacctggtggttattactgccggcgtgcctgccggtgttccgggtaccaccaacctcctcaaggtccacatcgtcggcgaggtcctggtgcggggacgggggatcggcaaagaagtaaccagtggcccggtccggctggtaaagactgctgctgacgccgtggcaagggtcaaaaaaggcgacattctggtgaccactgagaccggccctgaattcctgccagctatggaaagggcggcagcagtaattacggaaaccggggggctgagttcccatgccgcggtaaccggcctgagcctgggtataccggtagtcgtcggggcaaagggggccactgaaaagctaaccgatgatctggtcgtaaccatagacgttgtccgcggcctggtctaccgcggtcagacgcgggtgttgtga

SEQ ID NO: 647 - protein, 582 aa, Moorella thermoacetica ATCC 39073
MRHTKIVCTMGPASERVEVIKAMIRAGMNVARFNFSHGSHAEHGARMAAVRQAAAELGARVALMLDNKGPEIRLGEIQGEVTLKDGDQVTLTTEPIIGDARRLPVSFAGLPGDVRPGQIILLDDGLVELEVLATTATEIHCRVRHGDVISSHKGVNVPGAEISLPPFTEQDIKDLEFGLQQGIDFIALSFVRTAGDVLAVRRELEKRNARVAIIAKIENHAGVNNIHEILEVADGVMVARGDLGVEIPVEEVPLVQKKIIEACNLAGKPVITATQMLESMIHNPRPTRAEASDVANAIFDGTDAIMLSGETATGRYPVEAVATMARIARRAERGLPYGDLLTKKGLAAERTATDAISHASCTIAYELDAAAIITPTASGSTARRVAKYRPRAPILATSPNEKVLNQLCLVWGVEPLLVEPTSGTDEMVNAAVAAAILSGRVKQGDLVVITAGVPAGVPGTTNLLKVHIVGEVLVRGRGIGKEVTSGPVRLVKTAADAVARVKKGDILVTTETGPEFLPAMERAAAVITETGGLSSHAAVTGLSLGIPVVVGAKGATEKLTDDLVVTIDVVRGLVYRGQTRVL

SEQ ID NO: 648 - DNA, 1434 bp, Oenococcus oeni ATCC BAA-1163
  CDS (1)..(1434): transl_table=11
atgaaaaagacaaagattgtttctactttaggtcccgcatccaacgatctaaagattatttccgcattgataaataatgggattaatgttgcccgttttaatttcagtcacggtgaccatgatgagcatgctgctcgtatggccctagtccatgatgctgaaaaaaagaccggcaagttgatcggatttatgcttgatacgaaaggtgcagagattcgtacaactgttcaagatacaccgaacggtaagattgaattcaagaaaggtgacaggcttcgcatttcgatgaatgaaaagattaagggcacaaaagagaaaattgctgtgacctataagggactttatgacgacgtaaaagtcggtggtaaagttttgttcgatgatggcattatcgaaatgaccgttatcagtaaagattccgaaaaaaaagaactgcttgtccaagttgataacgatggagtgctgggcggaagaaaaggcgttaacgctcctggtgttgcaattaaccttcctggaattactaagaaggataaatcagatatcgagttcggtttggaacagggaattgacttcatcgctgcttcctttgttcgtaaggctcaggatgttcttgacatccgtaagttgttgaaaaagcatcatcaagaaaatcatgtcatgatttttcctaagattgaatctcaagaaggaattgataacttcgaatcaatcattgccgtttccgatggtttgatggtaccgcgtggtgatatgggagtcgagattccttatgaagaagtacctgtgattcaaaaaatgatgattcgttacatgaaccgtcttggaaagccggtcattactgctacccaaatgcttgattcgatgattgaaaatcctcgtgcaactcgtgccgaaattaacgatgtcgaaaatgctgtttgggatggcactgatgcgacgatgctttctggtgaatctgccaatggtagttggcctgttgaagctgttaagacgatgtctacatctgatgaatacgctgaaaatcatgttcacgacgacggcaataggatcgatttgagaaacgaaccaaagtcaagtgacacagaagttttggctcaggccgccgttgacgcagcacgcgaggctggtgctaaagcaattgttgcttctacagcatctggctacactgctcgcttaatttccaaatatcgacctgatatgccaattttggcaatcacttacgatgaacaagttgctaggtctttgactgttaattatgctgtttatccggtcgttaaagatgccccggaaacaacagatgatctgattgaattggccaagaaaactgttcatgatgaaaaattggctaagagaggcgacacaatcgttgttactgctggccttccaatcaaaaagccgggcacaaccaatttaattaatgttgtaaagctttaa

SEQ ID NO: 649 - protein, 477 aa, Oenococcus oeni ATCC BAA-1163
MKKTKIVSTLGPASNDLKIISALINNGINVARFNFSHGDHDEHAARMALVHDAEKKTGKLIGFMLDTKGAEIRTTVQDTPNGKIEFKKGDRLRISMNEKIKGTKEKIAVTYKGLYDDVKVGGKVLFDDGIIEMTVISKDSEKKELLVQVDNDGVLGGRKGVNAPGVAINLPGITKKDKSDIEFGLEQGIDFIAASFVRKAQDVLDIRKLLKKHHQENHVMIFPKIESQEGIDNFESIIAVSDGLMVPRGDMGVEIPYEEVPVIQKMMIRYMNRLGKPVITATQMLDSMIENPRATRAEINDVENAVWDGTDATMLSGESANGSWPVEAVKTMSTSDEYAENHVHDDGNRIDLRNEPKSSDTEVLAQAAVDAAREAGAKAIVASTASGYTARLISKYRPDMPILAITYDEQVARSLTVNYAVYPVVKDAPETTDDLIELAKKTVHDEKLAKRGDTIVVTAGLPIKKPGTTNLINVVKL

SEQ ID NO: 650 - DNA, 1425 bp, Lyngbya sp. PCC 8106
  CDS (1)..(1425): transl_table=11
atgcaaatgtcaactcatcgaaccaaaattgtcgccactatcggtcctgctagtcgagatgccaacacccttaaacaaatggtcgttgcaggaatgagaatcgcccgattaaatttctctcatggtagctacgaagatcatgccgaaacgattaaaatgttacgtcaggtttcagatgatttagatatccagattaccctattgcaagacttacaagggccaaagattcgagtcggtcagttacccgatggtgggattgaactaatcacaggtgaatccctaactttagttcccattgatgagtataacaatcaaccgaatactatttcgattgattatccctctttagcagaagaagccgaacctggggcgcaaattttgctcgatgatggcttattagaactcaaaattgaggaaatttcgggtaaagccgttcaatgtaaaatcgtagaagggggcttattaaaaagtcgcaaaggcgtcaatttacccagtttaattttacaactgccttcgatgacagaaaaagatatccaagacttagaatttggtttatctcaagggattgattgggtgtctctgagttttgtccgtcgggctgaagacgttcgccacttaaagacatttctcacggaacacggggctgaacatattccggtaatggcaaaaattgagaagccccaagctattgagaacttagaagcaattatcaatgaatgtgacggtttgatggtcgcccgaggggatttaggagtagaaatgagtccagaaaaagtgcctttgttgcaaaaacagattattaaactctgcaaccaaaaaggagttccagtaattacggcaacccaaatgctagaaagcatgattcataatcctcgcccgactcgtgcagaagcctcggatgtcgccaatgcgattattgacggtacggatgcggtgatgttgtcgggagagtccgccgtgggtgattttccggtgaaagcggtggaaatgctggctaaaattgcctctggtgttgaaccggaattgaaatttgttaactatcctcctgctgagtccgacgaaacccatgcgttgagtgaagctataaatacaattgataaaattctgccgttgaagtgtattgttgcttatactagcaccggatatactgctgaactcgctgccgcagaacgaccaaaagctgctgttgtggcttttacccccgatgagattacctaccatcgtttgaacttagtttggggcgttctccccattttgttagctcacgaagttggctcttttgaaggattaatggatcaaaccgaaacattactgttagaacgtcagttagtcaatctgggtgatcaaattctggttgttgctggaattcccacgaaacaccccagaggcaccaacttcctgaaaattcatcggattgaacgctaa

SEQ ID NO: 651 - protein, 474 aa, Lyngbya sp. PCC 8106
MQMSTHRTKIVATIGPASRDANTLKQMVVAGMRIARLNFSHGSYEDHAETIKMLRQVSDDLDIQITLLQDLQGPKIRVGQLPDGGIELITGESLTLVPIDEYNNQPNTISIDYPSLAEEAEPGAQILLDDGLLELKIEEISGKAVQCKIVEGGLLKSRKGVNLPSLILQLPSMTEKDIQDLEFGLSQGIDWVSLSFVRRAEDVRHLKTFLTEHGAEHIPVMAKIEKPQAIENLEAIINECDGLMVARGDLGVEMSPEKVPLLQKQIIKLCNQKGVPVITATQMLESMIHNPRPTRAEASDVANAIIDGTDAVMLSGESAVGDFPVKAVEMLAKIASGVEPELKFVNYPPAESDETHALSEAINTIDKILPLKCIVAYTSTGYTAELAAAERPKAAVVAFTPDEITYHRLNLVWGVLPILLAHEVGSFEGLMDQTETLLLERQLVNLGDQILVVAGIPTKHPRGTNFLKIHRIER

SEQ ID NO: 652 - DNA, 1746 bp, Lyngbya sp. PCC 8106
  CDS (1)..(1746): transl_table=11
atgcaccgaaccaaaattgtcgccactattggccctgcaacccagcagccagatgttctacgcgccttgatcgaagcaggtgctaccactctccgactcaacttttctcatggcacccatgaagatcaccaacgtagtattcggatgattcggcaaatttcctttgaactgaatcaaccggttggcattcttcaagatcttcaaggcccaaaaattcgtttaggtaaatttgaaaacggttctattgtcctcaagcgagacgatcccttcattctcacgtcacgtcagttaccgggaacccaagaaatctcctctgtgacctacgaacctctggctgaggaagttcctgaaggtgcagacattttgctcgatgatggcaaagtcgaaatgaaggtggaaaaaattgaccgcaaagccaaagaacttcactgtcgggttgtcgttggcgggccgctctccaatagcaaaggcgttaattttccgggtgtttatttatcgattaaagccttaacggacaaagatcgtaaggatttgatgttcggcctcgatcaaggggttgattgggttgccctcagctttgtacgaaatcctcaagatattttagaaatcaaagaactgatcgctagtgccggaaaaaatgttcctgtggttgccaaaatcgagaaacacgaagcgattgaacaaatggaggaaatcctgaccctctgtaatggtgtgatggtcgctcggggcgatttaggggtggaactcccggctgaagatgttccgatcttacaaaaacggttaattgtgacggcgaaccgcataggaattccggtgattacggccactcaaatgttagacagtatggtggggaatccccggccaactcgggcggagatttctgatgttgccaacgcaattttagatggtactgatgcagtcatgctttctaatgaaacggcggtgggtaaatatccggtcgaagcagtggctacaatggctcgaattgctcgccgaattgaaaaagaagggattacgcgcaatatttctactgttgctgatactggccgctctgttccgaatgcgatttcggcggctgttgctcagattgcccaacaactggatgcaggggcaattatgactttaacgaaaaccggggcaacggctcgaaatgtttccaagtttcgcccggccactcctattttagccgtgacgcctcacgtggaggtagcaagacagttgagcttggtttggggggtgaagccgttattggtcttggatttgtcttcgacagatcaaacgtttcagtctgcggttaatgtcgctcgggaaaatcatttactttctgatggggatttggtcgtgacaacagccgggactctacaaggggttccgggttcgacggatttggtcaaggttgaagtggttaatgctttgctcggcaaaggaacggctgtgggtcagggttcggtaacgggacgggccagagtcgcacaagaggtgtcgcaactaaatgattttagtgcgggtgatattttggttgttcatcaaaccaatgcggagtttgtcgagttgattcgtaaagcttcgggtattgtgacggaagttgatagtttaacgtctcatgcggcggtgattggtttgcgtttgggtattccggtgattattggggtgaagaatgccactgatgtgattcgcaatggcacaattttaactttggatatgcaacggggttgggtatattcgggggcgacgagagggtaa

SEQ ID NO: 653 - protein, 581 aa, Lyngbya sp. PCC 8106
MHRTKIVATIGPATQQPDVLRALIEAGATTLRLNFSHGTHEDHQRSIRMIRQISFELNQPVGILQDLQGPKIRLGKFENGSIVLKRDDPFILTSRQLPGTQEISSVTYEPLAEEVPEGADILLDDGKVEMKVEKIDRKAKELHCRVVVGGPLSNSKGVNFPGVYLSIKALTDKDRKDLMFGLDQGVDWVALSFVRNPQDILEIKELIASAGKNVPVVAKIEKHEAIEQMEEILTLCNGVMVARGDLGVELPAEDVPILQKRLIVTANRIGIPVITATQMLDSMVGNPRPTRAEISDVANAILDGTDAVMLSNETAVGKYPVEAVATMARIARRIEKEGITRNISTVADTGRSVPNAISAAVAQIAQQLDAGAIMTLTKTGATARNVSKFRPATPILAVTPHVEVARQLSLVWGVKPLLVLDLSSTDQTFQSAVNVARENHLLSDGDLVVTTAGTLQGVPGSTDLVKVEVVNALLGKGTAVGQGSVTGRARVAQEVSQLNDFSAGDILVVHQTNAEFVELIRKASGIVTEVDSLTSHAAVIGLRLGIPVIIGVKNATDVIRNGTILTLDMQRGWVYSGATRG

SEQ ID NO: 654 - DNA, 1506 bp, Vibrio cholerae V52
  CDS (1)..(1506): transl_table=11
ttggcaattgacgaaataaagttgctaccgccgagaacacttcaaaaccaccaccaacttcaaaatcattttgtttatcggagaaactcttccatgaaaaagaccaaaatcgtatgtacgattggcccaaaaactgagtctgtagagaaactgactgagcttgtaaacgctggcatgaatgttatgcgtctcaacttctctcacggtgactacgttgaacacggcactcgtatcactaacttccgtaaagtgatggaagtgaccggtaaacaactggcgatcctactggatactaaaggtccagagatccgtactatcaagctggaaaacggtgacgatgtggatctggtcgctggccaagagttcactttcacaactgacacgaaagttgttggtaacaaagagcgcgtagcagtcacttactctggttttgcaaaagacctgaacgtgggcaaccgtattctggttgacgacggtcttatagagatggaagtactggcgaccactgacactgaagtgaagtgtaaagttctgaacaacggcgctctgggtgaaaacaaaggtgttaacctgccaggcgtttctgtcaatctgccagcgctgtctgaaaaagacaaaaacgacctgaaatttggttgtgagcaaggcgttgatttcgttgctgcctctttcatccgtaaaggttctgacgtgaaagaaatccgtgaagtattagcttctcacggcggtcaaaacattcaaatcatctctaaaatcgaaaaccaagaaggcttggacaacttcgatgagatccttgagctgtctgacggcatcatggttgcacgtggcgacctaggtgtagaaatcccagcagaagaagttatcttcgctcaaaagatgatgatcgagaaatgtaaccgtgcacgtaaagtggttatcacggcgacgcaaatgctggattcaatgatcaagaacccacgtccaactcgcgcagaagcgggcgacgttgcgaacgcgatcatggatggtactgatgctgtaatgctttctggcgaaacagcaaaaggtaagtacccagttgaagcggtgaagatcatggcgcaaattgctgagcgtactgaccctgtactgaaagcagaactgggttcacgcctagacagcccacgtctacgtatcactgaagccgtatgtaaaggtgcagtagacaccgcagagaaactggcagcgccactgatcatcgtagcaactgaagcgggtaaatctgctcgttcagttcgtaagtacttcccaacggctaacattattgcagtcaccaccaacaagaaaacagcagctcagttagtgctttctaaaggtgtaacgccagttgtggttgacgcgattgacaacactgacgctttctaccacctaggtaaagagattgcgctgcaatctggccttggcaagaaaggcgacatcgtagtgatggtttcaggcgcactggttgcttctggcacaacgaacactgcatcagtacacgtactgtaa

SEQ ID NO: 655 - protein, 501 aa, Vibrio cholerae V52
MAIDEIKLLPPRTLQNHHQLQNHFVYRRNSSMKKTKIVCTIGPKTESVEKLTELVNAGMNVMRLNFSHGDYVEHGTRITNFRKVMEVTGKQLAILLDTKGPEIRTIKLENGDDVDLVAGQEFTFTTDTKVVGNKERVAVTYSGFAKDLNVGNRILVDDGLIEMEVLATTDTEVKCKVLNNGALGENKGVNLPGVSVNLPALSEKDKNDLKFGCEQGVDFVAASFIRKGSDVKEIREVLASHGGQNIQIISKIENQEGLDNFDEILELSDGIMVARGDLGVEIPAEEVIFAQKMMIEKCNRARKVVITATQMLDSMIKNPRPTRAEAGDVANAIMDGTDAVMLSGETAKGKYPVEAVKIMAQIAERTDPVLKAELGSRLDSPRLRITEAVCKGAVDTAEKLAAPLIIVATEAGKSARSVRKYFPTANIIAVTTNKKTAAQLVLSKGVTPVVVDAIDNTDAFYHLGKEIALQSGLGKKGDIVVMVSGALVASGTTNTASVHVL

SEQ ID NO: 656 - DNA, 1755 bp, Thermosinus carboxydivorans Nor1
  CDS (1)..(1755): transl_table=11
atgttcaagaaaacaaagattgtttgcaccgtggggccgagtaccgatcgccccggggtactggaacaaatgcttgttgctggcatgaatgtcgcccgtttcaatttttctcatggaacacatgccgaacatgccaaacgcattgaaatggtgcgggccgctgctgccaaagttaaccggccggtagcgctgatgcttgacacgaaagggccggaaatgcggcttggagcattcccggcaggcaaggtcaaactgactgccggccagcgctttatactgaccagccaggacgtgcccggcacggcggaaagagcatcggtaaaccacaaactgctgccggaagaggtgcggccaggcgatacaatccttattgccgacggtctcatcagtctgcatgttgatgcggtggaaggcaccgaaattattactactgtccaaaacagcggtgaaatcggcagcatgaaacgggtggctgcgccgggagttaacgttcatttgccaccgctgtccgagcaggatgtccgcgacattctctttggtttggagcagaaaatggacttcattgccgcctcttttgtccagcgggcggctgatgtgttggctattcgcaaggttgtggaagaagctggcggtcagattgacatcattgcgaagattgaaaacgctgaaggcgttaaaaatatcgatgaaattcttaaagttgcagatggaattatggtggcgcgcggcgatcttggtgtcgaaatccccgccgaggaagtgccgttagtacaaaaaacgataatcaagaaatgcaataaagcaggtaagccggtcattaccgctacccaaatgctcgagtccatgattgccaatccccggcctactcgcgcggaggcaagcgatattgccaacgccattctcgacggcagtgacgcaattatgctgagcggtgaaacggcttcgggccaatatccggttgaagcagtaaacacgatggctaaaattgccgcgcggaccgaggcggcactgggctataccgatattttaatgggcaaagggcttttaccgcagcgtaccactaccgatgccatcagtcacgccaccgtccaggttgctcatgaactaaacgcagccgccattattacggctaccgaatcgggatatactgcccgcatggtatcgaaatatcgtccccaggcagccattattgcagttactccccatgcacgcacggtgcgccgcatgttgctcctgtggggtgtctacccggtgcagggtcctaaatcccatgatacggacgaaatggttcaaaacgccgtagccagtgcgctaactacgggggtggtaaaagacggtgatttggtggttatcaccgccggtgtcccggtaggaacacccggtactaccaacctgatccgcgtgcatattgttggtaatattttgctgcgcggtcaaggcattgggcagcaagtagttaccggcaaggtgtgtgttgctttatcgattagcgatgtgaaaaagaaattccagcctggtgacatacttgtcgttaccagtattgatgaagaaacggcgccctatgctgccaaggcggcggcgattgtggccgaagaaggcggcttgacgtctcatgccgcagttgtcgggataagctatggtgtgcctgtcattgtcggtgttgatggtgctacaagtaaaatgacagacggtgccattgtgacggtcgatgccgcccgcgggctggtttaccagggagaaattcacgcccgataa

SEQ ID NO: 657 - protein, 584 aa, Thermosinus carboxydivorans Nor1
MFKKTKIVCTVGPSTDRPGVLEQMLVAGMNVARFNFSHGTHAEHAKRIEMVRAAAAKVNRPVALMLDTKGPEMRLGAFPAGKVKLTAGQRFILTSQDVPGTAERASVNHKLLPEEVRPGDTILIADGLISLHVDAVEGTEIITTVQNSGEIGSMKRVAAPGVNVHLPPLSEQDVRDILFGLEQKMDFIAASFVQRAADVLAIRKVVEEAGGQIDIIAKIENAEGVKNIDEILKVADGIMVARGDLGVEIPAEEVPLVQKTIIKKCNKAGKPVITATQMLESMIANPRPTRAEASDIANAILDGSDAIMLSGETASGQYPVEAVNTMAKIAARTEAALGYTDILMGKGLLPQRTTTDAISHATVQVAHELNAAAIITATESGYTARMVSKYRPQAAIIAVTPHARTVRRMLLLWGVYPVQGPKSHDTDEMVQNAVASALTTGVVKDGDLVVITAGVPVGTPGTTNLIRVHIVGNILLRGQGIGQQVVTGKVCVALSISDVKKKFQPGDILVVTSIDEETAPYAAKAAAIVAEEGGLTSHAAVVGISYGVPVIVGVDGATSKMTDGAIVTVDAARGLVYQGEIHAR

SEQ ID NO: 658 - DNA, 1413 bp, Vibrio cholerae 1587
  CDS (1)..(1413): transl_table=11
atgaaaaagaccaaaatcgtatgtacgattggcccaaaaactgagtctgtagagaaactgactgagcttgtaaacgctggcatgaatgttatgcgtctcaacttctctcacggtgactacgttgagcacggcactcgtatcactaacttccgtaaagtgatggaagtgaccggtaaacaactggcgatcctactggatactaaaggtccagagatccgtactatcaagctggaaaacggtgacgatgtggatctggtcgctggccaagagttcactttcacaactgacacgaaagttgttggtaacaaagagcgcgtagcagtcacttactctggttttgcaaaagacctgaacgtgggcaaccgtattctagttgacgacggtcttatcgagatggaagtactggcgacgactgacactgaagtgaagtgtaaagttctgaacaacggcgctctgggtgaaaacaaaggtgttaacctgccaggcgtttctgtcaatctgccagcgctgtctgaaaaagacaaaaacgacctgaaatttggttgtgagcaaggcgttgatttcgttgctgcctctttcatccgtaaaggttctgacgtgaaagaaatccgtgaagtattagcttctcacagcggtcaaaacattcaaatcatctctaaaatcgaaaaccaagaaggcttggacaacttcgatgagatccttgagctgtctgacggcatcatggttgcacgtggcgacctaggcgtagaaatcccagcagaagaagttatcttcgctcaaaagatgatgatcgagaaatgtaaccgtgcacgtaaagtggttatcacggcgacgcaaatgctggattcaatgatcaagaacccacgtccaactcgtgcagaagcgggcgacgttgcgaacgcgatcatggatggtactgatgcagtaatgctttctggcgaaacagcaaaaggtaagtacccagttgaagcggtgaagatcatggcgcaaatcgctgagcgtactgatccagtactgaaagcagaactgggctcacgcctagacagcccacgtctacgtatcactgaagccgtatgtaaaggtgcagtagacaccgctgagaaactggcagcgccactgatcatcgtagcaactgaagcgggtaaatctgctcgttcagttcgtaagtacttcccaacggctaacattattgcagtcaccaccaacaagaaaacagcagctcagttagtgctttctaaaggtgtaacgccagttgtggttgacgcgattgacaacactgacgctttctaccacctaggtaaagagattgcgctgcaatctggccttggcaagaaaggcgacatcgtagtgatggtttcaggcgcactggttgcttctggcacaacgaacactgcatcagtacacgtactgtaa

SEQ ID NO: 659 - protein, 470 aa, Vibrio cholerae 1587
MKKTKIVCTIGPKTESVEKLTELVNAGMNVMRLNFSHGDYVEHGTRITNFRKVMEVTGKQLAILLDTKGPEIRTIKLENGDDVDLVAGQEFTFTTDTKVVGNKERVAVTYSGFAKDLNVGNRILVDDGLIEMEVLATTDTEVKCKVLNNGALGENKGVNLPGVSVNLPALSEKDKNDLKFGCEQGVDFVAASFIRKGSDVKEIREVLASHSGQNIQIISKIENQEGLDNFDEILELSDGIMVARGDLGVEIPAEEVIFAQKMMIEKCNRARKVVITATQMLDSMIKNPRPTRAEAGDVANAIMDGTDAVMLSGETAKGKYPVEAVKIMAQIAERTDPVLKAELGSRLDSPRLRITEAVCKGAVDTAEKLAAPLIIVATEAGKSARSVRKYFPTANIIAVTTNKKTAAQLVLSKGVTPVVVDAIDNTDAFYHLGKEIALQSGLGKKGDIVVMVSGALVASGTTNTASVHVL

SEQ ID NO: 660 - DNA, 1647 bp, Oryza sativa subsp. japonica
  CDS (1)..(1647)
atggcaacctccgccgccgccgccgcgagcaccttgccttacctcgtctcctccgcctcctcctccgcggcggcgcgccgccgcggggcccaccggatccgggcgtcgtcggcggcggcggaggtggagggggcgatggacgtggtgtcggaggcggagctgcgggagaaggggttcatggggctccggaagacgaagctggtgtgcacggtggggcccgcgtgcgtgggggctttgccggcgctggcgcgcggcgggatgggcgtggcgcgggtcaacctgtgccacgggggccgcggctggcaccgcgccgtgatgcgcgaggtgcggaggctcaacgaggaggaaggcttctgcgtctccctcatggtcgacaccgaggggtcccagctcctcgtcgccgaccacggcggcgccgcctccgtcaaggccgaggatggctctgaatggctatttacaagtaaaagaaccgatgaatctcatccattcacaatgcatgttaactttgataagttttctgaagacattctagttggtgatgagcttgtaattgatggaggaatggcaacatttgaagttattgagaaggtcggaaatgatttgcgctgtaagtgcacagacccaggtttgcttcttcctcgagccaaactgtcattctggaggaatggaaaattagttgaaaggaactttgggcttcctacattgtcagcaaaggattgggctgacattgaatttgggatagctgaaggagttgattgcatcgctctttcatttgtaaaagatgctaatgacatcaagtatctcaagacttacctctccagaaaatcattagaacacatcaaaatattcgcgaaggttgagagtcttgaatcactcaagaaccttaaagacatcatagaggcatctgatggagttatggtagcacgtggtgatcttggagttcagattcctttagaacaaatcccagccatccaagaggcaattgttgatctttgtcgacggttgaacaagccagtgatagttgcctctcagcttcttgaatcaatggttgagtatccaacaccaactcgtgcagaggtagcagacgtttctgaagcagtacggcaatatgctgatgccgtaatgttatcggcagagtcagctataggtgcatatccccagaaagctctagcagtcctccgtgctgctagtgagaggatggaatcatggagccgtgaggaaaacatgcagaaacttcttccacaacatcagcttgcaatagctttgcctgataggatctcagagcaaatttgcaccagtgctgcagaaatggcaaacaaccttgcggtggatgccatctttgtttacacaaagtatggtcacatggcgtcgcttctttcgcgcaaccggcccaaccctcccatttttgctttcactgataatgccaactcaagaaagagcatgaacctctactggggagtaattccacttcagctaccactgtcaaataacatggaagataacttcaatcaaaccatcaagcttatgaagtcgaagggttcagtgaaatctggagacacagtcttggtcgtcgccgactctgatctgaaccgaccccgtgctgctacctcagttttccaatccattcaagttcgaatagtggactag

SEQ ID NO: 661 - protein, 548 aa, Oryza sativa subsp. japonica
MATSAAAAASTLPYLVSSASSSAAARRRGAHRIRASSAAAEVEGAMDVVSEAELREKGFMGLRKTKLVCTVGPACVGALPALARGGMGVARVNLCHGGRGWHRAVMREVRRLNEEEGFCVSLMVDTEGSQLLVADHGGAASVKAEDGSEWLFTSKRTDESHPFTMHVNFDKFSEDILVGDELVIDGGMATFEVIEKVGNDLRCKCTDPGLLLPRAKLSFWRNGKLVERNFGLPTLSAKDWADIEFGIAEGVDCIALSFVKDANDIKYLKTYLSRKSLEHIKIFAKVESLESLKNLKDIIEASDGVMVARGDLGVQIPLEQIPAIQEAIVDLCRRLNKPVIVASQLLESMVEYPTPTRAEVADVSEAVRQYADAVMLSAESAIGAYPQKALAVLRAASERMESWSREENMQKLLPQHQLAIALPDRISEQICTSAAEMANNLAVDAIFVYTKYGHMASLLSRNRPNPPIFAFTDNANSRKSMNLYWGVIPLQLPLSNNMEDNFNQTIKLMKSKGSVKSGDTVLVVADSDLNRPRAATSVFQSIQVRIVD

SEQ ID NO: 662 - DNA, 1584 bp, Oryza sativa subsp. japonica
  CDS (85)..(1584)
atgcattcgacgaatctgctgctggaggagcccatcaggatggcatccatcctggagccatccaagccgagctttttcccggcgatgaccaagatcgtggggacgctgggtcccaagtcgcgcgccgtcgacaccatctcctcctgcctcaaggccggcatgtcggttgccaggttcgatttctcgtggggagacgctgagtaccaccaggaaaccctcgaaaacctcaagctcgccatcaagtccaccaagaagctctgtgctgtcatgctcgacactgtcggcccggagttgcaggtggtgaacaagagtgaggctgcaatctcccttgaagcgaatggcactgttgttctcacccctgaccaggggcaggaggcctcctccgaattgctgcccatcaacttctccgggcttgctaaggctctgaaaccaggtgctacaatttttgtggggcaatacttgttcactggcagtgagactacttcagtttggttagaggtttctgaagttaaaggagatgatgtggtttgtgtgataaaaaattcggctactctggctggttcactgttcaccctgcattgttctcagattcatatcgacttacctacactgtctgatgaggacaaggaggttatcagaagatggggagctccaaacaagattgacttcctctctctgtcttatacaagacacgcggaagatgtgcgacaggcacgtgagttcctctcaaagttaggcgaccttagccaaactcagatttttgccaaaattgagaatgttgagggtttgaatcattttgatgaaatcctgcaagaggcggatggtatcattctgtcaagaggaaaccttggaattgatcttccacctgaaaaggtgtttttgtttcaaaagtctgctctgcacaagtgcaacatggctggaaagcctgctgttgttactcgtgttgtggacagtatgactgacaacctcaggcctactcgtgcggaggctactgatgtggcaaatgctgtacttgacgggagtgatgccattctccttggtgctgagactctccgtggtctgtacccagttgagactatctcaattgtgggcaaaatttgcgctgaggcagagaaggtattcaaccaagatttatacttcaagcggactgtgaaatatgttggggagcccatgacccacttggagtctatcgcttcttctgcggtgcgagctgctatcaaagtgaaggcttctgtcattatttgcttcacatcatctggacgcgctgcaagactaattgccaagtacaggcccaccatgcctgttctatctgttgtcattcctcgtctgaaaacaaaccaactgaggtggagtttcactggcgcatttgaagcaagacaatcactcatagttagaggtctctttccgatgcttgctgatcctcgccatccagctgaatcgaccagcgctaccaatgagtcagttttgaaggttgctcttgaccatggcaaagcttccggtgtgatcaagtcgcatgatcgcgttgttgtctgccagaaagtgggtgattcctcggttgtgaagatcattgagctggacgattag

SEQ ID NO: 663 - protein, 499 aa, Oryza sativa subsp. japonica
MTKIVGTLGPKSRAVDTISSCLKAGMSVARFDFSWGDAEYHQETLENLKLAIKSTKKLCAVMLDTVGPELQVVNKSEAAISLEANGTVVLTPDQGQEASSELLPINFSGLAKALKPGATIFVGQYLFTGSETTSVWLEVSEVKGDDVVCVIKNSATLAGSLFTLHCSQIHIDLPTLSDEDKEVIRRWGAPNKIDFLSLSYTRHAEDVRQAREFLSKLGDLSQTQIFAKIENVEGLNHFDEILQEADGIILSRGNLGIDLPPEKVFLFQKSALHKCNMAGKPAVVTRVVDSMTDNLRPTRAEATDVANAVLDGSDAILLGAETLRGLYPVETISIVGKICAEAEKVFNQDLYFKRTVKYVGEPMTHLESIASSAVRAAIKVKASVIICFTSSGRAARLIAKYRPTMPVLSVVIPRLKTNQLRWSFTGAFEARQSLIVRGLFPMLADPRHPAESTSATNESVLKVALDHGKASGVIKSHDRVVVCQKVGDSSVVKIIELDD

SEQ ID NO: 664 - DNA, 1584 bp, Oryza sativa subsp. japonica
  CDS (85)..(1584)
atgcattcgacgaatctgctgctggaggagcccatcaggatggcatccatcctggagccatccaagcccagcttcttcccggcgatgaccaagatcgtggggacgctggggccaaagtcgcgctccgtcgacaccatctcctcctgcctcaaggccggcatgtcggtggcccgatttgatttctcgtggggagacgccgagtaccaccaggaaacccttgagaacctcaaggtcgccatcaagtccaccaagaagctctgcgcggtcatgcttgacacggtcggcccagagttgcaggtggtgaacaagagcgaagcctccatctccctcgaggagaacggcactgttattctcacccctgaccaggggcaggaggcctcctcacaagtgctgccaattaacttcgctgggcttgctaaggctgtgaagccaggtgacacaatatttgttgggcaatacttgttcacaggcagtgagactacttcagtttggttagaggtttctcaaattaaaggagatgatgtggtctgtgtgataaaaaacacagcaactctggctgggtcgctcttcacattgcattgctcgcagattcacatcgacttacctaccctatctgatgaggacaaggaggttatcagaaaatggggtgccccaaacaagattgacttcctctctctttcttatacaagacatgtagaagatgtgcgacaggcacgtgaattcctctcaaagttaggtgaccttagccagacccagatttttgcaaaaatcgagaatgtggaggggttgaataattttgatgaaatcctccaagaagctgatggtatcatcctgtcaagaggaaaccttggaattgatcttccacctgaaaaggtgtttttatttcaaaagtctgctctgcacaagtgcaacatggctggaaagcctgctgttgttactcgtgttgtagacagtatgactgacaacctcaggcctactcgtgcagaggctacggatgtggcaaatgcagtgcttgacgggagtgatgccattctccttggtgctgagactctgcgtggtttatacccagttgagactatttcaatagtgggtaaaatttgtgctgaggctgagaaggtcttcaaccaagatttatacttcaagagaactgtgaaacatgtgggggagcccatgacccacttggagtctattgcttcctctgcggtgcgagctgctattaaagtgaaggcgtctgtcataatttgcttcacatcatctggacgtgctgcaaggctaattgccaagtataggccaaccatgcctgttctatctgttgtcattcctcgtctaaaaacaaatcaactgaggtggagtttcactggcgcatttgaagcaagacaatcgctcatagttagaggcctctttccgatgcttgctgatccgaggcatccagctgaatcaaccaacgctacaaatgaatccgttttgaaggttgctcttgaccacggtaaagtttctggtgtgataaagtcgcatgatcgcgttgttgtctgccagaaggtgggagattcctcggttgtgaagatcattgagctggacgattag

SEQ ID NO: 665 - protein, 499 aa, Oryza sativa subsp. japonica
MTKIVGTLGPKSRSVDTISSCLKAGMSVARFDFSWGDAEYHQETLENLKVAIKSTKKLCAVMLDTVGPELQVVNKSEASISLEENGTVILTPDQGQEASSQVLPINFAGLAKAVKPGDTIFVGQYLFTGSETTSVWLEVSQIKGDDVVCVIKNTATLAGSLFTLHCSQIHIDLPTLSDEDKEVIRKWGAPNKIDFLSLSYTRHVEDVRQAREFLSKLGDLSQTQIFAKIENVEGLNNFDEILQEADGIILSRGNLGIDLPPEKVFLFQKSALHKCNMAGKPAVVTRVVDSMTDNLRPTRAEATDVANAVLDGSDAILLGAETLRGLYPVETISIVGKICAEAEKVFNQDLYFKRTVKHVGEPMTHLESIASSAVRAAIKVKASVIICFTSSGRAARLIAKYRPTMPVLSVVIPRLKTNQLRWSFTGAFEARQSLIVRGLFPMLADPRHPAESTNATNESVLKVALDHGKVSGVIKSHDRVVVCQKVGDSSVVKIIELDD

SEQ ID NO: 666 - DNA, 1431 bp, Algoriphagus sp. PR1
  CDS (1)..(1431): transl_table=11
atgagctatacgcaatttaacaagacaaaaatcctagcaacaatcggccctgcttccaataattatgaaactatttcaagtctggcagctgctggagccaatgtgtttcgattgaatttttctcatggaagccatgatatccaccaagaagtaatcgaaatcattcgaaaaataaataaagagcaaaatttgaatttgggtatccttcaggatttgcaaggtcccaaaatcagagtgggtgaggtagaaaataacggggtagaaattaaacctggtgagaaaatcaccattaccaatgaccctgtggtgggtacaagcactcttgttagtaccgtttatcaaaatcttccgcaagatgtggtttctggagatagaatcttgattgatgatggaaatctggaggttgtagtgaatgatacagatggaaaaaatgttaattgtactgtcatccacggagggattttgaaatccagaaaaggaatcaatctaccaaataccaaagtcagtgctccttcattaacagaaaaagatattgaagatttagcttttggtttatctaaagaagtggattggattgcactttcttttgtgaggtcagccgaagatatcgaggatctgagagaaagaattgaagccaaaggaaagcattgtaaaatcgtagcgaagatcgaaaagcctgaggctttggagaatatcgatggaatcatcgaagctacagatgcgatcatggtggcaagaggagaccttggagtagaagttccaatggagatcgtaccactttggcagaagagaattgttgaaaagtgtaagcttgcttgtaagccggtaattattgctacccaaatgatggaaagcatgattgtcaacccaagacctactagagctgaaaccaatgatgttgcaaatgctgtccttgacggagcagatgccgtgatgctttctgcagaaactgcttctggtaaataccctgtcaatgcggtgaaggccatgagtagcattatcggttacttagaggcgaatgcggagatctatcataacttgtataagattccagaagatgacgataccttcttaagtaataacttgattttgatggcttccagactttccaggaatgtgaaagcaaaagcgattgtaggtattacttcttcagggtttactggtttcagaattgcttctcatagaccacttgcgaatatttttgtcttcacaagtaataaaacattgattacccaaatgtcattggtttggggaattagagcttatttctatgataaattagtttctactgatgctacatttgtggatatcgaaaatattctgaaagatgatgatcacgttaactcagaagatatcattatcaatacagcaagtatgcctctgaaaggaaaaggaagaacgaatatgttgaaaattcatgtggtaagttaa

SEQ ID NO: 667 - protein, 476 aa, Algoriphagus sp. PR1
MSYTQFNKTKILATIGPASNNYETISSLAAAGANVFRLNFSHGSHDIHQEVIEIIRKINKEQNLNLGILQDLQGPKIRVGEVENNGVEIKPGEKITITNDPVVGTSTLVSTVYQNLPQDVVSGDRILIDDGNLEVVVNDTDGKNVNCTVIHGGILKSRKGINLPNTKVSAPSLTEKDIEDLAFGLSKEVDWIALSFVRSAEDIEDLRERIEAKGKHCKIVAKIEKPEALENIDGIIEATDAIMVARGDLGVEVPMEIVPLWQKRIVEKCKLACKPVIIATQMMESMIVNPRPTRAETNDVANAVLDGADAVMLSAETASGKYPVNAVKAMSSIIGYLEANAEIYHNLYKIPEDDDTFLSNNLILMASRLSRNVKAKAIVGITSSGFTGFRIASHRPLANIFVFTSNKTLITQMSLVWGIRAYFYDKLVSTDATFVDIENILKDDDHVNSEDIIINTASMPLKGKGRTNMLKIHVVS

SEQ ID NO: 668 - DNA, 1761 bp, Bacillus sp. B14905
  CDS (1)..(1761): transl_table=11
atgagaaaaacaaaaatcgtatgtacaattggacctgcaagtgagtcaccagaaacattagaaaaattaattgaagcaggtatgaatgtagcccgcttgaatttttcacatggctctcatgaagagcatgcgggacgaattcatttaattcgtgaagtggcacaaaagttaaataaaccagtaggaattttattagacacaaaaggtcctgaaattcgtacgcataacatgaaaaatggtgagcttcatttatcagctggccaagtgattgatatttcaatgactgaagtagaaggtacggagacaagcttttctgttacttatgagcaactagtagaagatgttgagcaaaactcaattattttacttgatgatggtctgatccaattacgtgtattagctacagatgttgaaaaaggtttaattcatacgattgtagaaaatgcgggcgtattgaaaaataaaaaaggtgtcaacgtaccaggtgtttctgtacaacttccaggtattactgaaaaggatgctcaggatattttatttggtattgaacaaggtgttgatttcattgctgcctcattcgttcgtcgtgcaaaagatgtgcttgaaattcgtgagttacttgagcaaaatggcggtgggcatatccaaatcatcccgaaaattgaaaaccaagagggtgtcgataatatcgatgagattatccttgtatccgatggattgatggtagcacgtggagatctaggtgttgaaattccagcagaagaagtacctcttgtacaaaagaagttaattctaaaatgtaatcaagtagggaaaccagttattacggctactcaaatgttggattctatgcaacgtaacccacgtccaacacgtgcagaagcaagtgatgtagcgaacgccatcattgatggtacagatgcaatcatgttatcaggagaaactgctgcgggtctatatccagtggagtcagtacaaacaatgaataaaattgctcaacgtactgaaaattcattagattataaatcgattgtttctacacgtagtcgtgaaaaagaagccaatatgacagaagctatttcacaagcagtcgcttatacatccattaatttaggtgtcaaagccgtattagcaccaacagaaagtggaaatacagctagaatgattgccaaataccgacctggtgtacctattgttgcagtaacaggctcaacaaatacggctcaaacattaacattagtgtggggtgtacacccaattgtttgccaacgtgtgacaactacagatgagattttagaattagctgtagatgaaagcttgaaacacggttttgtcacacatggtgatgctgttgtaattacagcaggtgtgccagttggtgaagcgggtactacaaacctaatgaaagtacacattattggcgatttactagctcgtgggcaagggattggcaaggcatcggttgtaggtaaaacggttattgctaaaaatgcggctgaggcacttgcttatgatacggaaggaagtatacttgtaacagttggttcagaccgtgaaatgatgccagcaatagaaaattgcattgggctaattactgaagaaggtggactaactagtcatgctgcagtagttggactaagtcttggtattccagtaattgttggcgtaaaagaagcaacaacattattacgccatggtcaagaaattacgatggacgctgaaacaggcgttatctataaaggacatgctagcgttctttaa

SEQ ID NO: 669 - protein, 586 aa, Bacillus sp. B14905
MRKTKIVCTIGPASESPETLEKLIEAGMNVARLNFSHGSHEEHAGRIHLIREVAQKLNKPVGILLDTKGPEIRTHNMKNGELHLSAGQVIDISMTEVEGTETSFSVTYEQLVEDVEQNSIILLDDGLIQLRVLATDVEKGLIHTIVENAGVLKNKKGVNVPGVSVQLPGITEKDAQDILFGIEQGVDFIAASFVRRAKDVLEIRELLEQNGGGHIQIIPKIENQEGVDNIDEIILVSDGLMVARGDLGVEIPAEEVPLVQKKLILKCNQVGKPVITATQMLDSMQRNPRPTRAEASDVANAIIDGTDAIMLSGETAAGLYPVESVQTMNKIAQRTENSLDYKSIVSTRSREKEANMTEAISQAVAYTSINLGVKAVLAPTESGNTARMIAKYRPGVPIVAVTGSTNTAQTLTLVWGVHPIVCQRVTTTDEILELAVDESLKHGFVTHGDAVVITAGVPVGEAGTTNLMKVHIIGDLLARGQGIGKASVVGKTVIAKNAAEALAYDTEGSILVTVGSDREMMPAIENCIGLITEEGGLTSHAAVVGLSLGIPVIVGVKEATTLLRHGQEITMDAETGVIYKGHASVL

SEQ ID NO: 670 - DNA, 1488 bp, Erythrobacter sp. NAP1
  CDS (1)..(1488): transl_table=11
atgtcaaaacgcgataacactcggatcgacccgcgcggtcgcaaggtcaagattctggcgacgatcggcccggccagccgctcacccgaaatgctgcgcaagctgttcaaggccggcgccgacgcgttccgagtgaacatgagccacggcgagcatgccgatcatgcaaaggccattgcctctattcgcgcgctggaaaaggaattcgctcgccccatcgcgatcctcgccgacctccaagggcccaaactgcgcgtcgggccgttcaaggatggtcaggcagtgctgcgccattcagggcacttcacgctcgaccgcgacgatacgccgggcgacgagacccgtgtctgcctgccccatgccgagctgttcggcatccttgagcgtgggcagcgtctgctcatcaatgacggcaagatccgtctcttggtgaaggaagcagacgaggacaagatcttctgcaccgccgaggttggcggggtgatttcggaccgcaaaggcgtgaatgtacccgatgccgaggttccgatcccggcgctgacggacaaggacaagaaagacctcgccttcgcggtcgaacagggtgtcgactggattgctctgagcttcgtccagcgccccgccgacctcgctgaagcacgcaaactgatcgcgtcgcacgcagccggaggccattgccctgccctgtgcgcaaagatcgaaaagccgcaggcggtcggacggctcgaagagatcatcgaattgtccgatgcgatcatggtcgcgcgcggcgaccttggcgtcgaacttgagccgcacgaagtcccgccgctgcaaaagcgcatcgtcgctgcgagccgtagtgcaggcaaaccggtgatcgtggcgacgcagatgctcgaaagcatgatcgaaagcccgatgccgacccgcgccgaagtctcagacgtagccaacgcggtctatgacggcgcggacgccgtgatgctgagcgcggaaagcgcagccggagactggcccgaggaatcggtcactatgatgcacaagatcgcagctcaggtggagcgcgacgagggctatcgcgagcgcatccgcatgctcgacacgccgcccgatgcaacgacttcggacgcgctggcgcattcgtgcatgactatcgccgacaccgtcccgatcagcgcgatcacagtcttcacctcttcaggttccactgcacgccgcgtcgcacgcgagcggcccggcacgccgatgctggtcctcaccccgagtatgcgcacagcccgccgggtggcgctcctgtggggcgcacatgcggtggtcacccgcgatatcggcagctttgaagagatgattgccaagggcaagcgcatggcgctgcgtcacgggtttgggaccgctggatcaaagcaggtggtgcttgcaggcgtccccttcggcacgccgggggcgaccaacctgcttcacgtcgtcacgcttgccggtgacgaactcgagaagcaccggaagtaa

SEQ ID NO: 671 - protein, 495 aa, Erythrobacter sp. NAP1
MSKRDNTRIDPRGRKVKILATIGPASRSPEMLRKLFKAGADAFRVNMSHGEHADHAKAIASIRALEKEFARPIAILADLQGPKLRVGPFKDGQAVLRHSGHFTLDRDDTPGDETRVCLPHAELFGILERGQRLLINDGKIRLLVKEADEDKIFCTAEVGGVISDRKGVNVPDAEVPIPALTDKDKKDLAFAVEQGVDWIALSFVQRPADLAEARKLIASHAAGGHCPALCAKIEKPQAVGRLEEIIELSDAIMVARGDLGVELEPHEVPPLQKRIVAASRSAGKPVIVATQMLESMIESPMPTRAEVSDVANAVYDGADAVMLSAESAAGDWPEESVTMMHKIAAQVERDEGYRERIRMLDTPPDATTSDALAHSCMTIADTVPISAITVFTSSGSTARRVARERPGTPMLVLTPSMRTARRVALLWGAHAVVTRDIGSFEEMIAKGKRMALRHGFGTAGSKQVVLAGVPFGTPGATNLLHVVTLAGDELEKHRK

SEQ ID NO: 672 - DNA, 1437 bp, Leeuwenhoekiella blandensis MED217
  CDS (1)..(1437): transl_table=11
atgtcaaacactaagaaaactaaaattgttgctacacttggacctgcgaccagtaagaaggaagtccttcacaatatgatcaaagcaggcgtagatgtatttcgaatcaatttttcgcacgcagattatgacgcagttaaagagcgtatagatatgatacgcagcctcagcgaagagtttggatacaacaccgcaattttagcagatttacaaggtcctaaactgcgagtagggattatgaaggatgaggttgtagttaatccgggagataagattgttttttctacaaaagaggaatttgaaggcaccaaggagcgtgtttatatgaactacgagcattttcctcgcgacgttaataaaggagagcgcattcttcttgatgatggtaaattgatttttgaggttttaaaaaccgataatgagaacgaagttgaaactgttgtaattcaaggaggaccgttaaagtctagaaaaggtgtaaaccttcctaataccaatatttcgcttcctgcacttactgaaaaagatatcgaagatgcaatttttgcaatcaagcaaaatgtagactggatcgcactttcatttgttcgtcacgaaggtgatttgattcaacttcaggatttaatcaaagagcattcagcgcataaaattccgatcatttctaagatcgaaaagcctgaagctgtacaaaatatcgataagatcgttgcctatagtgatgggttaatggttgcccgtggagaccttggagtagaagttcctgcagaagaggttccacttattcaaaagcaattggttctttctgcaaaaaaagcacgcatccctgtaatcattgcaactcaaatgatggaaacgatgatcgatagcttaacgccaacacgtgcagaggtgaatgacgtggcaaactctgtaatggacggtgcagatgcggttatgcttagtggcgagacttcagtaggtaaatatcctgtgcaggtgattgagcgtatggcctctatcttggctaaggtagaagattctccattgatcaaagtgcctcaaacaccacctcacattcgtacaaagcgctatatcacaaagtctatttgttatcacgcggcgcttatggcaaatgatatcgatgcaaaagcgatcaccacacttacaaatagtggttatacagcatttcaaatttcagcttggagacctaatgcgcatatcttagtctttacttcaaaccgaaatatcttaagtcagcttaatttactttggggtgttaaagcattctattacgacaagtttgtttctacagatgaaaccgtgcgtgacgtaaatcgtatcgctcgtgatagcggatacctaaatattggtgatatggtaattagccttgcggcgatgccaatcagcgagaaaggaatggtaaacacattaagagtacgcgagatacaaggaaattaa

SEQ ID NO: 673 - protein, 478 aa, Leeuwenhoekiella blandensis MED217
MSNTKKTKIVATLGPATSKKEVLHNMIKAGVDVFRINFSHADYDAVKERIDMIRSLSEEFGYNTAILADLQGPKLRVGIMKDEVVVNPGDKIVFSTKEEFEGTKERVYMNYEHFPRDVNKGERILLDDGKLIFEVLKTDNENEVETVVIQGGPLKSRKGVNLPNTNISLPALTEKDIEDAIFAIKQNVDWIALSFVRHEGDLIQLQDLIKEHSAHKIPIISKIEKPEAVQNIDKIVAYSDGLMVARGDLGVEVPAEEVPLIQKQLVLSAKKARIPVIIATQMMETMIDSLTPTRAEVNDVANSVMDGADAVMLSGETSVGKYPVQVIERMASILAKVEDSPLIKVPQTPPHIRTKRYITKSICYHAALMANDIDAKAITTLTNSGYTAFQISAWRPNAHILVFTSNRNILSQLNLLWGVKAFYYDKFVSTDETVRDVNRIARDSGYLNIGDMVISLAAMPISEKGMVNTLRVREIQGN

SEQ ID NO: 674 - DNA, 1788 bp, Synechococcus sp. WH 5701
  CDS (1)..(1788): transl_table=11
atggcgcagcccgatctgtcgcgtcgcaccaaaatcgtggcaacgatcggtccagccacggagtccccccagcgactgcgggacctgatccaggcaggggctaccacgttccgtctcaatttttcccacggggaccactccgaacatgccgcccggatcgccacgatccgtcaggtggcccacgagctggggatccatgtgggcatccttcaggatctccagggtccgaagatccgtctcggccgcttcgagggcggtccgatcaccctcgccaacggcgacccctttgccctcacctcccggccggtgagctgcaaccagtcgatcgccacgatcacctacgaccgtctggccgatgaggtgaccgccggcagccgcattcttctcgacgacggccgggtcgagatggtggtcaagtcggtggacatccccgagcagaccctgcactgcaccgtggtcgtgggtggggtgctctccaacaacaagggggtgaacttccccgacgtgcagctctcgatccgtgcgctcaccaccaaggaccgcgaggacctcagcttcggcctccagcaggaggtcgactgggtggccctgagctttgtgcgcaacccctccgacatgcaggagatccgcgagctgatcagcagccaggggtacagcaccccggtgatcgccaagatcgagaagttcgaggcaatcgatcagatcgacgccatccttcccctctgcgatggcgtgatggtggcccggggcgacctgggggtggagatgccggccgaggaggtaccgctgctgcagaaggagctgatccgcaaggccaacaccctgggcatcccgatcatcacggccacccagatgctcgacagcatggccagctgcccgcgccccacccgggccgaggtgagcgatgtggccaacgccatcctcgatggcaccgacgcggtgatgctctccaacgaaaccgccgtgggtgactacccggtggaggcggtcgaaacgatggctcgcatcgcccgccgcatcgagcgcgactacccccgccgggtcgtggacagccacatggcctccaccatccccaacgccatcagccaggcggtcagcacgattgcccgtcagcttcaggctgcggcgatccttcccctcaccaagagcggggccacggcgcgcaacgtcagcaagttccgcccctccaccacgatcctggccatcaccagcgaggtgaaggtggcccgccagttgcagctggtctggggggtgaaccccctgctgatcggccatcaggcctccaccaccagcaccttcaccctggccatgggcgtggcccaggagaggggactgctcaaggagggcgatctggtcgttcagaccgccgggaccctctcgggagtgagcggctccaccgatctggtcaaggtgggcattgtctccgccgtgctgggccggggcctgggcatcggcaacggctcggtcagcggccgggtgcgggtggccaccaccgccgaggaggcggcgcggctggagagcggcgagatcctggtggtgcgcgataccaatgccggttacctcgatgccatccgcaaggcccgaggggtgatcgccgaggagcacggctgcgacagccatgccgccgtgattgcccagcggctgggggtgccggtgatcgtgggggtggccaacgccacttcggatctgcgcctgggtgaattcgtgaccctggaggtgcgtgagggggtggtgcaccgcggcgcccgcaaccacacccaggccgatcgcagcgaaaccatcctctga

SEQ ID NO: 675 - protein, 595 aa, Synechococcus sp. WH 5701
MAQPDLSRRTKIVATIGPATESPQRLRDLIQAGATTFRLNFSHGDHSEHAARIATIRQVAHELGIHVGILQDLQGPKIRLGRFEGGPITLANGDPFALTSRPVSCNQSIATITYDRLADEVTAGSRILLDDGRVEMVVKSVDIPEQTLHCTVVVGGVLSNNKGVNFPDVQLSIRALTTKDREDLSFGLQQEVDWVALSFVRNPSDMQEIRELISSQGYSTPVIAKIEKFEAIDQIDAILPLCDGVMVARGDLGVEMPAEEVPLLQKELIRKANTLGIPIITATQMLDSMASCPRPTRAEVSDVANAILDGTDAVMLSNETAVGDYPVEAVETMARIARRIERDYPRRVVDSHMASTIPNAISQAVSTIARQLQAAAILPLTKSGATARNVSKFRPSTTILAITSEVKVARQLQLVWGVNPLLIGHQASTTSTFTLAMGVAQERGLLKEGDLVVQTAGTLSGVSGSTDLVKVGIVSAVLGRGLGIGNGSVSGRVRVATTAEEAARLESGEILVVRDTNAGYLDAIRKARGVIAEEHGCDSHAAVIAQRLGVPVIVGVANATSDLRLGEFVTLEVREGVVHRGARNHTQADRSETIL

SEQ ID NO: 676 - DNA, 1767 bp, Synechococcus sp. RS9917
  CDS (1)..(1767): transl_table=11
atggccctcatcgatctgacacgccgtaccaagatcgtggccaccatcggccccgccaccgaaagccccgagcggatccgcgagctgatccaggctggagccaccacctttcgactgaatttttcccacggcgatcacagcgagcacgccacccgcatcgccaccattcgtcaggtcgccagcgaactgagccagcacatcggcatccttcaggatttacaagggccgaaaattcgtctggggcgcttcgcccttggccccatcaccctggccaagggtgatgccttcgcgctcacatcacgatccgtaagctgcgatcagcagatcgccacggtgacctacgacaagctggccgcagaagtgagtgccggcagccggattcttctcgacgacggtcgggtggagatgaaggtggagcgcgtcgatcaggccgagcagaccctgcactgcaccgtgaccgttggcggcgtgctctccaacaacaagggggtcaatttccccgatgttcagctctcggtgcgggctctcaccgaaaaagatcggatcgatctcgccttcggtctgcagcaaggggtcgactgggtggcgctcagcttcgttcgcaatccctccgacatgcaggagattcgcgaactgatccgccagcacggcttctccactccagtggtggccaagatcgaaaaatttgaggcgattgatcagattgatgcgatcctgccgctctgcgacggcgtgatggtggcccggggggatctgggcgtggaaatgcccgctgaggaggtgccgctcctgcagaaggaactgattcagaaagccaacagcctcggcatcccgatcatcaccgccacccagatgctcgattcgatggcctccagtccgaggcccacccgcgccgaagtaagcgacgtggccaacgccattctcgatggcaccgatgcggtgatgctctccaacgaaaccgcagtgggggattacccgattgaagcggtggaaacgatggcgacgatcgcccggcgcatcgagcgggattatccgcagcgcagcatcgacagccatctgccgagcacgatccccaatgcgatcagcagcgcggtgagcaccatcgccagccagttgaatgcggcggcgattctgccgctcaccaaaagtggtgccacggcccacaacgtgagcaaattccgccctgccgcaccgatcctggcgatcaccagtgaagtggccgtggcccgaaaactgcagttggtgtggggcgtgaccccgctggtgatcgcccagcagagcaccacctcaggcacattcaccaccgccatggccgccgcccaggacaaaggcctgctgaaggaaggggacctggtgattcaaaccgccggtaccctggcaggcgtcgccggctccactgacctggtcaaggtgggcatcgtcagtgccgtgctcggccagggcacgggggtgggtcagggcacggtgagcggccgggtccgcctcgcccagtgcccgggcgatgcctgcaagatcgaacggggggagatcctcgtggtgcatgacaccactgccgatgatgtcgacgcgatccgcgacgcagccgccgtgattaccgaagtgccggctgcaacctcccatgcggccctgatcgcccagcgactcggcacccccctgattgccggcgtggcccatgccacccgtcacctgctggaaggggaagtggtgaccctgcagatcaaggacgggcttgtgcatcgcggcaccagcatcaacacagccctctga

SEQ ID NO: 677 - protein, 588 aa, Synechococcus sp. RS9917
MALIDLTRRTKIVATIGPATESPERIRELIQAGATTFRLNFSHGDHSEHATRIATIRQVASELSQHIGILQDLQGPKIRLGRFALGPITLAKGDAFALTSRSVSCDQQIATVTYDKLAAEVSAGSRILLDDGRVEMKVERVDQAEQTLHCTVTVGGVLSNNKGVNFPDVQLSVRALTEKDRIDLAFGLQQGVDWVALSFVRNPSDMQEIRELIRQHGFSTPVVAKIEKFEAIDQIDAILPLCDGVMVARGDLGVEMPAEEVPLLQKELIQKANSLGIPIITATQMLDSMASSPRPTRAEVSDVANAILDGTDAVMLSNETAVGDYPIEAVETMATIARRIERDYPQRSIDSHLPSTIPNAISSAVSTIASQLNAAAILPLTKSGATAHNVSKFRPAAPILAITSEVAVARKLQLVWGVTPLVIAQQSTTSGTFTTAMAAAQDKGLLKEGDLVIQTAGTLAGVAGSTDLVKVGIVSAVLGQGTGVGQGTVSGRVRLAQCPGDACKIERGEILVVHDTTADDVDAIRDAAAVITEVPAATSHAALIAQRLGTPLIAGVAHATRHLLEGEVVTLQIKDGLVHRGTSINTAL

SEQ ID NO: 678 - DNA, 1461 bp, Collinsella aerofaciens ATCC 25986
  CDS (1)..(1461): transl_table=11
atgtacaagcgcaccaagattgtatgcaccatgggtcccgcctgcgatagcgacgagaccatccgcgagatgatcaaggcgggcatgaacgtcgcccgttttaacttctcgcacggatcctacgacgagcaccacggtcgcatcgagcgcgtccgtcgtatttccaaggagctcggtctgcccgtcggcatcctgctcgacaccaagggccccgaggtccgcaccggccttctggtcgacggcaagaaggtcgccgtcaagaccggcgacaagatcgtcgtcaccgctcagcccacgtccgaggatttccacggcaccgctgagcacatctccctcgactacctggctctgccctccgaggtcgagaagggctccctcatcctgatcgatgacggcctggttgccctcgaggtcgagtccgtcgacggccaggacatgacctgcgtcgttaagaacgacggcctgatcggcgagcgcaagggcgtcaacatgcccaacgtcaacatctcgctgcccgccatcaccgagcgcgatcgtcaggacatcctctttggcctgaccgagaacatcgactacatcgccgcttccttcatccgtgacggcgagtccgtccgcggcatccgcgagctttgccgcgagaacggcggcgagcacgtgacgatcttcccgaagatcgagtgcgccctgggcgtcgagaacttcgacgagatcctcgaggcttccgacggcatcatggtcgcccgtggcgacctgggcatcgagatcaagcccgagctcgttccgcacatccagaaggagatcatcgctaagtgcaacgcggcctacaagcccgttatcaccgctacgcagatgctcgactccatgcagcagaacccgcgcccgacgcgcgccgaggttgccgacgttgctaacgccatttacgacggcaccgacgccgttatgctctccggcgagtccgctgccggtaagtacccggtcgaggccgtcaagatgcaggccagcattgctctcgagactgagaagtacctcccggctcacgctccgctcgaggttccggctgacgctcacggcacccgcgtcgtcaacaacgttgtgggtatgtccgctgtgaacatggctaccaccgttggcgccaagtgcatcaccgtgccgacgaccaccggtcgtaccgctcgcctgatctcgcacttccgtcccaacatgccgatctgcgcgttctcccgccacgagtgggccgtccagcagatgattatgtactggggcgttatcccgcaccaggccgagattacccagggcaccgtcaacggcacgatcgtcaaggcgatcgagaccgctaaggagctcggctacgtcaaggccggcgatctgaccgtcgctaccgctggcgatccccgcatgagcgtccagctcgaggataaggtctcctcgaccaacgtcgcttacgtcgctcaggtgcgctaa

SEQ ID NO: 679 - protein, 486 aa, Collinsella aerofaciens ATCC 25986
MYKRTKIVCTMGPACDSDETIREMIKAGMNVARFNFSHGSYDEHHGRIERVRRISKELGLPVGILLDTKGPEVRTGLLVDGKKVAVKTGDKIVVTAQPTSEDFHGTAEHISLDYLALPSEVEKGSLILIDDGLVALEVESVDGQDMTCVVKNDGLIGERKGVNMPNVNISLPAITERDRQDILFGLTENIDYIAASFIRDGESVRGIRELCRENGGEHVTIFPKIECALGVENFDEILEASDGIMVARGDLGIEIKPELVPHIQKEIIAKCNAAYKPVITATQMLDSMQQNPRPTRAEVADVANAIYDGTDAVMLSGESAAGKYPVEAVKMQASIALETEKYLPAHAPLEVPADAHGTRVVNNVVGMSAVNMATTVGAKCITVPTTTGRTARLISHFRPNMPICAFSRHEWAVQQMIMYWGVIPHQAEITQGTVNGTIVKAIETAKELGYVKAGDLTVATAGDPRMSVQLEDKVSSTNVAYVAQVR

SEQ ID NO: 680 - DNA, 1503 bp, Streptococcus equinus
  CDS (1)..(1503): transl_table=11
atgaataaacgcgtaaaaatcgttgcaacacttggtcctgcggttgaaatccgtggcggtaaaaaattcggtgaagatggatattggggtgaaagccttgatgttgaagcatcagcacaaaaaatcgctcaattgattaaagaaggtgcaaacgtcttccgtttcaacttctcacacggtgaccacgcagaacaaggtgaacgtatggcaactgtacgtcgtgccgaagaaattgctggacaaaaagttggtttccttcttgacactaaaggtcctgaaatccgtactgaactttttgaaggcgaagctaaagaatattcatacaaaactggtgaacaaatccgtgttgctactaaacaaggtatcaaatcaactcgcgaagttatcgctttgaacgttgctggtgcccttgacatctacgatgacgttgaagttggtaaacaagttcttgttgacgatggtaaacttggtcttcgtgttgtcgctaaagacgatgcaactcgtgaatttgttgttgaagttgaaaacgatggtattatcgctaaacaaaaaggtgtaaacattccttacactaaaatcccattcccagctcttgctgaacgtgataacgctgatatccgttttggtcttgaacaaggtcttaacttcatcgctatctcattcgtacgtactgcaaaagacgttgaagaagttcgtgcaatctgtgaagaaactggtaacggacacgttcgtttgtttgctaaaatcgaaaaccaacaaggtatcgaaaacatcgacgaaatcatcgaagctgctgatggtatcatgatcgctcgtggtgacatgggtatcgaagttccatttgaaatggttccagtttaccaaaaaatgatcatcactaaagttaacgcagctggtaaagcagttatcacagcaacaaacatgcttgaatctatgactgaaaaaccacgtgcaactcgttcagaagtatctgacgtgttcaacgctgttattgatggtactgacgcaacaatgctttcaggtgaatctgcaaatggtaaatacccagttgaagcagttcgtgcaatggctacaatcgataaaaacgctcaaactcttcttaacgaatacggacgtcttgattcatcatcattcgctcgtacttctaaaacagaagttgttgcttctgcagttaaagatgcaacaagctcaatggatatcaaacttgtagttgctcttactgaatctggtaacactgctcgtcttatctctaaataccgtccagatgctgacatcttggctgtaacattcgacgaaaaaactcaaaaatcattgatgattaactggggtgttattccagtcgtaactgaaaaacctgcatcaactgatgacatgtttgaagttgctgaaaaagctgctcttgaatcaggtttggttcaatcaggtgataacatcgttatcgtcgctggtgttcctgttggttcaggtggtacaaacacaatgcgtatccgcactgtaaaataa

SEQ ID NO: 681 - protein, 500 aa, Streptococcus equinus
MNKRVKIVATLGPAVEIRGGKKFGEDGYWGESLDVEASAQKIAQLIKEGANVFRFNFSHGDHAEQGERMATVRRAEEIAGQKVGFLLDTKGPEIRTELFEGEAKEYSYKTGEQIRVATKQGIKSTREVIALNVAGALDIYDDVEVGKQVLVDDGKLGLRVVAKDDATREFVVEVENDGIIAKQKGVNIPYTKIPFPALAERDNADIRFGLEQGLNFIAISFVRTAKDVEEVRAICEETGNGHVRLFAKIENQQGIENIDEIIEAADGIMIARGDMGIEVPFEMVPVYQKMIITKVNAAGKAVITATNMLESMTEKPRATRSEVSDVFNAVIDGTDATMLSGESANGKYPVEAVRAMATIDKNAQTLLNEYGRLDSSSFARTSKTEVVASAVKDATSSMDIKLVVALTESGNTARLISKYRPDADILAVTFDEKTQKSLMINWGVIPVVTEKPASTDDMFEVAEKAALESGLVQSGDNIVIVAGVPVGSGGTNTMRIRTVK

SEQ ID NO: 682 - DNA, 1503 bp, Vitis vinifera
  CDS (1)..(1503)
atggaggggggaggaggatggaaaaggcccaagacaaagatagtgtgcacgttgggaccggcgtccaggtctgttgaagtgatagagaagcttttgagggctggtatgaacgtggcgcgcttcaacttctcccatggctcccatgcctaccaccagcaaacccttgacaatctcaggactgccatggccaacaccgaaaccctttgcgccgtcatgttggatacgaagggtccagagattcgtactggatttttgaaggatgggaagcctgtccaactcaaaaagggtcaagagatcaccatctccactgactatagcatcaagggtgatgaccacatgatctgtatgagctaccaaaagctggctgaggatttgaggccacagagtgtaattctatgtgctgatggcactatcaccctcacagtcttggcctgtgacaaagaattggggttggttcgatgtcgttgtgaaaactctgcagttctgggtgagaggaagaatgtcaatcttcctggggttgttgtggaccttcccaccttaacagagaaagacaaagaggatatcttagaatggggggtacccaataagattgatatgattgctctgtcttttgttcgcaaagggtcagaccttgtggaggttcgaatgctgctggcggaacatgctaagtctatccttctcatgtcaaaggttgaaaatcaagagggtgttgctaattttgatgaaattcttgcaaactcagatgcgtttatggtggccaggggtgaccttggaatggaaatccccattgagaagatatttcttgcacagaaagtgatgatatataagtgtaacattcagggaaaacctgtagtcactgcaactcagatgttggagtccatgatcaaatctccccggcctacacgagctgaagccactgatgttgccaatgcagttcttgatggcaccgactgtgtgatgctgagtggggaaactgctgctggggcataccctgaacttgctgttcaaaccatggccaggatttgcttggaggcagagaattcacttaattatggagatgtcttcaagacaatcatggaaactgcaccaatgcccatgagccccatagagagtttggcctcctcagcagtacgggcagccaatgggtctaaagcagctttgattttggtcctgaccagaggtggaacaactgctaatctggtggctaagtaccggcccagcatgccaattttgtctgtggtagtcccggagatcacagcagattcctttgattggtcttgcagtgatgaatccccggccagacacggcctgattttcaggggactggtacctgttctatgctcaggatctgcaaaagcttctgacagtgagtcaacagaagaggctttggagttttcacttcaatatgcaaagaccaaggaaatgtgcaagcctggagactcagttgtggcattgcaccgagttggaactgcttctgtgatcaagatactaactgtcaaatga

SEQ ID NO: 683 - protein, 500 aa, Vitis vinifera
MEGGGGWKRPKTKIVCTLGPASRSVEVIEKLLRAGMNVARFNFSHGSHAYHQQTLDNLRTAMANTETLCAVMLDTKGPEIRTGFLKDGKPVQLKKGQEITISTDYSIKGDDHMICMSYQKLAEDLRPQSVILCADGTITLTVLACDKELGLVRCRCENSAVLGERKNVNLPGVVVDLPTLTEKDKEDILEWGVPNKIDMIALSFVRKGSDLVEVRMLLAEHAKSILLMSKVENQEGVANFDEILANSDAFMVARGDLGMEIPIEKIFLAQKVMIYKCNIQGKPVVTATQMLESMIKSPRPTRAEATDVANAVLDGTDCVMLSGETAAGAYPELAVQTMARICLEAENSLNYGDVFKTIMETAPMPMSPIESLASSAVRAANGSKAALILVLTRGGTTANLVAKYRPSMPILSVVVPEITADSFDWSCSDESPARHGLIFRGLVPVLCSGSAKASDSESTEEALEFSLQYAKTKEMCKPGDSVVALHRVGTASVIKILTVK

SEQ ID NO: 684 - DNA, 1743 bp, Vitis vinifera
  CDS (1)..(1743)
  misc_feature (200)..(200): y is t or c
  misc_feature (1338)..(1338): y is t or c
atggctcaggtggtggcgactcgcgcgattcagagctcgattctgtgccctagctctggatccgtgcatgagcgatttgagaagctgaagccctccggtttcgctgcgaaagtgttggctcgcgaagagcggaggagccggagagtggcttggaggggcggtccgattgcggcggcgaagagatctgtgggagctgagayggaggttgttccggtcacaccagaggatgcgaagggagaggagcaatatcatcgtttacggggaattcaacagcttggtgagacatctgttggtatgtggtctaagccaacagttagacgcaagacaaagattgtttgcactattggtccatccaccaacacacgggaaatgatatggaagctggctgaagctggaatgaatgtagcccgcctgaatatgtctcatggagatcatgcatctcatcagaaggttattgatttggtaaaagagtataatgcacaatccaaagataatgtcattgcaatcatgcttgataccaaggcaagttttctaggccctgaggtcaggagtggggacttgccccagccaatcatgttaaaaagtgggcaggaattcaccttcacaattcaaagaggcgttgggacagcagattgtgttagtgttaactatgatgattttgtcaatgatgtagaaatgggcgacatgcttcttgtggatggtggtatgatgtcattaatggtcaagtccaagactggagattcagtgaaatgtgaagttgttgatggaggagagctcaagtctagaaggcatctaaatgttcgaggaaaaagtgcaacactgccatcaattactgaaaaggactgggatgatatcaagtttggtgttgacaataaagtggacttttatgcagtctcctttgttaaagatgcgaaagtagtccatgaattgaagaactatctgaaaagctgtaatgcagatatccatgtcattgttaaaattgaaagtgccgactccattcccaatctacattcaattattaccgcatctgatggggcaatggttgctagaggggatcttggtgccgagcttcctattgaggaggtcccattgctacaggaagagataatcaggatatgtcgtagcatgggaaaagctgttattgtagcaaccaatatgctggaaagcatgattgttcacccaacaccaacccgagcagaggtatcagacattgccattgctgtccgagagggtgctgatgcagttatgctttctggagaaactgctcatggaaagtttcccttgaaagctgtgaaagtcatgcatacagtttccttaagaactgaagcaaccttggtyggtagcccaatgccaccaaatcttggtcaggctttcaagaaccatatgagcgaaatgtttgctttccatgcaaccatgatgtccaatactctcggtacttcaatagttgttttcactagaactggtttcatggctatccttctgagccattatcgaccttctggcaccatatttgcctttacaaatgaggagagagtacaacagagactagccgtgtaccaaggggtatgtcccatatacatgcagttctcagacgatgctgaagaaacctttgcaaatgccttgtctttgttgcagaagcaagggatggtgaaggaaggagaagaggtggctcttgttcagagtggcaggcagccgatctggcggttccaatccacacacaatatccaggtcaggaaagtttaa

SEQ ID NO: 685 - protein, 580 aa, Vitis vinifera
  misc_feature (67)..(67): The Xaa at location 67 stands for Met, or Thr.
MAQVVATRAIQSSILCPSSGSVHERFEKLKPSGFAAKVLAREERRSRRVAWRGGPIAAAKRSVGAEXEVVPVTPEDAKGEEQYHRLRGIQQLGETSVGMWSKPTVRRKTKIVCTIGPSTNTREMIWKLAEAGMNVARLNMSHGDHASHQKVIDLVKEYNAQSKDNVIAIMLDTKASFLGPEVRSGDLPQPIMLKSGQEFTFTIQRGVGTADCVSVNYDDFVNDVEMGDMLLVDGGMMSLMVKSKTGDSVKCEVVDGGELKSRRHLNVRGKSATLPSITEKDWDDIKFGVDNKVDFYAVSFVKDAKVVHELKNYLKSCNADIHVIVKIESADSIPNLHSIITASDGAMVARGDLGAELPIEEVPLLQEEIIRICRSMGKAVIVATNMLESMIVHPTPTRAEVSDIAIAVREGADAVMLSGETAHGKFPLKAVKVMHTVSLRTEATLVGSPMPPNLGQAFKNHMSEMFAFHATMMSNTLGTSIVVFTRTGFMAILLSHYRPSGTIFAFTNEERVQQRLAVYQGVCPIYMQFSDDAEETFANALSLLQKQGMVKEGEEVALVQSGRQPIWRFQSTHNIQVRKV

SEQ ID NO: 686 - DNA, 1437 bp, Ruminococcus torques ATCC 27756
  CDS (1)..(1437): transl_table=11
atgaaaaagacaaaagtagtttgtacaatgggaccgaacacgaatgacagggaactgctgaaaaagttgattgaaaacggaatggatgttgcccgcttcaatttttcgcacggagatcatgaagaacaaaaaagcagaatggatctgctgaaagaactgcgtcaggaattgaatacaaacactgcaattcttcttgatacaaagggaccggagatccgtacgggagtattgaaaggcggaaaaagaataatgctcaaggccggagagcagtttactctgacaacagaggagatcgaaggggatgaatcaaaagtttcgatcacttacgaaggtcttgtgcaggatgttgatgccggtagagtgattcttattgatgacggattgattgaattaaaagttgttggaaaaagtgaaaaggaaattttctgcgaagtcataaacggaggagaactcggtgagagaaagggagtaaatgtgccgaatgtagcggttagacttccggcaatcacagaaaaagataaggatgatatccgttttggagtagagcagggaattgattttatcgctgcatcttttgtgagaaatgcagaatgtgtacttgaaataaaagcataccttaaagaactcggtgcgccatatgttccgattattgcaaaagtagagaatgcagaaggaattaaaaatattgatgaaattatccgtgctgcagacggggttatggttgcgagaggagatcttggagtagaaattccggcagaagaagttccgtatcttcagaaaatgattattcagaaatgtaatatgaactttaaaacagttattacggcaacccagatgctggactctatgatgcgtaatccgcgtccgacaagagcggaagttacagatgttgccaatgctgtatatgacggaacagatgcggtaatgctgtcaggagagacggcgcaggggaaatatcctctggaagcgcttcagatgatggttcatattattcagaatacagaacagcatctcgattatgaaggaatgttggaaaaaacaggaggacatttaaaaagcggtgtatcaagcgcaatcggatattcatctgtgctggcagcatcaaatctgaatgccaaatgcattattacaccttctgtatcgggagcaacggcaagagttgtatccaatctgcgtccgcgtcaggtgattttaggtgtgactccgaatgagagaacattgcgcagaatgtcgatttactggggagtaaaaccgattaaatcacaggcgtttaatacgacggatgacatttgcgacggcgcgattgagctggcaaaagtgaagcagtttgtagaaacaggagagattgtcgtaatcacagcgggaattccttcgccgaatgtaaaaaaagagagaagcgccacaagtaatatgatgagaattgcaactgtggaataa

SEQ ID NO: 687 - protein, 478 aa, Ruminococcus torques ATCC 27756
MKKTKVVCTMGPNTNDRELLKKLIENGMDVARFNFSHGDHEEQKSRMDLLKELRQELNTNTAILLDTKGPEIRTGVLKGGKRIMLKAGEQFTLTTEEIEGDESKVSITYEGLVQDVDAGRVILIDDGLIELKVVGKSEKEIFCEVINGGELGERKGVNVPNVAVRLPAITEKDKDDIRFGVEQGIDFIAASFVRNAECVLEIKAYLKELGAPYVPIIAKVENAEGIKNIDEIIRAADGVMVARGDLGVEIPAEEVPYLQKMIIQKCNMNFKTVITATQMLDSMMRNPRPTRAEVTDVANAVYDGTDAVMLSGETAQGKYPLEALQMMVHIIQNTEQHLDYEGMLEKTGGHLKSGVSSAIGYSSVLAASNLNAKCIITPSVSGATARVVSNLRPRQVILGVTPNERTLRRMSIYWGVKPIKSQAFNTTDDICDGAIELAKVKQFVETGEIVVITAGIPSPNVKKERSATSNMMRIATVE

SEQ ID NO: 688 - DNA, 1413 bp, Vibrionales bacterium SWAT-3
  CDS (1)..(1413): transl_table=11
atgaaaaagaccaaaatcgtatgtacgattggccctaaaactgaatctgtagagaagctaactgaactagtagatgctggcatgaacgttatgcgtcttaacttctctcacggtgatttcgcagagcacggcactcgtattgcgaacttccgcgaagtaatggacaaagtaggtaagcaacttgctatccttcttgatactaaaggcccagagatccgtactatcaagctagaaggcggtaacgacgtagatctagtagctggtcaagaattcactttcacaactgatacttcagttgtaggtaacaaagagactgtagcggtaacttacgctggtttcgcagctgacctaaacgctggtaacacaatcctagtagatgacggcctaatagaaatggaagttatctctactactgaaactgaagttaagtgtaaagttcttaacaacggcgcactaggcgaaaacaaaggtgttaaccttcctggcgtttctgttcaacttccagctctttctgagaaagacaaagctgaccttaagtttggttgtgagcaaggcgttgatttcgtagctgcatctttcatccgtaaagcatctgacgttaaagagatccgtgagatcttagacgcaaacggcggcaacgatatccacatcatctctaagattgagaaccaagaaggtgtagataacttcgacgaaatccttgagctttctgacggtatcatggttgctcgtggtgacttaggtgttgaaatcccagctgaagaagtaatcttcgctcagaaaatgatgatcgagaagtgtaaccgtgcacgtaagatggttatcacagcaacccaaatgcttgattctatgatcaacaacccacgtccaactcgtgcagaagcgggtgacgttgcgaacgcaatcatggatggtactgacgcagtaatgctttctggcgaaacggctaaaggtaagtacccagttgaagctgtcactatcatggctcaaatcgcgaaccgtactgattcagctcttaaagctgagttaggttctcgtctagacagcccacgtctacgcatcactgaagcagtatgtaaaggcgcagtagacacagcggagaagctagctgctcctctaatcatcgttgctactgaaggcggcaagtctgcacgttcagtacgtaagtacttcccaactgcaaacatcattgcactgacaactaaccaaaagacagctgctcagcttgttcttactaaaggtgttcgtccagttcttgttgagtctatcgacagcactgatgctttctacaaaatgggtaaagaatacgcacttgaagctgagttcggcagcaaaggcgacatcgttgtaatggtttctggtgctctagtagcttcaggcactacaaacacggcatctgttcacgttctataa

SEQ ID NO: 689 - protein, 470 aa, Vibrionales bacterium SWAT-3
MKKTKIVCTIGPKTESVEKLTELVDAGMNVMRLNFSHGDFAEHGTRIANFREVMDKVGKQLAILLDTKGPEIRTIKLEGGNDVDLVAGQEFTFTTDTSVVGNKETVAVTYAGFAADLNAGNTILVDDGLIEMEVISTTETEVKCKVLNNGALGENKGVNLPGVSVQLPALSEKDKADLKFGCEQGVDFVAASFIRKASDVKEIREILDANGGNDIHIISKIENQEGVDNFDEILELSDGIMVARGDLGVEIPAEEVIFAQKMMIEKCNRARKMVITATQMLDSMINNPRPTRAEAGDVANAIMDGTDAVMLSGETAKGKYPVEAVTIMAQIANRTDSALKAELGSRLDSPRLRITEAVCKGAVDTAEKLAAPLIIVATEGGKSARSVRKYFPTANIIALTTNQKTAAQLVLTKGVRPVLVESIDSTDAFYKMGKEYALEAEFGSKGDIVVMVSGALVASGTTNTASVHVL

SEQ ID NO: 690 - DNA, 1422 bp, Eubacterium ventriosum ATCC 27560
  CDS (1)..(1422): transl_table=11
atgagaaaaactaaaattgtttgtacattaggtcctgcaacagataaggacaatgtattagaagaattaattaagaatggtttaaatgtagcaagatgtaatttctctcacggttctcacgaagagcatttgggaagaatgaacaaagttaaggaattaagagaaaagtgtaacaagccggtagccatattgttggatacaaagggacctgaaatcagaacaggtaactttgaaaatggtaaggttcacgttttttcaggtcagacatttacattggttggaggtgaaaaaatcattggtgacgaaaaccgtgtaaacataacatatcctgatttgtataaggacgtagagccgggttcagttattttgatagatgatggtcttattaagatggaagttgaaaaaatagttggacaggacgttgtttgtaaagtaaagaacgacggaaagatttcagataagaaaggtgtcaatgttcctgacattcatattaacatggaatatttaagtgaacaggacaagaaagacattatttttggtatagagcaggatgttgagtatattgcagcatcatttgtaagatgtgcagaagatgtagaacagattcgtgctattttaaaagaaaacggtggcgaaaatattaacattattgcaaagattgaaaacagtgaaggaatactcaacatagattcaattattgaagctgctgatggcattatggttgccagaggtgatatgggagtagagcttccggaagaagaagtcccaattatccagaagatgattattaagaaagtatatcaggcaggcaagaaggttataacagctacacagatgcttgactcaatgatgaataacccaagacctacaagagctgagacaacagatgttgccaatgctatttatgatggtacaagtgcaattatgctttcgggagaaacagcggcaggtaagtatccaattgacgcattacagactatggttagaatagctgaaagaacagagatggatatcaattacaagcagagatttttcaaccagaatattcatacagaaagaaatattacacaggctgtttgccatgccacatgtacaacagcttatgacttggaagctaaggctatccttacagttactaagtcaggaagatcagcacgaatgatttcaagttgtagacctgattgtatggttattgcaggtacaacagatgagaaaacctgcagacagcttagcctttcatggggagtgactcctgtacttcttaaagaaaaggaagacgtattggaactttttgattacgcagttgaagttgcaaaagagaacaagttagtaaatcagggtgacattgtagtaattacttcaggtgtaccacttggaacatcaggaacaactaatatgatgaaagttcagactgtagaataa

SEQ ID NO: 691 - protein, 473 aa, Eubacterium ventriosum ATCC 27560
MRKTKIVCTLGPATDKDNVLEELIKNGLNVARCNFSHGSHEEHLGRMNKVKELREKCNKPVAILLDTKGPEIRTGNFENGKVHVFSGQTFTLVGGEKIIGDENRVNITYPDLYKDVEPGSVILIDDGLIKMEVEKIVGQDVVCKVKNDGKISDKKGVNVPDIHINMEYLSEQDKKDIIFGIEQDVEYIAASFVRCAEDVEQIRAILKENGGENINIIAKIENSEGILNIDSIIEAADGIMVARGDMGVELPEEEVPIIQKMIIKKVYQAGKKVITATQMLDSMMNNPRPTRAETTDVANAIYDGTSAIMLSGETAAGKYPIDALQTMVRIAERTEMDINYKQRFFNQNIHTERNITQAVCHATCTTAYDLEAKAILTVTKSGRSARMISSCRPDCMVIAGTTDEKTCRQLSLSWGVTPVLLKEKEDVLELFDYAVEVAKENKLVNQGDIVVITSGVPLGTSGTTNMMKVQTVE

SEQ ID NO: 692 - DNA, 1458 bp, Bacteroides caccae ATCC 43185
  CDS (1)..(1458): transl_table=11
atgttattgaaacagactaagattgtggcttctatttcggatagacgttgtgatgtggattttataaaacagctctttgaagctggaatgaatgtggtgcgtatgaatactgcgcacgccagccgtgaaggttttgaagctctgattgcaaatgtacgtaccgtgtccaatcgtattgcgattctaatggatacgaaaggaccggaagtccgtacgactgccaatgaagaaccgattccatataaaataggtgagaaagtaaagattgtaggtaatccggaacttgaaactacccgtgagtgtattgctgtttcatatcccaattttgtacacgatttgaatatcggtggtacgattttgattgacgatggtgatctggaactggaagtcattgataaaaccgctgattatttgctttgtgaagtgaagaacgaagctactttgggaagccgtaagagcgtgaatgttccgggtgttcgtatcaatcttccttccttgacggaaaaagaccgtaacaatatcctttatgctatcgaaaaggatattgattttatcgctcactctttcgtgcgcaatcgtcaggatgtacttgatattcgtgcgattctggatgctcataatagtgacattaagattattgccaagattgaaaatcaggaaggcgtagataatattgatgagatactggaagtagccgacggcgttatggttgcccgtggtgatttaggtattgaggtccctcaggaacgcattccgggaatccagcgtgtgctgattcgtaaatgtatcctggcaaagaagccggtgatcgttgctacgcaaatgttgcatacgatgattaacaatcctcgtcctactcgtgcggaagttactgacattgccaatgcaatttattatcgtacggacgctttgatgttgagtggtgaaactgcttatggtaagtatccggtggatgcggtgaaaacaatgactaagattgcggctcaggctgaaaaagataaactggaagaaaatgatattcgtatcccgttggatgaaaacagtaatgatgttacggctttccttgccaaacaggctgtaaaagctacatctaagttaaagatacgtgcgatcattaccgacagttatagcggacgtacagcacgcaatctggctgctttccgtggcaagtatccggtattggctatttgttataaggaaaagacgatgcggcatctggctctttcttatggtgtggaagcgatctatatgccggaactcgcaaacgggcaggaatactattttgcagccctgcgccgcctgttgaaagaaggacgtttgcagccaacggatatggtaggctatttgagtagtggtaaagaaggtacgcaaacttccttcctcgaaataaatgtggtggaggatgcgttgaagcatgcggaagataccgtattgcctaataataaccgttatctgtaa

SEQ ID NO: 693 - protein, 485 aa, Bacteroides caccae ATCC 43185
MLLKQTKIVASISDRRCDVDFIKQLFEAGMNVVRMNTAHASREGFEALIANVRTVSNRIAILMDTKGPEVRTTANEEPIPYKIGEKVKIVGNPELETTRECIAVSYPNFVHDLNIGGTILIDDGDLELEVIDKTADYLLCEVKNEATLGSRKSVNVPGVRINLPSLTEKDRNNILYAIEKDIDFIAHSFVRNRQDVLDIRAILDAHNSDIKIIAKIENQEGVDNIDEILEVADGVMVARGDLGIEVPQERIPGIQRVLIRKCILAKKPVIVATQMLHTMINNPRPTRAEVTDIANAIYYRTDALMLSGETAYGKYPVDAVKTMTKIAAQAEKDKLEENDIRIPLDENSNDVTAFLAKQAVKATSKLKIRAIITDSYSGRTARNLAAFRGKYPVLAICYKEKTMRHLALSYGVEAIYMPELANGQEYYFAALRRLLKEGRLQPTDMVGYLSSGKEGTQTSFLEINVVEDALKHAEDTVLPNNNRYL

SEQ ID NO: 694 - DNA, 1425 bp, Ruminococcus obeum ATCC 29174
  CDS (1)..(1425): transl_table=11
atgcgcaaaacaaaaattatctgtacccttggtccgtctactgataaggacggtgttctggaagaactcgttaaagaaggaatgaacgtagcacgttttaacttctctcatggtttacatgatgaacaaaaaggccgtattgataagttaaaagaaattcgtacaagactcaataaaccggtagctgcgcttctcgatacaaaaggccctgaaattcgtatccgcgaatttgaaaatggaaaggtcacactgaaggaaggtcaagaatttaccttaactacagaagaaatcgtaggaaacgaaaaaatcgtttctgttacctataaagatttatataaagatgtcaaaccaggcaacagtattctgatcgatgatggtctgatcggtcttgaagtcaagaagatcaaaggtcagaacatcatctgtaaagtcgtaaacggtggtgttctcggcaataagaagggcgtcaacctccctggtgtagaagtaaacatgccgtttatcagcccaaaagatcacgatgatatcctgtttggtattaaagaaggctatgattttattgcagcttcctttaccagaactgctgccgatgtcaaagaaatccgtgatatccttgagaaaaacggcggacatgacatcaagatcatcgcaaagatcgagaaccagcagggtgttgacaacatcgacagcatcattgaagctgcagatggtatcatgatcgcccgtggtgatatgggtgttgaaattcctctcgaagacgtaccggttatccagaaggatatcattgcaaaggtatacaatgccggcaaacaggttatcacagctactcagatgttggattccatgatcaagaatccacgtccaacacgtgcagagactactgacgttgccaacgcaatctatcagggaacaagtgcaatcatgctttccggtgagactgctgccggtaaatacccaattgaagcacttaagacaatggttaaaattgcagttcgtacagaagccgatgttgactacaataaacagttcagcacttcttcaaaagatcatgctacaaatgtaactaccgctatttcccatgctacctgcatgactgcgatcgacctgaacgcaaaagcgatcatcgcagttacccgttccggaaatactgcacgcatggtttccaaatatcgtccgggatgccagattattgcatgtactccggatgagcgtacctggcgtcagatgaacctgatctggggtgtaacaccactcctgaccaaagaggaatacagcatggagattcttcttcttcacgctacagaagcagctgaagaaaaaggttatgtcaaagaaggagatatcgttgttcttacagttggtgttcctcttggacatcctggcaacacaaatctgctcaaagcaaccgttgttggtaagtattaa

SEQ ID NO: 695 - protein, 474 aa, Ruminococcus obeum ATCC 29174
MRKTKIICTLGPSTDKDGVLEELVKEGMNVARFNFSHGLHDEQKGRIDKLKEIRTRLNKPVAALLDTKGPEIRIREFENGKVTLKEGQEFTLTTEEIVGNEKIVSVTYKDLYKDVKPGNSILIDDGLIGLEVKKIKGQNIICKVVNGGVLGNKKGVNLPGVEVNMPFISPKDHDDILFGIKEGYDFIAASFTRTAADVKEIRDILEKNGGHDIKIIAKIENQQGVDNIDSIIEAADGIMIARGDMGVEIPLEDVPVIQKDIIAKVYNAGKQVITATQMLDSMIKNPRPTRAETTDVANAIYQGTSAIMLSGETAAGKYPIEALKTMVKIAVRTEADVDYNKQFSTSSKDHATNVTTAISHATCMTAIDLNAKAIIAVTRSGNTARMVSKYRPGCQIIACTPDERTWRQMNLIWGVTPLLTKEEYSMEILLLHATEAAEEKGYVKEGDIVVLTVGVPLGHPGNTNLLKATVVGKY

SEQ ID NO: 696 - DNA, 1443 bp, Dorea longicatena DSM 13814
  CDS (1)..(1443): transl_table=11
atgaaaaaaacaaagattatctgtacaatgggaccaaataccaacgatgaatctctgatgagaaagttagtccagaatggaatggacatcgcaagatttaacttctctcatggtgatcatgaggagcaaaaaggtcgtatggatatgttaaagaagatccgcgaggaagagaacaaaccaatcgcgatccttctggatacaaaaggacctgagattcgtacaggtgtattaaaagacggaaagaaagtacagcttgaagcaggcgagacatttaccctgacaacagatgagatcgtaggagacaataagatcgtatctattacatataaaggtctggtagaagatgtcaaagccggaagcacaatcctgatcgatgacggtctgatcgagctgaaggtaaaagataaaaagggcaataacatcaactgtgaagttgtcaatggcggtgaacttggagagaagaagggtgttaacgtaccgaacgtagcaatccgtcttcctgctatcacagacaaagatcgtgacgatctgaaattcggtgtagaacagggcgtagactttatcgctgcttctttcgtaagaaatgcagaatgtatcctggagatcaaatcattcttaagagaatgtaaagctccatatattccggttattgctaagattgaaaactttgaggcaatcaagaatatcgatgagatcattcgctgtgcagacggaatcatggtagccagaggtgatcttggtgttgagattcctgccgaagaagttccataccttcagaaaacaattatccagaaatgtaacgataacttcaaaccggttatcacggctacacagatgctggattcaatgatgcgtaacccacgtccaacaagagcagaggttacagacgttgccaatgcggtatacgacggaacagatgcagtgatgctttccggagagaccgcacagggtaaatatccattagaagcattgcagatgatggttcacattgttgagaatacagaggaacacctggactatgatatgatcctcagaaaagctggagaacacagacttaagagcgcatccagcgcacttgcacatgcgacggtaacaacagcaaataaccttcgtgcaaaatgtatcgtaacacctactgtatccggtgctacagcaagagttgtatctaagttcaaaccaaagacaggtattatcggtatcagcccagatgaagcaacgctgagaagaatgcagatcaactggggtgtcaggccactgaaatcagttgcagtatacacaacagaagatatctgtgataatgcgatcgatctgatctgtgcaaaacagcttgcagaagcaggagatatggttgtgttaacacttggaattccatctacgaatgtatctgagaacagaaccgtaagcaatatgatgagaatcgctatggtagatgacagaaaatag

SEQ ID NO: 697 - protein, 480 aa, Dorea longicatena DSM 13814
MKKTKIICTMGPNTNDESLMRKLVQNGMDIARFNFSHGDHEEQKGRMDMLKKIREEENKPIAILLDTKGPEIRTGVLKDGKKVQLEAGETFTLTTDEIVGDNKIVSITYKGLVEDVKAGSTILIDDGLIELKVKDKKGNNINCEVVNGGELGEKKGVNVPNVAIRLPAITDKDRDDLKFGVEQGVDFIAASFVRNAECILEIKSFLRECKAPYIPVIAKIENFEAIKNIDEIIRCADGIMVARGDLGVEIPAEEVPYLQKTIIQKCNDNFKPVITATQMLDSMMRNPRPTRAEVTDVANAVYDGTDAVMLSGETAQGKYPLEALQMMVHIVENTEEHLDYDMILRKAGEHRLKSASSALAHATVTTANNLRAKCIVTPTVSGATARVVSKFKPKTGIIGISPDEATLRRMQINWGVRPLKSVAVYTTEDICDNAIDLICAKQLAEAGDMVVLTLGIPSTNVSENRTVSNMMRIAMVDDRK

SEQ ID NO: 698 - DNA, 1761 bp, Bacillus sp. SG-1
  CDS (1)..(1761): transl_table=11
atgagaaaaacgaaaattgtatgtaccattggaccggcaagtgaatcggttgaaaaattaacagaactaattgaagcaggaatgaatgtagcacgcctcaatttctcacatggtgaccatgaagaacatggtgccagaattcaaaacatccggacagcttccgaaaagacaggcaagactgtagggatcctgttggatacgaaaggtcccgaaatccgtacgaacaacatggagaacgggtccatcgagcttgagaaaggttctgaagttatcgtttccatgaaagaagtactgggaacacaagagaaattctctatcacatacgagagcttgattgatgatgtggaagagggatctaaaatccttttggatgacggattaatcggccttgaagttctttctcttgataaagctgcaggagaaatcaagacaaaagtacttaactcgggaacgctaaagaacaaaaaaggcgtgaatgttcctggagtatctgtaaatctgcctggaatcactgagaaggatgccaaggatatcattttcggaatcgagcaaggtgttgatttcatcgcagcttcattcgttcgccgtgcttcagatgttttggaaatccatcagctgttggaagatcataatgcaggagatatccaaatcatccctaaaatcgaaaaccaggaaggtgtcgacaatatcgatgaagtactggaagtttctgatggtctaatggtcgctcgtggtgatcttggagtggaaatcccagcagaagaagttcctcttgtacaaaaagcattgatcaaaaaatgtaatgcactgggcaagccggttatcacagcaactcaaatgcttgactccatgcagcgcaatccgcgtccgacaagagcggaagcaagtgacgttgcaaatgcaatctttgacggcacggatgcaatcatgctttcaggggaaacagcagccggtgtttaccctgtagaagctgttcagacaatgcataacatcgcgtcccgtgcagaaacggcattggattataaagaaatcctatccaaccgcagcaaagacacaggtcataacatgacagatgctatcgggcaatccgttgcacacacagctatcaacctttctgtgaatgccatcgtggcaccgacagaaagcggccatacagcaaaaatgatctcaaaataccgtccaaaagcaccaatcatcgcggtaacggcaaatgattctgtttcccgtaagctagcattggcttggggcgtatattcgcaaaaaggcagaaaagtggccactacagatgaaatgttggaaatggcagttgaagaaagtgtcaattccggtatgattactcacggtgaccgcatcatcatcacggcgggtgtgcctatcggtgagtccggcacaaccaaccttatgaaaatccacgtagttggcgatatccttgcaaaaggccagggaatcggacgcaaaacggcattcgggaaagcggtagttgcaaaaaatgcagccgaagccaatgagaaagtcaagcctggttctatacttgtgacagtaggcagcgacaaagatatggtccctgcacttgaaaaatgctctgcattgattacagaagaaggcggcctgacaagccatgctgcagtcgttggaatcaatatcggcattccggtcatcgttggagtggaaaatgctatgtccattctaaaagatggacaggaaatcacagttgattcctctagaggtgtcatctacgacggacatgcaagtgtactataa

SEQ ID NO: 699 - protein, 586 aa, Bacillus sp. SG-1
MRKTKIVCTIGPASESVEKLTELIEAGMNVARLNFSHGDHEEHGARIQNIRTASEKTGKTVGILLDTKGPEIRTNNMENGSIELEKGSEVIVSMKEVLGTQEKFSITYESLIDDVEEGSKILLDDGLIGLEVLSLDKAAGEIKTKVLNSGTLKNKKGVNVPGVSVNLPGITEKDAKDIIFGIEQGVDFIAASFVRRASDVLEIHQLLEDHNAGDIQIIPKIENQEGVDNIDEVLEVSDGLMVARGDLGVEIPAEEVPLVQKALIKKCNALGKPVITATQMLDSMQRNPRPTRAEASDVANAIFDGTDAIMLSGETAAGVYPVEAVQTMHNIASRAETALDYKEILSNRSKDTGHNMTDAIGQSVAHTAINLSVNAIVAPTESGHTAKMISKYRPKAPIIAVTANDSVSRKLALAWGVYSQKGRKVATTDEMLEMAVEESVNSGMITHGDRIIITAGVPIGESGTTNLMKIHVVGDILAKGQGIGRKTAFGKAVVAKNAAEANEKVKPGSILVTVGSDKDMVPALEKCSALITEEGGLTSHAAVVGINIGIPVIVGVENAMSILKDGQEITVDSSRGVIYDGHASVL

SEQ ID NO: 700 - DNA, 1413 bp, Vibrio shilonii AK1
  CDS (1)..(1413): transl_table=11
atgaaaaagaccaaaatcgtatgtacgattggccctaaaactgaatcagtagagaagctaactgaactagtaaacgcaggcatgaacgttatgcgtcttaacttctctcacggtgactacgaagagcatggcactcgtattgctaacttccgtgaagttatggcaaacgttggtaagcaacttgcaattcttctagacactaaaggtccagaaattcgtactatcaaactagaaggcggcaatgacgttgatctagtagctggtcaagaattcactttcacaacagatatctctgttgttggtaacaaagacactgttgctgttacttacgctggttttgcacaagacctttctgctggtaacactatcctagtagacgacggtctaatcgagatggaagttatctctactactgaaactgaagttaagtgtaaagttcttaacaacggtgctctaggcgaaaacaaaggtgttaacctaccgggcgtttctgttcagcttccagctctatctgaaaaagataagaacgacctaaaatttggttgtgagcaaggcgttgactttgttgcagcttctttcattcgtaaagcttctgacgttaaagaaatccgtgatgttctaaacgcaaacggtggcgagaacatccacatcatttctaagatcgaaaaccaagaaggtgtagataacttcgacgagatcctagagctttctgacggtatcatggttgctcgtggtgaccttggtgttgaaatcccagctgaagaagtaatcttcgctcagaaaatgatgattgagaagtgtaaccgtgctcgtaagacagttatcactgcaactcaaatgcttgactctatgatcaacaacccacgtccaactcgtgctgaagcgggtgacgttgcgaacgcaatcatggacggtactgatgcagtaatgctttcaggtgagacagctaaaggtaaataccctgttgaagcggtaactattatggctcaaatcgctaaccgtactgacggcgcactaaaagctgagctaggttctcgtctagacagcccgcgcctgcgcatcacagaagcagtatgtaaaggtgcagtagacaccgctgagaagctagctgctccactaatcatcgttgctactgaaggtggtaagtctgcacgttctgtacgtaaatacttcccaacagcaagcatcgttgcgctaacaactaaccctaagactgctgcacagctagttcttactaagggtgttcgcccagttcttgttgattcaatcgacagcactgatgagttctacaaaaacggtaaagagtacgctctagagtctggttttggtaagaaaggcgacatcgtagtaatggtttctggtgctctagtagcttcaggcacaactaacacagcttctgttcacgtactataa

SEQ ID NO: 701 - protein, 470 aa, Vibrio shilonii AK1
MKKTKIVCTIGPKTESVEKLTELVNAGMNVMRLNFSHGDYEEHGTRIANFREVMANVGKQLAILLDTKGPEIRTIKLEGGNDVDLVAGQEFTFTTDISVVGNKDTVAVTYAGFAQDLSAGNTILVDDGLIEMEVISTTETEVKCKVLNNGALGENKGVNLPGVSVQLPALSEKDKNDLKFGCEQGVDFVAASFIRKASDVKEIRDVLNANGGENIHIISKIENQEGVDNFDEILELSDGIMVARGDLGVEIPAEEVIFAQKMMIEKCNRARKTVITATQMLDSMINNPRPTRAEAGDVANAIMDGTDAVMLSGETAKGKYPVEAVTIMAQIANRTDGALKAELGSRLDSPRLRITEAVCKGAVDTAEKLAAPLIIVATEGGKSARSVRKYFPTASIVALTTNPKTAAQLVLTKGVRPVLVDSIDSTDEFYKNGKEYALESGFGKKGDIVVMVSGALVASGTTNTASVHVL

SEQ ID NO: 702 - DNA, 1431 bp, Pedobacter sp. BAL39
  CDS (1)..(1431): transl_table=11
atgaaaccatttcattccagaacaaaaatcgtagcgaccctcgggccagcatcagctaagcctgaagttttgtacagcatgtttaacgccggattagacgtttgcagacttaacttctctcacggttcccaggcagaccaccaggtcgtgcttgacaccattcgtaacctcaatgaaaaacacaactacaatgtaggtatcctggcagatttacagggcccgaaaatacgtatagggatggtgaaagatggtggtattcacttggttaacggtaacaaaaccatcattactaccaaagagtgtatcggtaatgaggaacgcatctacatcacttacgagacttttcctaaagacgttaaagctggtgaaatcatccttctggatgatgggaaactgcaaatgagagtcgtggaaaccaactttgaagatgaagtggtttgtgaggttgttcatggtggtatcctgacttcaagaaaaggggtaaacctgccaaacactaaagtttctattccttccctgaccatcgaagaccgcaaaaacctggagtttgtacttcagaatgatgtggagtggatcggtctttcttttgtgagaaatgcagaagacatcaccgaattaaaagatatcatcaaagaaagaggcaaaaccgcccgtgtaattgccaaaattgaaaaacctgaagccattgccaatatcgatgagatcatcgctgtttcagatggtatcatggttgcacgtggtgacctcggagtggaaatgccaatggaagaagttcctttgctgcaaaaaatgatcgttcagaaatgccgtgcggcttctaaaccggtcatcatcgctacgcagatgctggaaagtatgatcactacacctaggccaacacgtgctgaggtgaatgacgttgccaactctgtattggatggtgctgatgccgtgatgctgagcggtgagacttctgtaggggagtttccgctgatcgttatcgagaccatgcagaaaatcattcagaacatcgaggtgaacaattatccgttccaccctgaaaagttccttaagcctaagtctgagagcttcctgagcgatgctttatgtgacagtgcaaccttcttgtccaaacagaccaacgctgttggtatcgtttcaatgacagtaagtggttacactgcatttgaaatctccagccacaggcctaaagcattaacttatatttttaccagcaacaaatcgctgttaaatactttgagccttgtttggggggttcagggtttctattacgacaaatttgagagtactgatgaaaccattctggacgttaatgctctgcttaaagagtacaaactggtcaaaaaaggtgatgtcatcatcaataccgcagccatcccaatggagaagatgggtaaaacaaatatgttgaaaatcacagttattgaataa

SEQ ID NO: 703 - protein, 476 aa, Pedobacter sp. BAL39
MKPFHSRTKIVATLGPASAKPEVLYSMFNAGLDVCRLNFSHGSQADHQVVLDTIRNLNEKHNYNVGILADLQGPKIRIGMVKDGGIHLVNGNKTIITTKECIGNEERIYITYETFPKDVKAGEIILLDDGKLQMRVVETNFEDEVVCEVVHGGILTSRKGVNLPNTKVSIPSLTIEDRKNLEFVLQNDVEWIGLSFVRNAEDITELKDIIKERGKTARVIAKIEKPEAIANIDEIIAVSDGIMVARGDLGVEMPMEEVPLLQKMIVQKCRAASKPVIIATQMLESMITTPRPTRAEVNDVANSVLDGADAVMLSGETSVGEFPLIVIETMQKIIQNIEVNNYPFHPEKFLKPKSESFLSDALCDSATFLSKQTNAVGIVSMTVSGYTAFEISSHRPKALTYIFTSNKSLLNTLSLVWGVQGFYYDKFESTDETILDVNALLKEYKLVKKGDVIINTAAIPMEKMGKTNMLKITVIE

SEQ ID NO: 704 - DNA, 1413 bp, Moritella sp. PE36
  CDS (1)..(1413): transl_table=11
atgaaaaagactaaaattgtttgtacaattggtccaaaaactgaatcagtagagaaactaacagagcttgttaaagcaggcatgaacgtaatgcgtttaaacttctctcacggtaactttgctgagcactcagttcgtattcaaaatatccgtgaagtaagtgaaaacctaaatgaaaaaatcgcagtattactggatactaaaggtccagagatccgtacgattaaattagaaaatggtgaagacgtaatactgactgctggtcagttattcacatttacaactgatattaatgttgtaggtaataaagatagtgttgctgtaacttatcctggatttgctaaagatctcagcgcaggcgcgatcatccttgtcgatgatggtctgattgaaatgaaagttgttgaaacaactgatacagaagtaaaatgtacagtattaaatactggcgcacttggtgaaaacaaaggtgttaacttacctaacatcagtgtaggtctacctgcattgtcagaaaaagataaagcagatttagcgtttggttgtgagcaagaagttgattttgttgctgcatcattcatccgtaaagctgacgatgtaagagaaattcgcgaaatcttatttaataatggtggcgaaaacattcagattatctcaaaaattgaaaaccaagaaggtgttgataatttcgatgagatccttgcagaatcagacggtatcatggttgctcgtggcgatctcggtgttgagatccctgttgaagaagtgatcatggcacagaagatgatgatcaagaaatgtaataaagcaggtaaagttgtgatcactgcaacgcaaatgcttgattcaatgatcaacaatcctcgtccaacacgtgcagaagcgggcgatgttgccaatgctgtacttgatgggactgatgcggtaatgctttctggtgaaactgcgaaaggtaaatacccggttgaagcggtatctatcatggctaacatttgtgaacgtaccgataactcaatgtcttctgacttgggtgcaaatattgttgcaaaaagcatgcgtattaccgaagctgtgtgtaaaggtgcggtagaaacaactgaaaaattatgcgcgccattgattgttgttgctactcgcggcggtaaatcagcgaagtctgttcgtaaatattttccgaaagcaaatatcttagcgattacgactaacgaaaaaacagcgcaacaattatgcctaacgaaaggtgttagcacttgtatcgttgcgcaaattgatagcacggatgagttttaccgtaaaggtaaagaacttgcgctagcaactggcttagcgaaagaaggtgatattgttgttatggtgtcaggtgcacttgtaccatcaggcacaacaaacacggcatcagttcaccaactttaa

SEQ ID NO: 705 - protein, 470 aa, Moritella sp. PE36
MKKTKIVCTIGPKTESVEKLTELVKAGMNVMRLNFSHGNFAEHSVRIQNIREVSENLNEKIAVLLDTKGPEIRTIKLENGEDVILTAGQLFTFTTDINVVGNKDSVAVTYPGFAKDLSAGAIILVDDGLIEMKVVETTDTEVKCTVLNTGALGENKGVNLPNISVGLPALSEKDKADLAFGCEQEVDFVAASFIRKADDVREIREILFNNGGENIQIISKIENQEGVDNFDEILAESDGIMVARGDLGVEIPVEEVIMAQKMMIKKCNKAGKVVITATQMLDSMINNPRPTRAEAGDVANAVLDGTDAVMLSGETAKGKYPVEAVSIMANICERTDNSMSSDLGANIVAKSMRITEAVCKGAVETTEKLCAPLIVVATRGGKSAKSVRKYFPKANILAITTNEKTAQQLCLTKGVSTCIVAQIDSTDEFYRKGKELALATGLAKEGDIVVMVSGALVPSGTTNTASVHQL

SEQ ID NO: 706 - DNA, 1437 bp, Bacteroides capillosus ATCC 29799
  CDS (1)..(1437): transl_table=11
atgtcagccatgtccgatatgagaaagacaaaaattatctgcactctgggtcccgccgtggacagcgaggaaatgatccgtaagctgatccttgccggcatgaacgccgcccgcttcaacttctcccacggcacccacgagagccacctggctcagctgaccaagctcaagcgcgtccgggacgagctgggtatccccgtggctgctatcctggataccaagggccccgagatccgcatcaagaccttcaaggacggccgcatcgagctgaagaaggacgacgtcttcaccctcaccaccgctgagtgcgagggcacctccgagcgagtctccgttacctatgccaacctgcacaacgaggtggcccccggcaaccacatcctggtggacgacggcctgatcgacctgctggtccaggagatcaagggccaggagatcgtctgcgtcgtggagaacggcggccccctgtccaacaataagtccatcaacatccccaatgtccacatcctgctgccctccctcaccgagaaggacaaggaggacctgaagttcgccgctgagaacgacttcgacttcatcgccgcttccttcgtccggaaggccagcgacgtggaggacatccgcgcctgcctgcacgagttcggcggcgacaacatccgcatcatctccaagattgagaaccgcgagggcgtggacaatctggaggagatcatcgccgcctccgacggcgtcatggttgcccgtggcgacctgggcgtggagatccccgctcaggaggtgcccatcctccagaagaagatgatcaaggctaccaccatggccggcaagcccgtcatcaccgccacccagatgctggactccatgatccgcaacccccgtcccacccgtgccgaggtctccgacgtggccaacgccgtattcgacggcacctcctgcgtgatgctctccggcgagaccgcctccggcaagtaccccatcgaggccgttgaggccatggtgtccaccgtgaaggccgccgagtccgccatcaactactggggccgcttccgtgagcacagcctgcagcccggcgtctccaccatcaacgacgccatcacccacacctgctgcatgaccgctatggacctgaacgccaccgccatcctggcgcccaccgagtccggctacaccgccaaggtcatctcccggttccgtcccgcctgccccatcgtggccgtgtgccagaacgagaaggtccgccgtcagctggccatctcctggggcgtccactcctacctgaccggctttgtggattccaccgaccgtctgttctccatgagcgtggaggtggcccgcaaggagggcgccgtgaagtgcggcgacaccgtggtcatcaccgccggtgtgcccatcggcaagagcggcaccaccaacctgatcaaggctcaggtggtgtaa

SEQ ID NO: 707 - protein, 478 aa, Bacteroides capillosus ATCC 29799
MSAMSDMRKTKIICTLGPAVDSEEMIRKLILAGMNAARFNFSHGTHESHLAQLTKLKRVRDELGIPVAAILDTKGPEIRIKTFKDGRIELKKDDVFTLTTAECEGTSERVSVTYANLHNEVAPGNHILVDDGLIDLLVQEIKGQEIVCVVENGGPLSNNKSINIPNVHILLPSLTEKDKEDLKFAAENDFDFIAASFVRKASDVEDIRACLHEFGGDNIRIISKIENREGVDNLEEIIAASDGVMVARGDLGVEIPAQEVPILQKKMIKATTMAGKPVITATQMLDSMIRNPRPTRAEVSDVANAVFDGTSCVMLSGETASGKYPIEAVEAMVSTVKAAESAINYWGRFREHSLQPGVSTINDAITHTCCMTAMDLNATAILAPTESGYTAKVISRFRPACPIVAVCQNEKVRRQLAISWGVHSYLTGFVDSTDRLFSMSVEVARKEGAVKCGDTVVITAGVPIGKSGTTNLIKAQVV

SEQ ID NO: 708 - DNA, 1341 bp, Onion yellows phytoplasma OY-W
  CDS (1)..(1341): transl_table=11
atgaacaaaactaaaataatttgtaccttaggacctgcttcttatgataaaaacattttacaagccttaattcaaacaggtttgaatgtagcaagatttaatttttctcacgctcaatacgaacaaactaaacttttaatgaaaaccattaaaactattagcgataaattagacaaacacacaggacttatgttagatactaaaggacctgaaattagaactcacgaatttgatggtgtagtaacaattaaaaaagattctgaagtaaaaatatctatgacagaagttttaggtaatgctaaacttttttcagttagttattctaatttatacaatgaattaaaagttggcgatatggttaatattgatgatggatacttatctttggaagttgtaggcaaagacgaagccaaacaacaattagttactaaagccaaaaatactcacttcatcaaatctcgtagaggtgtaaatgttcctaaagttaatttagaaatggattttatttctcctaaagattatcaagatattgtttttgctgcccaacaagattttgattatattgctgcttcatttgttagaagagctcaagatgtcaaagatattagaaaaattttacaagaacaaggaaattccaacatccaaattatttctaaaatagaaaatcaagaaggtgttgataatttagaagaaatcattcaagaatcagacggtattatggttgcaagaggtgatttaggaatagaagttgatggtgaattagtaccactttaccaaacacgtatgattactaaatgtttagaatacggcaaaccagttgtagtagctactcaaatgttagaatctatgcaaagaaatccgcgtccaaccaaagctgaaacttctgatgtctttaatgcagttagagaaggcaccacctttactatgctatcgggcgaaagtgcttcaggtgaatatcctgtagaagctgtaacttatatgaaaaaaattaattatcaagctgaaaaagtagttaattatcaaactttatcaaaagtataccaacctaaaaactccaaagaaaaccttttattaagtgctgtggaattggctttacgcaccgatgttaaagcaattgttgtctatgacttaaaagatgcttataatgtttctaaatttcatccatccgttcctgttttggctttagttaaaactgaacaagaagctcgtcgtttagtgctaaattttggggtttgtccttttgtttctgaaaccaaattacaaactaaattggaagaacttacccaaaatcaaagtagtaattgtcttgttgttaaagatgggatgctttattttaaataa

SEQ ID NO: 709 - protein, 446 aa, Onion yellows phytoplasma OY-W
MNKTKIICTLGPASYDKNILQALIQTGLNVARFNFSHAQYEQTKLLMKTIKTISDKLDKHTGLMLDTKGPEIRTHEFDGVVTIKKDSEVKISMTEVLGNAKLFSVSYSNLYNELKVGDMVNIDDGYLSLEVVGKDEAKQQLVTKAKNTHFIKSRRGVNVPKVNLEMDFISPKDYQDIVFAAQQDFDYIAASFVRRAQDVKDIRKILQEQGNSNIQIISKIENQEGVDNLEEIIQESDGIMVARGDLGIEVDGELVPLYQTRMITKCLEYGKPVVVATQMLESMQRNPRPTKAETSDVFNAVREGTTFTMLSGESASGEYPVEAVTYMKKINYQAEKVVNYQTLSKVYQPKNSKENLLLSAVELALRTDVKAIVVYDLKDAYNVSKFHPSVPVLALVKTEQEARRLVLNFGVCPFVSETKLQTKLEELTQNQSSNCLVVKDGMLYFK

SEQ ID NO: 710 - DNA, 1524 bp, Ralstonia pickettii 12D
  CDS (1)..(1524): transl_table=11
atggaccaccaaggcccaaacaacaaccccaccggaaacaccaaaatgcgccgcttccgcaataccaaaatcctagccaccctaggccccgccagcagcgacaaagacaccatccgcgccctcttcgacgccggcgcagacgtcttccgcctgaacttcagccacggctcgcacgaagaccaccgcaagcgctacgacaccgtgcgcgcggtggaggccgagaccggccgcccgatcggcatcctcgctgacatgcaaggcccgaagctgcgcattggcacctttgccgacggacgcgtcgtgctcaagaacggtgatcgctttgtgctcgatcgcgatccgacgccgggtgatgtcacgcgtgtgcacttgccgcaccccgagctgtacgccgcgaccgcgccgggccagtcgctgttgctggacgacggcaagatccgcctggcagtcgaagcggctgatccgacggccatcgtcacgcgcgtggtcgatggcggcccgctgtcggaccgcaagggcgtgaatgtgccggatgccgtgattcccattcccgcgcttactgagaaggatctgcgcgacttggacttcgccttgtcgctgggcgtcgattggatcgccctgtcgttcgtgcagcgcgccgaagacgtgatcgccgcgcgcgagatcattggcgaccgcgcgggcctgctctccaagatcgagaagcccgcagcgctgctgcatctggaagacatcgtgcaggcgtccgacgccctgatggtggcgcgtggtgatctgggcgtggaactgccgcccgaacgcgtgcccggcgtgcagaagcgcatcctgcgcatggcgcgccagcatggcaagccggtggtggtggccacgcagatgctggaatcgatgatcgaagcgccggtgccgacgcgtgccgaagcctccgacgtggccagcgccgtgtacgacggcaccgatgccgtgatgctgtcggccgagtcggccagcggcaagcatccggtggcggcggtcagcatcatgaaccgcatcatcgccgagaccgaacgcgacccgctctaccgcaacctgatcgacgcgcagcaccaaccgccgctgcccacgcgccaggacgcaatctgcgcggccctgcgtgacgtgacgcacatcctgggcgcagtggctaccgtcacctacacgtccagcggcaagaccagcctgcgcgccgcacgcgagcggccactggcgcccatcgtgagcatcacgccgcgcctggatacggcgcgccgtctggcgatcacgtggggtgtacacagcacggtcagccccgatgtgagcaatgtcgacgagatggtggatgcggcgtgccgagctgccgcgcgtgaaggctttgccgtgtcgggcgaccagatcgccatcacggcgggcatgccgttcggtcaggccgggtcaaccaacctgctgcgcctggcggaaatctggccgcagacgttggtcagcgcccagacgcaaaccactgcactgcagcccgaaccggcaacggtctga

SEQ ID NO: 711 - protein, 507 aa, Ralstonia pickettii 12D
MDHQGPNNNPTGNTKMRRFRNTKILATLGPASSDKDTIRALFDAGADVFRLNFSHGSHEDHRKRYDTVRAVEAETGRPIGILADMQGPKLRIGTFADGRVVLKNGDRFVLDRDPTPGDVTRVHLPHPELYAATAPGQSLLLDDGKIRLAVEAADPTAIVTRVVDGGPLSDRKGVNVPDAVIPIPALTEKDLRDLDFALSLGVDWIALSFVQRAEDVIAAREIIGDRAGLLSKIEKPAALLHLEDIVQASDALMVARGDLGVELPPERVPGVQKRILRMARQHGKPVVVATQMLESMIEAPVPTRAEASDVASAVYDGTDAVMLSAESASGKHPVAAVSIMNRIIAETERDPLYRNLIDAQHQPPLPTRQDAICAALRDVTHILGAVATVTYTSSGKTSLRAARERPLAPIVSITPRLDTARRLAITWGVHSTVSPDVSNVDEMVDAACRAAAREGFAVSGDQIAITAGMPFGQAGSTNLLRLAEIWPQTLVSAQTQTTALQPEPATV

SEQ ID NO: 712 - DNA, 1443 bp, Opitutaceae bacterium TAV2
  CDS (1)..(1443): transl_table=11
atgttcagccagcagacagacgcatccatccgacgcaccaaaatcgttttcacgctcggccccgccaccgagtccgaggaaatgctcgaaaagctcatccgcgccggtgccgacgttgcccgcctcaacatggcccacgccaaccacgaatggacccgcatgatcatccgccgcatccgcgaggtttccaagcgggttggccgcgagatcgccatcatgatggacatcaaaggaccggaaatccgcaccggcgacgtctcctctcccatcgaactcaaagccggtgaaatcttcgacttcaccatccgcccgggggccgcgcaggacagctccgaggaagtccgttccgtggacgtcaattacaaggacctcgtcaacgacatccgcgtcggcgacaccgtgctcgtggacaacggcctcattcgcctcgaagtcctcgaaaaacaaaacacccgcattcgctgtcgcgtgctcatccctggcgaactcaaatcgcgccgccacatcaacctccccggcgtgaaggtcaacctgccctcgcttaccgaaaaggacaaaaccgacctcgccgtcggcctcatcgaaggcatcgacttcgtggcgctctccttcgtgcgcgaggcggcggacatccagttgttgcgcgacgtgctccaccgctacaagtcgcgcgccggcatcatcgccaagatcgaagaccagtccgccatcgccaacctcgacgaaatcgtgcgcacgaccgatgcgctcatggtcgcgcgcggcgacctcggcatcgaatgcccgtttgaggagttgccgatcatccagcgccgcgccgtgcgcatgtgtttcgactacggcaaacccgtcatcatcgccacgcacatgctcgaatccatgatcgcctcgcccatgcccacgcgcgccgagatcaccgacgtggccaatgcggtttacgaaaaggcggactgcgtgatgctttccggcgagacgaccatcggacgctatccgttggaatgcgtgcaaatcctcgacaaaatcgcgcgccgcatcgaaagcgaaggaccgttcgagttgctcgatcccgaaacgctggaaggcgacaagatgcgcctgctccagtccgccgtgcaccttgcgcacgaccttgagggtgcggcgttgctcacgtttacgcggcgcggttacatggccgccggccttgccgcgatgcgtccggcgtgggcgccgatttatgccatgaccaattcgcccgagaccctgcgcaacctgcgcctggtgcgcggcgtggagccgttcatgctggaactcgccgccgaccccaacgagaccatcgaccaagccatcacattgctcacaaccaaggggcgcgtgaagcccggcgacaagttgatcgtcgtgacggacatcctctcgcacgagcgcctggtggacagcatccaactccgcaccatccgataa

SEQ ID NO: 713 - protein, 480 aa, Opitutaceae bacterium TAV2
MFSQQTDASIRRTKIVFTLGPATESEEMLEKLIRAGADVARLNMAHANHEWTRMIIRRIREVSKRVGREIAIMMDIKGPEIRTGDVSSPIELKAGEIFDFTIRPGAAQDSSEEVRSVDVNYKDLVNDIRVGDTVLVDNGLIRLEVLEKQNTRIRCRVLIPGELKSRRHINLPGVKVNLPSLTEKDKTDLAVGLIEGIDFVALSFVREAADIQLLRDVLHRYKSRAGIIAKIEDQSAIANLDEIVRTTDALMVARGDLGIECPFEELPIIQRRAVRMCFDYGKPVIIATHMLESMIASPMPTRAEITDVANAVYEKADCVMLSGETTIGRYPLECVQILDKIARRIESEGPFELLDPETLEGDKMRLLQSAVHLAHDLEGAALLTFTRRGYMAAGLAAMRPAWAPIYAMTNSPETLRNLRLVRGVEPFMLELAADPNETIDQAITLLTTKGRVKPGDKLIVVTDILSHERLVDSIQLRTIR

SEQ ID NO: 714 - DNA, 1458 bp, Bacteroides ovatus ATCC 8483
  CDS (1)..(1458): transl_table=11
atgttattgaaacagactaaaattgtggcttccatctcggatagacgttgcgatgtggattttataaaacagttgtttgaagctgggatgaatgtggtgcgtatgaatacagcgcacgctagccgtgaaggttttgaagctttgattgcaaatgtacgtgctgtgtccaaccgtattgcgatcttgatggatacaaaaggtccggaagttcgtacgacggctaatgcagaaccaattccatataagacaggtgataaagtaaagattgtaggtaatccggatttggagacaacccgtgaatgtattgctgtttcatacccgaactttgtgtccgatctgaatatcggtggtatgatcctgattgatgatggtgatctggaactggaagttattgataagactaacgattatttgttgtgtgaagtcaagaacgatgctactttgggaagccgtaagagcgtaaatgttccgggtgttcgcattaatcttccgtcattaacggaaaaagaccgtaacaatattctttatgctattgaaaaggatattgattttatcgctcattcttttgtacgcaatcgtcaggatgtgcttgatatacgtgaaattctggatgctcataatagtgatattaagattattgctaagattgagaatcaggaaggggtagataatattgatgaaattctggaagtggcagatggtgtaatggtggcccgtggtgacttgggtattgaagttccacaggaacgtatcccgggaatccagcgtgtattgattcgcaaatgtattttggcaaagaagccggtaatcgtggctactcagatgctccatacgatgataaataaccctcgtccgactcgtgcggaagtgactgatattgctaatgcaatctactatcgtacagatgcattgatgttgagtggggaaactgcttatggtaagtatccggtagaggcagtgagaacaatgactaagattgctgcccaggctgaaaaagataaattggaggaaaatgatatccgtattccattggatgagaatagtaatgatgttacggcattccttgctaaacaggcagtgaaggctacctctaaactaaaaatacgtgccattattactgatagctatagcggacgtactgcccgcaatctggcagctttccgtggaaagtatccggtgttggctatctgttataaagaaaagacgatgcgtcatttggctttgtcttatggtgtggaagctatctatatgccggaattagctaacggacaggagtattactttgcagcattgcgccgtttgttgaaagaaggtcgtttacagccttctgatatggttggttatttgagtagtggtaaggcgggaacgaaaacatcattcctcgaaattaatgtagtggaagatgctttgaagcatgcagaggagactgtattacctaacaataaccgctatctgtaa

SEQ ID NO: 715 - protein, 485 aa, Bacteroides ovatus ATCC 8483
MLLKQTKIVASISDRRCDVDFIKQLFEAGMNVVRMNTAHASREGFEALIANVRAVSNRIAILMDTKGPEVRTTANAEPIPYKTGDKVKIVGNPDLETTRECIAVSYPNFVSDLNIGGMILIDDGDLELEVIDKTNDYLLCEVKNDATLGSRKSVNVPGVRINLPSLTEKDRNNILYAIEKDIDFIAHSFVRNRQDVLDIREILDAHNSDIKIIAKIENQEGVDNIDEILEVADGVMVARGDLGIEVPQERIPGIQRVLIRKCILAKKPVIVATQMLHTMINNPRPTRAEVTDIANAIYYRTDALMLSGETAYGKYPVEAVRTMTKIAAQAEKDKLEENDIRIPLDENSNDVTAFLAKQAVKATSKLKIRAIITDSYSGRTARNLAAFRGKYPVLAICYKEKTMRHLALSYGVEAIYMPELANGQEYYFAALRRLLKEGRLQPSDMVGYLSSGKAGTKTSFLEINVVEDALKHAEETVLPNNNRYL

SEQ ID NO: 716 - DNA, 1476 bp, Vitis vinifera
  CDS (1)..(1476)
atggcgatggagaagaaaacggtggtggtggatgtggagaagaggcccaagacgaagatcgtgtgcacgctagggccagcgtgtagatcggtgcccatgctcgagaagctcttgagggccggaatgaacgttgccagattcaacttctcccatggctcccatgaatatcacctggaaacccttagtaacctccgcgccgccatggactccaccggtattctatgtgctgttatgctcgataccaagggtccagaaattcgaaccgggtttttgaaggatgaaaagcccatccatctgaagcaaggccaagagatcaccatatccactgactataacataaagggtgatgagaaaatgatttgcatgagctacaaaaagttggctgaagatgtaaaacctgatagtgtcatactctgtgctgatggcaccatcacattcacagtcctatcttgtgataaacaaaagggtttggtttgctgccgctgcgagaattctgctgttcttggcgagaggaagaatgttaatcttccaggggtcatcgttgatcttccaactttgacagagaaagacaaggaagatatcctaaactggggagttcccaataaaattgacatgattgctctgtcttttgtgcgcaaaggttcagatcttgttgaggttcggaagctgctggggaagcatgccaagaatatcctcctcatgtcgaaggttgaaaatcaagaaggggtggcaaattttgatgaaatccttgcaaattcagatgcatttatggtggcacgaggtgatctgggaatggaaatcccaatagaaaagatatttttagcccagaaagtgatggtctacaagtgcaacattcaaggaaagcctgttgtgactgcaacccagatgctggagtccatgatcaaatctccccggccaactcgagctgaagccactgatgttgccaatgcagttcttgatggtacagactgtgtgatgctgagtggtgaaacagctgctggagcttacccagaacttgcagttcggaccatggcaaaaatatgcatcgaagcagagagcacactcgactatggagatgtcttcaaaaggatcatgaaaaatgcccccgtacccatgagcccattggagagcctggctgcttcggcagttagaacagccaactcggcaagagcagctctcatattggtcttaaccagaggaggaagtactgcaaaactggtggctaagtacaggccgggcatgcccattttgtctgtgataaagaccgattcctttgattgcctcattttccggggtctggttccagttttaagtgctgcatctgctagggcttctcatgcagagacaacagaggaagcactggagtttgccattcaacatgccaaggcaaagggattctgcaagaaaggagattccctcgtggctctgcaccgcgttggttctgcatctgtgatcaagatcttgaccgtgaagtga

SEQ ID NO: 717 - protein, 491 aa, Vitis vinifera
MAMEKKTVVVDVEKRPKTKIVCTLGPACRSVPMLEKLLRAGMNVARFNFSHGSHEYHLETLSNLRAAMDSTGILCAVMLDTKGPEIRTGFLKDEKPIHLKQGQEITISTDYNIKGDEKMICMSYKKLAEDVKPDSVILCADGTITFTVLSCDKQKGLVCCRCENSAVLGERKNVNLPGVIVDLPTLTEKDKEDILNWGVPNKIDMIALSFVRKGSDLVEVRKLLGKHAKNILLMSKVENQEGVANFDEILANSDAFMVARGDLGMEIPIEKIFLAQKVMVYKCNIQGKPVVTATQMLESMIKSPRPTRAEATDVANAVLDGTDCVMLSGETAAGAYPELAVRTMAKICIEAESTLDYGDVFKRIMKNAPVPMSPLESLAASAVRTANSARAALILVLTRGGSTAKLVAKYRPGMPILSVIKTDSFDCLIFRGLVPVLSAASARASHAETTEEALEFAIQHAKAKGFCKKGDSLVALHRVGSASVIKILTVK

SEQ ID NO: 718 - DNA, 1428 bp, Vitis vinifera
  CDS (1)..(1428)
atggaggggggaggaggatggaaaaggcccaagacaaagatagtgtgcacgttgggaccggcgtccaggtctgttgaagtgatagagaagcttttgagggctggtatgaacgtggcgcgcttcaacttctcccatggctcccatgcctaccaccagcaaacccttgacaatctcaggactgccatggccaacaccgaaaccctttgcgccgtcatgttggatacgaagggtccagagattcgtactggatttttgaaggatgggaagcctgtccaactcaaaaagggtcaagagatcaccatctccactgactatagcatcaagggtgatgaccacatgatctgtatgagctaccaaaagctggctgaggatttgaggccacagagtgtaattctatgtgctgatggcactatcaccctcacagtcttggcctgtgacaaagaattggggttggctcgatgtcgttgtgaaaactctgcagttctgggtgagaggaagaatgtcaatcttcctggggttgttgtggaccttcccaccttaacagagaaagacaaagaggatatcttagaatggggggtacccaataagattgatatgattgctctgtcttttgttcgcaaagggtcagaccttgtggaggtccgaatgctgctggcggaacatgctaagtctatccttctcatgtcaaaggttgaaaatcaagagggtgttgctaattttgatgaaattcttgcaaactcagatgcatttatggtggccaggggtgaccttggaatggaaatccccattgagaagatatttcttgcacagaaagtgatgatatataagtgtaacattcagggaaaacctgtagtcactgcaacccagatgttggagtccatgatcaaatctccccggcctacacgtgctgaagccactgatgttgccaatgcagttcttgatggcaccgactgtgtgatgctgagtggggaaactgctgctggggcataccctgaacttgctgttcaaaccatggccaggatttgcttggaggcagagaattcacttaattatggagatgtcttcaagacaatcatggaaactgcaccaatgcccatgagccccatagagagtttggcctcctcagcagtacgggcagccaatgggtctaaagcagctttgattttggtcctgaccagaggtggaacaactgctaatctggtggctaagtaccggcccagcatgccaattttgtctgtgatcacagcagattcctttgattggtcttgcagatctgcaaaagcttctgacagtgagtcaacagaagaggctttggagttttcacttcaatatgcaaagaccaaggaaatgtgcaagcctggagactcagttgtggcattgcaccgagttggaactgcttctgtgatcaagatactaactgtcaaatga

SEQ ID NO: 719 - protein, 475 aa, Vitis vinifera
MEGGGGWKRPKTKIVCTLGPASRSVEVIEKLLRAGMNVARFNFSHGSHAYHQQTLDNLRTAMANTETLCAVMLDTKGPEIRTGFLKDGKPVQLKKGQEITISTDYSIKGDDHMICMSYQKLAEDLRPQSVILCADGTITLTVLACDKELGLARCRCENSAVLGERKNVNLPGVVVDLPTLTEKDKEDILEWGVPNKIDMIALSFVRKGSDLVEVRMLLAEHAKSILLMSKVENQEGVANFDEILANSDAFMVARGDLGMEIPIEKIFLAQKVMIYKCNIQGKPVVTATQMLESMIKSPRPTRAEATDVANAVLDGTDCVMLSGETAAGAYPELAVQTMARICLEAENSLNYGDVFKTIMETAPMPMSPIESLASSAVRAANGSKAALILVLTRGGTTANLVAKYRPSMPILSVITADSFDWSCRSAKASDSESTEEALEFSLQYAKTKEMCKPGDSVVALHRVGTASVIKILTVK

SEQ ID NO: 720 - DNA, 1482 bp, Vitis vinifera
  CDS (1)..(1482)
atggcaaacatagatatagaggggatcttgaaggagttgcccaatgatgggcgtattcccaagacgaagattgtgtgcactctggggcctgcttctcgctctgttcccatgctggagaagcttcttagggctgggatgaatgttgccaggttcaatttctcgcatggcacacatgactatcatcaggagacattggacaatctcaggattgctatgcagaacactcagatcctctgcgctgtgatgcttgataccaagggacctgagattcgaactggttttctaaaggatgcaaagcctatccaacttaaggaaggtgaggaaatcaccattagtactgattacagcatcaagggggatgagaagatgatctccatgagctacaaaaaactgcctgtggacttgaagcctggaaacaccatcctgtgtgcagatggcaccatcactctcactgtcttgtcttgtgatctgggtgctggaacggtaagatgccgttgcgagaacactgcaactctaggtgagagaaagaatgtcaatcttcctggtgtggtggtggatcttcccacactaacagagaaggacaaggaagacattctgggatggggtgttcccaacaatattgacatgattgccctttcatttgtacgcaagggctcagatcttgttaatgtccgaaaggtgctcgggtctcatgccaagcgtatacagttaatgtcaaaggtggagaaccaggagggtgttatcaactttgatgaaatactgcgtgagaccgattcatttatggttgcccgtggtgatcttggaatggagatcccagtggagaagatcttcctggcacaaaaaatgatgatatacaagtgcaatcttgtaggaaagcctgtggtcactgctactcagatgcttgaatccatgatcaagtctccccgtccaacccgtgctgaagcaacggatgtagctaatgcagttcttgatgggactgactgtgtgatgctgagtggagagagtgcagcaggagcctatccagagattgctgtgaagatcatggcccgaatctgtatcgaggcagaatcctcactggactatgcagctatcttcaaggagatgattcggtcaaccccacttccaatgagcccattggagagccttgcatcatcagctgttggaaccgccaacaaggccaaagcaaaactgattgtcgtgatgacgcgtggtgggaccacagccaagttggtggccaagtacaggccagccgtccccatcctctcagtggccccagcaaggcatagcctgatatacaggggcttgatcccgatactggcagaagggtctgcaaaggcgacagatgcggaatccacggaggtgatcctggaagctgccctgaagtcggcaacagggaaggggctctgcaagcctggagatgcagttgtggtacttcaccgcattggggttgcctctgttatcaagatctgcatagtgaaatga

SEQ ID NO: 721 - protein, 493 aa, Vitis vinifera
MANIDIEGILKELPNDGRIPKTKIVCTLGPASRSVPMLEKLLRAGMNVARFNFSHGTHDYHQETLDNLRIAMQNTQILCAVMLDTKGPEIRTGFLKDAKPIQLKEGEEITISTDYSIKGDEKMISMSYKKLPVDLKPGNTILCADGTITLTVLSCDLGAGTVRCRCENTATLGERKNVNLPGVVVDLPTLTEKDKEDILGWGVPNNIDMIALSFVRKGSDLVNVRKVLGSHAKRIQLMSKVENQEGVINFDEILRETDSFMVARGDLGMEIPVEKIFLAQKMMIYKCNLVGKPVVTATQMLESMIKSPRPTRAEATDVANAVLDGTDCVMLSGESAAGAYPEIAVKIMARICIEAESSLDYAAIFKEMIRSTPLPMSPLESLASSAVGTANKAKAKLIVVMTRGGTTAKLVAKYRPAVPILSVAPARHSLIYRGLIPILAEGSAKATDAESTEVILEAALKSATGKGLCKPGDAVVVLHRIGVASVIKICIVK

SEQ ID NO: 722 - DNA, 1578 bp, Vitis vinifera
  CDS (1)..(1578)
atgcaaggaggacatttggcgtttgaagagcctgttcgcctctcctccgttcttactccttctacgttcagctctataccattactgaccaaaattgttggaacacttggaccaaggtcgcgttcagttgaaacaattgaggcatgtctacaggcaggaatgtcagttgcacggtttgatttctcgtggctagatggggactaccaccaggagactcttgaaaatttgaggatagctgtgaaaaatgtcaagaagctatgtgctgttatgctagacacaatgggtgcagaacttcaagtttgcaatgcgactggaaacccaataaagctaaaagctgacgatcatgtgacaataactccagatgctagcaaaatcccatcagcagaggtcttacctgttaactatgatggacttgctgagtcagtaaagaaaggtgatagtatttttcttgggcaatacctctcaacgggaattgaatccacctctgtatggctcgaggttttggagaccaggggtccagatgtaatttgtcttgtaaagaatagtgccactcttgcaggctctattttccccatgcatatgtcccaagttcgtgtcaagttacccactttaacagaaatggataaacaggtcatttcaaattggggatcgcgtaacaaagttgaatttattgcactttcttacacccgacatgtagaagatgtgcgagagctcagagcattccttaaaacacaaaatcttaatgaaactcaaatatttgccaaggttgaaactctggagggtttgaaacattttgatgagattcttcaggaagcagatggtgttatcctctctcgtgggaacttaggagttgacctacccccagaaaaggttttcttgtttcagaagtctgcagtgcataggtgcaacatggccggaaaaccagccataattacaagagtggttgatagtatgactgagaatctaaggccaactcgtgccgaagcaactgatgttgccaatgctgttcttgatggggcggatggtatactattaggcccagagacactttgtggcctatacccaattgaagcgatacaaattgtggggaaaatttgtgctgaagctgaaagtgtttataatcagtcccttcatttcaagagaattgccaaacatgttggagagcccatgtctcatgcagaatctgtggcttcatcagcggtacgaactgctgtcaacgtcaatgctgcaatgattgttgcattcacatccactggaggagcacctaggttgatcgcaaaatataggccaccagtgccagtgcttgctgttgtcattcctcgtctcaaaacaaattcattgaaatggaccctcactggaacactgcaggctaggcaattgcttagtgtaagaggagttcatcccattttgagcagtcctaatgtggctacttcaggcggctccagtgaagactggggattgaaattcgcccttaaccactgtaaatccatgggatggcttaaacataatgacagggtggttgtcttccaaaaaattggtgactcatcagttgccaagattgttgagcttcaagattag

SEQ ID NO: 723 - protein, 525 aa, Vitis vinifera
MQGGHLAFEEPVRLSSVLTPSTFSSIPLLTKIVGTLGPRSRSVETIEACLQAGMSVARFDFSWLDGDYHQETLENLRIAVKNVKKLCAVMLDTMGAELQVCNATGNPIKLKADDHVTITPDASKIPSAEVLPVNYDGLAESVKKGDSIFLGQYLSTGIESTSVWLEVLETRGPDVICLVKNSATLAGSIFPMHMSQVRVKLPTLTEMDKQVISNWGSRNKVEFIALSYTRHVEDVRELRAFLKTQNLNETQIFAKVETLEGLKHFDEILQEADGVILSRGNLGVDLPPEKVFLFQKSAVHRCNMAGKPAIITRVVDSMTENLRPTRAEATDVANAVLDGADGILLGPETLCGLYPIEAIQIVGKICAEAESVYNQSLHFKRIAKHVGEPMSHAESVASSAVRTAVNVNAAMIVAFTSTGGAPRLIAKYRPPVPVLAVVIPRLKTNSLKWTLTGTLQARQLLSVRGVHPILSSPNVATSGGSSEDWGLKFALNHCKSMGWLKHNDRVVVFQKIGDSSVAKIVELQD

SEQ ID NO: 724 - DNA, 1533 bp, Vitis vinifera
  CDS (1)..(1533)
atggcgaatatagacatcgaggggatactcaaggagcttcccaacgatgggcgtattccgaagacgaagatcgtgtgcacgctgggacccgcgtctcggtcagttccgatggtggagaagcttttgagggctgggatgaatgttgccaggtttaatttctcccacgggactcatgagtatcatcaggagactttgaataatctcaggatcgctatgcaaaatactcagatcctctgtgccgtcatgctcgacactaaggggcctgaaattcgaactggtttcctaaaggatggaaaacctattcaacttaaggaaggcgaggaaatcaccattactactgactacagcatcaagggggatcaggagatgatctccatgagctacaaaaagctgcctgttgatttgaagcctggaaataccattttgtgtgcggatggcaccatcactcttactgtcttgtcttgcgatccagctgctggaacagtgagatgccgatgtgagaacactgcacttctaggagagagaaagaatgtcaatcttcctggtgttgtggtggatcttccaacactaactgagaaggataaggaagatattctggaatggggtgttcccaacaaaatcgatatgattgctctttcattcgtgcgcaagggctcggatcttgtccatgttcgtaaggtgctcggatcccatgctaagcgtatacagttaatgtcaaaggttgagaaccaagagggtgttatcaacttcgatgaaatattacgtgagactgactccttcatggttgcccgaggtgatctcggaatggagatcccagtggagaagatcttcctggcacagaaaatgatgatatacaagtgtaacctggtaggcaagccagtagttactgccactcagatgcttgaatccatgatcaaatctccccggccaactcgtgctgaagcaacggatgtagctaatgctgttcttgatgggactgattgtgtcatgctcagtggagagagtgcagctggggcttacccagagcttgcagtgaagatcatggctcgaatttgtattgaggcagaatcctcccttgactatggagctatcttcaaggagaggatcaggtcaactcctcttccaatgagcccattggagagccttgcatcctcagctgttagaaccgctaacaaggctaaggcaaagctcatcgttgtgatgactcgtggtgggactacagccaagttggttgccaagtacaggccagctgttccaatcctatctgtgattgtgccagttttaacgacagactcatttgactggatcatcagtgatgagaccccagcaaggcacagcctgatatacaggggcttgattccattactggcagaaggctctgcaaaggccactgatgcggaatccacggaggtgatcctggatgctgccctgaagtcggcaacagagagggggctgtgcaaggctggagatgcagttgtggcacttcatcgtattggatcagcgtctgttattaagatctgcttggtgaaatga

SEQ ID NO: 725 - protein, 510 aa, Vitis vinifera
MANIDIEGILKELPNDGRIPKTKIVCTLGPASRSVPMVEKLLRAGMNVARFNFSHGTHEYHQETLNNLRIAMQNTQILCAVMLDTKGPEIRTGFLKDGKPIQLKEGEEITITTDYSIKGDQEMISMSYKKLPVDLKPGNTILCADGTITLTVLSCDPAAGTVRCRCENTALLGERKNVNLPGVVVDLPTLTEKDKEDILEWGVPNKIDMIALSFVRKGSDLVHVRKVLGSHAKRIQLMSKVENQEGVINFDEILRETDSFMVARGDLGMEIPVEKIFLAQKMMIYKCNLVGKPVVTATQMLESMIKSPRPTRAEATDVANAVLDGTDCVMLSGESAAGAYPELAVKIMARICIEAESSLDYGAIFKERIRSTPLPMSPLESLASSAVRTANKAKAKLIVVMTRGGTTAKLVAKYRPAVPILSVIVPVLTTDSFDWIISDETPARHSLIYRGLIPLLAEGSAKATDAESTEVILDAALKSATERGLCKAGDAVVALHRIGSASVIKICLVK

SEQ ID NO: 726 - DNA, 1458 bp, Bacteroides uniformis ATCC 8492
  CDS (1)..(1458): transl_table=11
atgttattgaagcaaacgaagattgtcgcaacgatttctgaccagcgctgtgatgttgattttataaagcagttgttcgatgcaggtatgaatgttgtacgtatgaatactgcacatcttggccgtgaaggtgccgagaagttgataaacaatgtgcgtacggtttccaaccgcatcgctatcctgatggatacgaaaggaccggaggtccgcacgacggttctggctgagcccattcctttcaaggcgggcgaccgcgtgaaggtggtaggcaacccggagcaggagactacccgtgaatgtatctcggtatcctatccccatttcgtcaaagacttgaatgtggacggccatatccttattgatgacggtgacttggagttggttgttgtagagaagacccccgactacctgctctgcgaagtacagaatgaggctactctgggcagccgcaagagcgtcaacgttcccggcgtccgcatcaatctgccttctctgacggagaaggaccgcaccaatatcctttatgccattgagaagaacatagacttcattgcccactcctttgtgcgcaataagcaggatatactcgacatcaaggcgattcttgacgctcataacagcgatatccgtattgttgctaagattgagaaccaggaaggcgttgataatatcgatgaaatcctggaagtagccgacggtgtgatgatagctcgcggtgacctcggtattgaagttccgcaggaacgtattccgggcatccagcgtgtgctcatccgcaagtgtattcttgccaagaagccggtgattgttgccacacagatgcttcataccatgatttccaatccgcgtcccacccgtgcggaggtaacggacattgccaatgccatctattatcgtacggatgccttgatgttgagcggtgaaaccgcctatggaaagtatccggtagaagcggtgaagacgatgaccaagattgccgcccaagcggagaaagacaagctgtctgacaacgatatccgtattccgctggacgagaacagcaacgacgtgactgcgttcctggccaaacaagcggtaaaggctaccaccaaactgaaaatccgtgcaatcatcaccgacagttacagcggccgtactgcccgtaaccttgccgctttccgtggcaaatatccggtgttggccatctgctacaaggaaaagaccatgcggcaccttgccctttcctacggtgtggaagctatctatatgcccgaacttgccaacgggcaggaatattactttgcagccttgcgtcgcttgttgaaggaaggccgtttatgtcctacggacatggtgggctacctgagtagcggtaaggaaggcacacagacctctttccttgaaatcaatgtcgtagaagatgccttgaagcatgctgaagatagtgtgctgcctaacagtaacagatacttgtag

SEQ ID NO: 727 - protein, 485 aa, Bacteroides uniformis ATCC 8492
MLLKQTKIVATISDQRCDVDFIKQLFDAGMNVVRMNTAHLGREGAEKLINNVRTVSNRIAILMDTKGPEVRTTVLAEPIPFKAGDRVKVVGNPEQETTRECISVSYPHFVKDLNVDGHILIDDGDLELVVVEKTPDYLLCEVQNEATLGSRKSVNVPGVRINLPSLTEKDRTNILYAIEKNIDFIAHSFVRNKQDILDIKAILDAHNSDIRIVAKIENQEGVDNIDEILEVADGVMIARGDLGIEVPQERIPGIQRVLIRKCILAKKPVIVATQMLHTMISNPRPTRAEVTDIANAIYYRTDALMLSGETAYGKYPVEAVKTMTKIAAQAEKDKLSDNDIRIPLDENSNDVTAFLAKQAVKATTKLKIRAIITDSYSGRTARNLAAFRGKYPVLAICYKEKTMRHLALSYGVEAIYMPELANGQEYYFAALRRLLKEGRLCPTDMVGYLSSGKEGTQTSFLEINVVEDALKHAEDSVLPNSNRYL

SEQ ID NO: 728 - DNA, 1737 bp, Clostridium sp. L2-50
  CDS (1)..(1737): transl_table=11
atgcgtaaaacaaaaattatatgtacattaggaccatcaacggatgatgatgatattttaagacggcttatgatcgagggaatgaatgttgctcgatttaacttttcacatggagatcatgcacagcataaacgcaatatggaacgtattatgaaattcagaacagaactgaatcttcctgttgcaacactgcttgatacaaagggaccggaaattcgtgttaaagatttcaaaaacggaaagatcgaactgaaaccgggtcagacattcacacttacaaccgatgaggtagagggtgatgagaagatggtttcgatcacatataagaaccttgtaaatgacgtaaagccgggtaatacgatccttatcgatgacggactgatcgagatgacagtggaacaggtatcagagagtaagatagtttgtcgtgtggtaaatggcggaccggtatcaaatcacaaaggggtaaacgtaccacgcgtaaatctgtctatgccatatatcagcgaccaggatcgctcggacattatattcggtatagaaaatgattttgatttcattgctgcttcctttgtaagaactgcagatgatgtattggagatccgcaagatcttagatgagcatggatgcgataatatcaatatcatttccaaaattgagaatatgcagggagttgagaatatcgacgagatcatccgcgtgtcagatggtattatggtagcccgtggcgatatgggtgttgagattccgttagaagatgtccctgttatccagaagatgatcattaagaaagtatacaatgctgataaacaggttgtgacagcgacacagatgcttgattccatgatcaagaatccaagaccaacgagagcagaggcgacagacgttgcaaatgcgatctacgacggaacaagtgcaatcatgctttccggtgagactgcagcaggtaagtatccggtagaggcacttcataccatgatcaagattgcagagcgtgcagaagaagatattgattatacaaaacgtttttatgagagaggaaatatccagaatccggatatcaccagcgctatttctcatgcgacttgcacaactgcgatcgatcttggtgcggcggcaatcgtaactgtaaccaaatccggaaaaactgcccgcatgatctccaaatacagaccgaaatgcccgatcatcggatgttcaccggttgagaaggtctgcagacagctgaacctttcatggggtgttcagccacttctgatcgcagaggagaataatactgatgatctgtttgagcattcggtagaggcggctaagagaaaccattatattaaggatggagaaatcgttgttattactgcgggggttccgcttggcgttaccggaacaaccaacctgatcaaagtacatgtagttggacacattctggttaagggagtttctgtaaacgaaaaatctgtatgtgcccccttgtgtgtagctgattcagaggaagaattaataaaaaactacaattccggtgatattatcgttatgaaagaaaccagcaataatatcatggagcagttaaaaactgcttcagcgatcgtatgtgagaaggacggaaagaattcgcatgcagcaattgttggtttaagcagggatatcccggttattataggagcgaaaaatgcaacacagattctgaaaaccggagcaattgttacggtaaaagcaaaagacggagtagttgtttcatag

SEQ ID NO: 729 - protein, 578 aa, Clostridium sp. L2-50
MRKTKIICTLGPSTDDDDILRRLMIEGMNVARFNFSHGDHAQHKRNMERIMKFRTELNLPVATLLDTKGPEIRVKDFKNGKIELKPGQTFTLTTDEVEGDEKMVSITYKNLVNDVKPGNTILIDDGLIEMTVEQVSESKIVCRVVNGGPVSNHKGVNVPRVNLSMPYISDQDRSDIIFGIENDFDFIAASFVRTADDVLEIRKILDEHGCDNINIISKIENMQGVENIDEIIRVSDGIMVARGDMGVEIPLEDVPVIQKMIIKKVYNADKQVVTATQMLDSMIKNPRPTRAEATDVANAIYDGTSAIMLSGETAAGKYPVEALHTMIKIAERAEEDIDYTKRFYERGNIQNPDITSAISHATCTTAIDLGAAAIVTVTKSGKTARMISKYRPKCPIIGCSPVEKVCRQLNLSWGVQPLLIAEENNTDDLFEHSVEAAKRNHYIKDGEIVVITAGVPLGVTGTTNLIKVHVVGHILVKGVSVNEKSVCAPLCVADSEEELIKNYNSGDIIVMKETSNNIMEQLKTASAIVCEKDGKNSHAAIVGLSRDIPVIIGAKNATQILKTGAIVTVKAKDGVVVS

SEQ ID NO: 730 - DNA, 1770 bp, Clostridium leptum DSM 753
  CDS (1)..(1770): transl_table=11
atgaggaaaacaaagatcatctgtacccttggaccgtctaccgacgatccggaggtgctgaaacagctcatgctcaacggtatggacgtggccagagtgaacatgtcccatcaggatcacgacgcccagcgggtccgcatcggcgcggtgaaaaagctgcgggaggaattgaatcttccggtcgccttgctgctggacaccaaaggcccggaaatccgtaccggtaacttttccactcctaaggttgagctggaggaggggcagatctttacgctgaccactaacgacgtggtcggggacaataccgtctccagcgtcaccttccagggcctgccccaggatgtcaaacggggcgatagaattctcatcgacgacggcctgattgaaatggtggtggagagcaccaccgatacagacgtggtctgtacggtgatcaacggcggcacaatttcctctcataagggcatcaacgtgccgggagtcaccctgtccatgcccttcatcagcccaaaggacgaggctgatatcgctttcgccgtagaggagggctttgattttatcgccgcctcctttacccgttccgcttccgacattctagagcttcgtaccgagctgaagaaaaaccataacgataaaattaggatcatcgccaaaattgaaaatcaggatggtgtggaaaacatcgacgagatcatcaatgtggccgacggcatcatggttgccagaggcgacctgggcgtggaaattcctctggaggagattccgattatccagaaggagctgatcaaaaaagcctataacgcaggccttcaggtgatcaccgccactcagatgctggattccatgatgaagaacccccgccccaccagagccgaatccactgacgttgctaacgccatctacgacggcaccagcgccattatgctgtccggggaaacggccgccggcagctacccggtcatcgccttgcagaccatggcgcggatcgcagagcgcacggaggaggacatcgattatgtatcccgttttcagaagcgtgatgtgtatgagcgtcccaacgtgacctcggccatttcccacgctacctgtaccaccgcccacgacctgggcgccgtggccattatgggagtgtctaaatccggaaaaaccgcccggatgatctcaaaataccggccaaagtgccccatcatctgcggcaccaccgacgccatggtttggcggcagatgaacctttcctggggcgtcacccccattatgatcgaggagaaaaccaataccgacgagctgtttgagcatgtggtttccgtcgccagctctctgaacctggtaaacagcggcgacctggtggtcatcaccgctggagtcccgctgggagtttccggcactaccaacctgctgaaggttcatctggtgggggacgcgctggtttccggcatcggcgtaaacaacgcttccatctgcggtaacctgtgcgtctgcgccaccgaggaggaagccctgaaaagctttaagcccggcgatatcctggtggtgccccagaccagcaaccgcctgctggacatcctcaaggattgctccggcattatcacggagactcccggaatcaattctcacgccgccatcgtcggcctggcgctggatctgccggttctggtaggcgcggaaaacgccaccaagctgttgaaaagcggcactaccgtgaccctggactgccagcggggcattgtattctccggtaccagccaccatctccccagaccgaatcggtaa

SEQ ID NO: 731 - protein, 589 aa, Clostridium leptum DSM 753
MRKTKIICTLGPSTDDPEVLKQLMLNGMDVARVNMSHQDHDAQRVRIGAVKKLREELNLPVALLLDTKGPEIRTGNFSTPKVELEEGQIFTLTTNDVVGDNTVSSVTFQGLPQDVKRGDRILIDDGLIEMVVESTTDTDVVCTVINGGTISSHKGINVPGVTLSMPFISPKDEADIAFAVEEGFDFIAASFTRSASDILELRTELKKNHNDKIRIIAKIENQDGVENIDEIINVADGIMVARGDLGVEIPLEEIPIIQKELIKKAYNAGLQVITATQMLDSMMKNPRPTRAESTDVANAIYDGTSAIMLSGETAAGSYPVIALQTMARIAERTEEDIDYVSRFQKRDVYERPNVTSAISHATCTTAHDLGAVAIMGVSKSGKTARMISKYRPKCPIICGTTDAMVWRQMNLSWGVTPIMIEEKTNTDELFEHVVSVASSLNLVNSGDLVVITAGVPLGVSGTTNLLKVHLVGDALVSGIGVNNASICGNLCVCATEEEALKSFKPGDILVVPQTSNRLLDILKDCSGIITETPGINSHAAIVGLALDLPVLVGAENATKLLKSGTTVTLDCQRGIVFSGTSHHLPRPNR

SEQ ID NO: 732 - DNA, 1422 bp, Eubacterium dolichum DSM 3991
  CDS (1)..(1422): transl_table=11
atgttagaggttaagaaaactaaaattatttgtacgatagggcctgcttcggaatctaaagaaatgatgcataagctggtagatgctggtatgaatatcattcgtttgaatttttctcacggagatttcgaagaacatggaaaccgtattaaaaatattcgcgaagtggtagaggaaaccggaaagagcatctctatcttattggatacaaagggaccggaagttcgtttaggtgattttgcgaatggaagtgaagcttttgaagccggtgatgttgttacaatcgttcgtgaaaaggttttaggaacacatgaaaaatttcatattcaatgtccggaaattttcgatgatgtagatgtgaatggaacgattcttattgatgatggaaaatgtcgcttgactgtgcttgaaaagcgtgagggtgaattggtttgccgtgtagaaaatccacatgtgttaaagagcagaaagggctgcaatttgccgggagttaagctgacaatgccgtttatttctcctaaagacgaggcggatatccgtttcggctgccaaatgggaattgattatattgcggcatcttttacaagaagaaaagatgatgtattggcaattcgtcagatcttaaaggaagaaggcagagaagatatccagattattccgaagattgaaaaccaagaaggttttgataatttagaggaaattctagaggttgctgacggtgttatggttgcacgcggtgatttaggtgtagatgtttctttggaattggtaccgatttatcaaaagaagatcattaaggttgccaatgagcttggaaaaccggttattacggctactcacatgttggaaagtatgcaggggaatccacgtccgactcgtgcagaggcaagtgatgtggcaaatgctattcttgatggaaccgatgcgattatgttaagcggtgagtcagcagccggtgattatccggtagaagctgttcagacaatggtaaaaattgcgaaagcaatggaacctacacttccataccatgatcgtttgaagcgttctatcaaaacttgtcagcgtacaaagaatgatgcgattgcaatttccgttgctgatactgcaatggcgcttgatattgcagctattattgcatttacgcaaagtggaacaactgctcgtcgtatttccaaattccgtccggaagcaccgattgttgcggttacctttgataagaaaacacagcgttccctagcattaaattggggcgtaaatacatatttctccgaaactaaaaatgaagaaagcaccgatgtggaaatggcaagagaaattgctaagaaaatgggtgttgaggttggcaagaccattatcgtcgttgccggttatccggtaggctgtggtgctaccaacgttatgaaaattatagaggttaaataa

SEQ ID NO: 733 - protein, 473 aa, Eubacterium dolichum DSM 3991
MLEVKKTKIICTIGPASESKEMMHKLVDAGMNIIRLNFSHGDFEEHGNRIKNIREVVEETGKSISILLDTKGPEVRLGDFANGSEAFEAGDVVTIVREKVLGTHEKFHIQCPEIFDDVDVNGTILIDDGKCRLTVLEKREGELVCRVENPHVLKSRKGCNLPGVKLTMPFISPKDEADIRFGCQMGIDYIAASFTRRKDDVLAIRQILKEEGREDIQIIPKIENQEGFDNLEEILEVADGVMVARGDLGVDVSLELVPIYQKKIIKVANELGKPVITATHMLESMQGNPRPTRAEASDVANAILDGTDAIMLSGESAAGDYPVEAVQTMVKIAKAMEPTLPYHDRLKRSIKTCQRTKNDAIAISVADTAMALDIAAIIAFTQSGTTARRISKFRPEAPIVAVTFDKKTQRSLALNWGVNTYFSETKNEESTDVEMAREIAKKMGVEVGKTIIVVAGYPVGCGATNVMKIIEVK

SEQ ID NO: 734 - DNA, 1437 bp, Clostridium bolteae ATCC BAA-613
  CDS (1)..(1437): transl_table=11
atgaaaaaaaccaagattatctgtaccatgggccccaataccagcgacaaaaacattatgatggagcttgccaggaatggtatggatgtggcccgttttaacttttcacacggggactacaacgagcatcagggacgcctggagctgttaaaggaagtgcgcaaggagctggatattccggtcgcagcgctcttggataccaagggaccggagatccgtacagggcagcttaaggacggcaaaaaggtgactttgaaggaaggccagacctataccctgaccaccagggagctggtaggtgacgataccatcggctatatcaattacagcggactgaatgaggatgttgccgcgggcaaccggattctcattgacgacggactgattgagctggaagtgcgccaggtgaaggatacagacattgtctgtgaggtcatcaacggaggagagctgggagagaagaagggcgtcaatgtgcccaatgtaaagattaagcttccggccctgacagataaggacaaagaggatatccgttttggaatcaggcagggctttgacttcatcgcggcatcctttgtacgtacagctgactgtattaaggaaatcaaggccatgctggatgagcagggttccagtatgaaggttattgcaaagattgagaacgcggagggcatcgagaatctggacgccatcatcgaggcagcggacggcatcatggtagccagaggcgacatgggcgtggagataccggcagagaaggttccccacatccagaagaaaattatccgcaagtgcaacgaggcttgtaaaattgttatcacagccacccagatgctggattccatgatccgcaacccaaggccaaccagggccgaggtgacggacgttgccaatgcagtgtatgacggcacggacgcggtgatgctttccggtgagacagccatgggcaagtatcctgtggacgcccttaagatgatggtttccattgcactggagacagagatgcatctggactatgcagggtaccgccagaggaaggtgacggagcagaacatgaagaatgtttccaatgcagtgtgttttgcctctgtatcaaccgctcatgacctggatgcggatgtcatcatcgctcccagtattacaggctttaccacccagatgctctctaaatggagacctggcgccagaatcatcggcatgtcccccagcatggctacggtccgccagatgcagcttcagtggggcgtggtaccggtatggtcccgccgcgcagagtccacggacgaactgattgagaactcggtggaggagcttaagaacagaggtcttgtggaggaaggcgagctggccgtcatcacagccggagtcgtaacctacgcaagacgccatgaggcagccacccagaccaatattatgagagttattaatatcgagtag

SEQ ID NO: 735 - protein, 478 aa, Clostridium bolteae ATCC BAA-613
MKKTKIICTMGPNTSDKNIMMELARNGMDVARFNFSHGDYNEHQGRLELLKEVRKELDIPVAALLDTKGPEIRTGQLKDGKKVTLKEGQTYTLTTRELVGDDTIGYINYSGLNEDVAAGNRILIDDGLIELEVRQVKDTDIVCEVINGGELGEKKGVNVPNVKIKLPALTDKDKEDIRFGIRQGFDFIAASFVRTADCIKEIKAMLDEQGSSMKVIAKIENAEGIENLDAIIEAADGIMVARGDMGVEIPAEKVPHIQKKIIRKCNEACKIVITATQMLDSMIRNPRPTRAEVTDVANAVYDGTDAVMLSGETAMGKYPVDALKMMVSIALETEMHLDYAGYRQRKVTEQNMKNVSNAVCFASVSTAHDLDADVIIAPSITGFTTQMLSKWRPGARIIGMSPSMATVRQMQLQWGVVPVWSRRAESTDELIENSVEELKNRGLVEEGELAVITAGVVTYARRHEAATQTNIMRVINIE

SEQ ID NO: 736 - DNA, 1962 bp, Faecalibacterium prausnitzii M21/2
  CDS (1)..(1962): transl_table=11
atgcaaaaacttgtattcaagcaaaaattcctcttgctctcttgcgccggaatgattataataataggtggtagagttttgggttttcccgctctgccatataaaccgacccgctgtaccgggagcttttactcccattggtcatacacagcagcctgcagggatgctgtgccggatataggtaagagagagttgacggaggtatattgcatgagaaagacgaaaattatttgcacccttggcccttccaccgataaggaaggcgttctgcgcgagctgatcgccaacggcatgaacgtagctcgtttcaatttttcccacggttcccacgaggagcatctgggacgccttgaaaagctgaaggctctgcgcgaggagctgggcaagcccgtggccgcactgctggacaccaagggccccgagatccgcctgaaggacttcaagaacggcgttgagaatctggttgcaggccagacctttaccctgaccacccgcgatgtggagggcaccaacgagatctgctccatcacctataaggatctgcccatggacgtggagccgaacggcaccatcatgctggacgacggcctgatcaagctgcagatccagaccgtgaacgacaccgacatcgtctgcaccgtgctgaacaacggcaagatcaagaacaagaagggcgtcaacgtgcccggcgtacacctgtccatgccgtatatgagccagcgcgataaggacgatatcatcttcggcatccagcagggctatgatttcatcgccgcttcctttgtgcgcaccgcacaggacgtgtacgatatccgcaacctgctgaaccagtacgattccaacatccgcatcattgcaaagatcgagaaccgcgagggcgtgaacaacattgacagcattctggctgctgccgatgccgtgatggtggcccgtggcgatctgggcgtggagatcgacttcaccgaactgcccggcatccagaagaccatcatcgaccgctccttctccttcggcaagcccatcgtcaccgctactcagatgctggacagcatgatagtgaacccccgccccacccgcgccgagatctcggacgtggcaaacgccatctacgacggcacctctgccattatgctgtccggtgagaccgctgccggtgcctaccctgtggaggcgctcaagactatgtctgccattgccgagcgcaccgagcaggagggcttccatctgcgcggccgcacgatggattccaaccccggcaagatcagcgtatccgacgctaccgcccatgccgcctgcctgaccgcacgggatgtgaacgccgccgccatcgtgaccgtgtccgagtccggcactaccgctcgcctgctgagcaagtaccgcccgcagcagcccattattgcctgcgtcatgcgcgagcaggtgcagcgtcagctgtccctgagctggggcatcaccccgctgatgatgtctctggcgcacagcaccgatgagctgatcgagatgtccaccgctctggccaaggagaatggctacctgcacaacggcgagctggctgttgtgaccgcaggcgtgcccgtgggcgtttccggcaccaccaacatgatcaagatccacatggtgggcaactgtctggctaccggcgtgggcgtcggccccgagaacaatgatgttgccagcggcaaggcctgcgtctgccgcaccatggacgaggtgcgcgccaagttcaagcccggcatggtgctggtggttccctccaccagcaacgagatgctgagctttgtgcgcgacgctgccgctctggtggtagaggagcccggcctgaacagccacgccgccattgccggtaaggcactgctgaagcccaccgttgtgggtgccgccggtgctaccagccacatccgcgatggtctgatggtggctgtggactgcgcacacggcagtgtgcagcgcctgcagggctga

SEQ ID NO: 737 - protein, 653 aa, Faecalibacterium prausnitzii M21/2
MQKLVFKQKFLLLSCAGMIIIIGGRVLGFPALPYKPTRCTGSFYSHWSYTAACRDAVPDIGKRELTEVYCMRKTKIICTLGPSTDKEGVLRELIANGMNVARFNFSHGSHEEHLGRLEKLKALREELGKPVAALLDTKGPEIRLKDFKNGVENLVAGQTFTLTTRDVEGTNEICSITYKDLPMDVEPNGTIMLDDGLIKLQIQTVNDTDIVCTVLNNGKIKNKKGVNVPGVHLSMPYMSQRDKDDIIFGIQQGYDFIAASFVRTAQDVYDIRNLLNQYDSNIRIIAKIENREGVNNIDSILAAADAVMVARGDLGVEIDFTELPGIQKTIIDRSFSFGKPIVTATQMLDSMIVNPRPTRAEISDVANAIYDGTSAIMLSGETAAGAYPVEALKTMSAIAERTEQEGFHLRGRTMDSNPGKISVSDATAHAACLTARDVNAAAIVTVSESGTTARLLSKYRPQQPIIACVMREQVQRQLSLSWGITPLMMSLAHSTDELIEMSTALAKENGYLHNGELAVVTAGVPVGVSGTTNMIKIHMVGNCLATGVGVGPENNDVASGKACVCRTMDEVRAKFKPGMVLVVPSTSNEMLSFVRDAAALVVEEPGLNSHAAIAGKALLKPTVVGAAGATSHIRDGLMVAVDCAHGSVQRLQG

SEQ ID NO: 738 - DNA, 1752 bp, Parvimonas micra ATCC 33270
  CDS (1)..(1752): transl_table=11
atgaaaaaaacaaaaataatatgtacgattggacctgcttcagattcagtcgaaagtttaaaagaattaatgctttgtggaatgaatgtttgtagactgaatttttcacatggaagcaaagaagaacatcaagttagaattgataatataaaaaaagcaagagaagaattagatttacctatagcaataatgcttgatactaaaggtccagaaattaggcttgggaaatttagtgttgatgaagttgctttaaaagcaggagatacttatacttttacaactgaagaaattttaggaaatcaagaaatttgttccgtttcgtataaattattacctagtgatgttaaaattggaggaacaattttagtagatgacggtttggttgaaatggaagttgtttctaaaactgataaagaaataaaatgctttgtaaaaaataatggaataattaagagtaataaaggtgtaaatataccgaatgaaataataaatttaccttcaattacagaaaaggataaatcagatattttatttgcaataaagaatgatttagattttattgcagcatcttttgttagaaaacctgaagatgtatatgaaattagaaaaattttagatgaaaataattctgaaatcaaaatcatatctaaaatagaaaatcaagagggcgttgaaaatattgataaaattatagaagcttctgatggaataatggttgctagaggagacttaggagttgaaattaaagcagaatttattccaaaaatacaaaaagaaataattagaaaatgtaatttaataggaaaaccggtaataactgcaacacaaatgttagattctatgattagaaatccaagaccaacaagagcagaagttacagatgtagcaaatgcaattattgatggaagtgattgtgttatgttatccggtgaaactgctgctggaaaatatccaaaggaagcggttaaagtaatgaataatattgcaataacaacagaaaattcttttgattttcaaaatagtataaaacataaaaatagaaatgatattttaaatactatgaactcaataagtttatctacaaaagaaattgccgaaaatttaagagcaaaagcaattatttgtgctacagcttcaggaattacaccaatatcaatttcaaaatttagaccacttgttgatattattgctgttacgtattctgaaaaggttagaagaaaattacaaatattttggggagttactagcttaatttcaaaaaaatcagaacatacagatgaagtgattgaacgttctatatcagcaacattaaatgcaaattatatcagcgatggagacactgttgttttaacagcagggatacccgtcggagttgcaggcacaacgaatttgattaaggttcatacagttggaaaaattttgataaaaggacttggaattgggaaagaatcaattaccggaaaagtttgtgtaatacatcgtgaagaagatttaaaaaataaatttaaagatggagatattattgtttctaaatttacagatagagagtttgtcgaatttattgatagagcatcagggattatagttgaaacaggagggttgacttcacatgctgcaataattgcattacattttgacattccaacaattattggcgctgaaaatgcaacaaatataattaaagatggacaacttgtaacaatagatactgttggtggtttagtttatgatggagatgttaaggttctttaa

SEQ ID NO: 739 - protein, 583 aa, Parvimonas micra ATCC 33270
MKKTKIICTIGPASDSVESLKELMLCGMNVCRLNFSHGSKEEHQVRIDNIKKAREELDLPIAIMLDTKGPEIRLGKFSVDEVALKAGDTYTFTTEEILGNQEICSVSYKLLPSDVKIGGTILVDDGLVEMEVVSKTDKEIKCFVKNNGIIKSNKGVNIPNEIINLPSITEKDKSDILFAIKNDLDFIAASFVRKPEDVYEIRKILDENNSEIKIISKIENQEGVENIDKIIEASDGIMVARGDLGVEIKAEFIPKIQKEIIRKCNLIGKPVITATQMLDSMIRNPRPTRAEVTDVANAIIDGSDCVMLSGETAAGKYPKEAVKVMNNIAITTENSFDFQNSIKHKNRNDILNTMNSISLSTKEIAENLRAKAIICATASGITPISISKFRPLVDIIAVTYSEKVRRKLQIFWGVTSLISKKSEHTDEVIERSISATLNANYISDGDTVVLTAGIPVGVAGTTNLIKVHTVGKILIKGLGIGKESITGKVCVIHREEDLKNKFKDGDIIVSKFTDREFVEFIDRASGIIVETGGLTSHAAIIALHFDIPTIIGAENATNIIKDGQLVTIDTVGGLVYDGDVKVL

SEQ ID NO: 740 - DNA, 1746 bp, Coprococcus eutactus ATCC 27759
  CDS (1)..(1746): transl_table=11
atgaatttgagaaaaacaaagattatctgtacacttggaccagcaacagatgatgacgaggtgcttagaaaacttatgcttgagggaatggatgtcgccaggttcaatttttctcatggagatcatgctcagcatagaaaaaataaggacagaatagagaaacttagagatgagctgggattgcctgttgcaacgctgctcgatacaaagggacctgagatccgtgttggagattttaaggaaggcaaagttgagcttgttgagggacagacttttaccctcacaacggatgatgtccttggagatcaggcaaaggtgtccataacctacaagaatcttgtgaatgatgtaaagccgggtgacatcatacttatagatgacggacttatcaatatgaagatagagaaggtgacaggaacggagatcgtgtgccgtgttgaaaatggcggacctgtctcaaaccacaagggtgtcaacgttcctagagtcaacctcaccatgccgtacatcagcgatgtggacagagaggatataatatttggaatcaagaacgactttgactttatagctgcttcatttgtcagatctgcggatgatatcctggagataagaaagatacttgatgagtatgagtgcgacaatatcaacatcattgcaaagattgagaatatgcagggtgttgacaacatagatgagataatcagagtctcagatggtatcatggttgccagaggagatatgggcgttgagatccctcttgaggacgtgcctatcatccagaagatgatcataaagaaggtttacaatgcagataagcaggtcataactgcaactcagatgctcgactcaatgatgatacatccaagaccgacgagagctgaggctacagatgttgcaaatgctatatatgacggaaccagtgcgatcatgctctcaggagagactgccgcaggaaagtatcctgtggaggcacttcacacgatgaagaccatagcagagagagcagagatggatattgattacaacaagcgtttcttcagtcgtgatgcggttcagaacccagacataacaagcgccatatcacatgctacatgtacaacagcgatagatcttgcagcagcagctataatcaccgttacaaagtcaggtaagacggcaagaatgctttcaaagtacagaccaaagtgccctatcatcggatgtacaccggtaccaaaagttgcgcgtcagataaatctgtcatggggagtacagcctcttgttataaaggaagagaacaacactgacgatctgttcgagcattcagttgatgcggcaaagagaaacggatacgttaaggatggcgaggtggttgtaataacagccggagttcctcttggagttacaggtacgacaaacctcatcaaggtgcacgttgtaggacatatccttgtgaaaggattctcgataaatgagagatctgtcacagcaccgttatgtgtatgtgagacagaggatgatctgatcaagaattataaagatggagatatcatagttataagcgagacaagcaacaggataatggatcagctcaagacagcatcagccattgtctgtgagaagaatggtggcaactcacatgcagccatcgttggtctcagcagagatatcccagttatcctgggtgcccagaatgcaaccaagatcctgaagtcaggttccatagttacagtaaatggcgaagatggagttgtgatatccaactaa

SEQ ID NO: 741 - protein, 581 aa, Coprococcus eutactus ATCC 27759
MNLRKTKIICTLGPATDDDEVLRKLMLEGMDVARFNFSHGDHAQHRKNKDRIEKLRDELGLPVATLLDTKGPEIRVGDFKEGKVELVEGQTFTLTTDDVLGDQAKVSITYKNLVNDVKPGDIILIDDGLINMKIEKVTGTEIVCRVENGGPVSNHKGVNVPRVNLTMPYISDVDREDIIFGIKNDFDFIAASFVRSADDILEIRKILDEYECDNINIIAKIENMQGVDNIDEIIRVSDGIMVARGDMGVEIPLEDVPIIQKMIIKKVYNADKQVITATQMLDSMMIHPRPTRAEATDVANAIYDGTSAIMLSGETAAGKYPVEALHTMKTIAERAEMDIDYNKRFFSRDAVQNPDITSAISHATCTTAIDLAAAAIITVTKSGKTARMLSKYRPKCPIIGCTPVPKVARQINLSWGVQPLVIKEENNTDDLFEHSVDAAKRNGYVKDGEVVVITAGVPLGVTGTTNLIKVHVVGHILVKGFSINERSVTAPLCVCETEDDLIKNYKDGDIIVISETSNRIMDQLKTASAIVCEKNGGNSHAAIVGLSRDIPVILGAQNATKILKSGSIVTVNGEDGVVISN

SEQ ID NO: 742 - DNA, 1413 bp, Vibrio campbellii AND4
  CDS (1)..(1413): transl_table=11
atgaaaaagaccaaaatcgtttgtacgattggccctaaaactgaatctgtagaaaagctgactgaactggttaatgcaggcatgaacgtaatgcgtcttaacttctctcacggtgactacgcagagcatggcactcgtattacgaacttccgcaaagtaatggaagctacaggcaagcaacttgcgattcttctggacacgaaaggcccagagatccgcacaatcaagctagaagacggtaacgacgttgatctagtagctggtcaagaattcactttcaccactgacatctcagtggtaggtaacaaagacaaagttgcagtaacttacgctggttttgctaaagacctaaacgttggtaacacgatcctagttgacgatggcctcatcgaaatggaagtgcttgcaacttcagaaactgaagttaagtgtaaagttcttaacaacggtgctctaggtgaaaacaaaggcgttaaccttcctggcgtttctgtaaacctgccagctctatctgaaaaagataagaacgaccttaaattcggttgtgagcaaggcgttgacttcgttgctgcttctttcatccgtaaagcttctgacgtacaagaaatccgtgacattcttactgcaaatggtggcgagaacatccacattatctctaagattgaaaaccaagaaggtgttgataactttgacgagatcctagagttgtctgacggcatcatggttgctcgtggtgacttaggcgttgaaatcccagcagaggaagttatcttcgctcagaagatgatgatagagaagtgtaaccgtgcacgtaagatggttattactgcaactcaaatgcttgattctatgatcaacaacccacgtcctactcgtgcagaagcaggcgacgtggctaacgcggtaatggatggcactgacgctgtcatgctttctggtgaaactgcgaaaggtaagtacccagttgaagcagtaacgatcatggctcaaatcgcgaaccgtactgattcagcattaaaagcggagctaggctctcgtctagacagcccacgccttcgtatcactgaagcagtatgtaaaggtgcggtagatacagcagaaaagctagctgctccacttatcgttgttgcgactgaaggtggtaaatctgcgcgttcagtacgtaagtacttcccaacggcaaacattctagcactaacgactaacactaaaacggctgcacagttagtgctaacgaaaggtgtgactcctgtcgttgttgagtcaatcgaaagcactgacgcgttctacgtagcaggtaaagaacttgctctagaatctggtctcggtagcaaaggcgatatcgttgttatggtttctggtgcacttgtcgcttcaggtaccaccaacacggcttccgttcacgttctataa

SEQ ID NO: 743 - protein, 470 aa, Vibrio campbellii AND4
MKKTKIVCTIGPKTESVEKLTELVNAGMNVMRLNFSHGDYAEHGTRITNFRKVMEATGKQLAILLDTKGPEIRTIKLEDGNDVDLVAGQEFTFTTDISVVGNKDKVAVTYAGFAKDLNVGNTILVDDGLIEMEVLATSETEVKCKVLNNGALGENKGVNLPGVSVNLPALSEKDKNDLKFGCEQGVDFVAASFIRKASDVQEIRDILTANGGENIHIISKIENQEGVDNFDEILELSDGIMVARGDLGVEIPAEEVIFAQKMMIEKCNRARKMVITATQMLDSMINNPRPTRAEAGDVANAVMDGTDAVMLSGETAKGKYPVEAVTIMAQIANRTDSALKAELGSRLDSPRLRITEAVCKGAVDTAEKLAAPLIVVATEGGKSARSVRKYFPTANILALTTNTKTAAQLVLTKGVTPVVVESIESTDAFYVAGKELALESGLGSKGDIVVMVSGALVASGTTNTASVHVL

SEQ ID NO: 744 - DNA, 1758 bp, Carnobacterium sp. AT7
  CDS (1)..(1758): transl_table=11
atgaaaaaaactaaaattgtatgtacgattggtccagcaagcgaaacagttgaacaactggttcaaatgatagatgcaggtatgaacgttgcccgtttaaacttttcacatggtgactttgaagaacatggtgcacgtatcaaaaacattcgtgaagcatcaaaacgcactggtaaaatggttgctattctattagatacaaaaggtcctgaaatgcgtacacacaacatgaaagatggtcgtgttgactttgaagcaggagacgttgttcgtatctcaatgacagaagttgaaggaacaaaagaaaaattctcaatcagttaccctgaattaatcaatgatgtaaaccctggaactcacatcctattagatgatggtttagtggatcttgaagtaacagaattagaccatgcaaatggtgaaattgttgttttagttaaaaacccaggaacattgaaaaacaaaaaaggtgttaacgtaccaggcgtatctgtaaacttgccaggtatcactgataaagatgctgctgatattcgttttggtttagaaaacgatattgattacattgcagcaagtttcgtacgtcgtgctagtgacgtattagaaatcactcaaattttagaagaaaaaaatatgactcatgttcaaatcattcctaaaattgaaaaccaagaaggcgtagacaacattgacgaaatcttaaaagtttctgatggtttaatggttgctcgtggagacttaggagttgaaattcctacagaggaagttcctattgttcaaaaagctcttatcagaaaatgtaatcaagctggtaaaccagttattactgctacacaaatgcttgactcaatgcaacaaaacccacgtccaacacgcgctgaagcaagtgacgtagcgaatgctatctttgatggtacagatgctatcatgctttcaggtgaaacagctgctggggattacccaattgaagctgtacaaacaatggcacgtattgctgtacgtactgaagaagctttagtaaaccaagatgcatttgcattaaaagcatacagccaaacagatatgactgaagctattggtcaatcagtaggacatactgcacgtaacttaaatattcaaacaattgttgcagctactgaatctggacatactgcacgaatgatcgcaaaataccgtccaaaagcaaatatcgttgctgttacatttacagaacgccaaatgcgtggacttgcattaacttggggcgcttacccagttgttgctgaaaaaccagcttcaacagatgatatgttcaacttagcaactaaaattgctcaagaaactggatttgcaactgcaggagatttaattatcattactgctggtgtaccagttggagaacgtggaacaactaacttaatgaaaatccaattaattggaactaaattagctagcggccaaggtgttggatcagatgctgttattggtaaagcagttgttgcaactagtgctgaagaagcaaacaaaaatgctgtagaaggtggaattttagttgtgaaaacaacagataaagactacttaccagcaattgaaaaatcatcagctatagtagtagaacaaggcggtttaactagtcatgctgcagtcattgcaattgcaatgagcattcctgtaatcgtgaatgttgaaaatgctacaactcttattaaaaatgatgaattaatcacagttgactcacgtcgtggaatcgtctaccgtggagcaacaacagctatctaa

SEQ ID NO: 745 - protein, 585 aa, Carnobacterium sp. AT7
MKKTKIVCTIGPASETVEQLVQMIDAGMNVARLNFSHGDFEEHGARIKNIREASKRTGKMVAILLDTKGPEMRTHNMKDGRVDFEAGDVVRISMTEVEGTKEKFSISYPELINDVNPGTHILLDDGLVDLEVTELDHANGEIVVLVKNPGTLKNKKGVNVPGVSVNLPGITDKDAADIRFGLENDIDYIAASFVRRASDVLEITQILEEKNMTHVQIIPKIENQEGVDNIDEILKVSDGLMVARGDLGVEIPTEEVPIVQKALIRKCNQAGKPVITATQMLDSMQQNPRPTRAEASDVANAIFDGTDAIMLSGETAAGDYPIEAVQTMARIAVRTEEALVNQDAFALKAYSQTDMTEAIGQSVGHTARNLNIQTIVAATESGHTARMIAKYRPKANIVAVTFTERQMRGLALTWGAYPVVAEKPASTDDMFNLATKIAQETGFATAGDLIIITAGVPVGERGTTNLMKIQLIGTKLASGQGVGSDAVIGKAVVATSAEEANKNAVEGGILVVKTTDKDYLPAIEKSSAIVVEQGGLTSHAAVIAIAMSIPVIVNVENATTLIKNDELITVDSRRGIVYRGATTAI

SEQ ID NO: 746 - DNA, 1611 bp, Bacillus selenitireducens MLS10
  CDS (1)..(1611): transl_table=11
atgactattcgaaagacgaaaattgtatgtacgattggaccggcgagtgaatctccggagaaactgacccagctgattgatgcgggcatgaacgtggcgagactgaacttttcccatggtgattttgatgagcacggtgcacgcattaaatcgatccgtgaagcttctgaaaaagctggcaagagcgttgccattttactcgatacaaagggacctgaaatccgtacacaaacgcttgaaggcggcatcgcagaactcgagaaaggcaaaactgtccgagtttcgatggaagaagtggtcgggaatgctgaccgtatttctgtcacctatccagggcttgtgaacgatgttcacgtcggctcgacactcttgctcgacgatggtctgattgaactgagagtcactgccattgaagacaaagagctcgtgacggaagtggttaactccggcacattgaaaaacaaaaaaggtgtaaacgtaccgaacgtcagcgtaaacctgccggggattacggaaaaagacgccaatgatatcgtattcggtattgaacaggatgttgattttatcgctgcctccttcgttcgaagagcgtctgacgttcatgaaatccgtgaacttcttgaaaagcacggtgctgagcatattcagatcattccaaagatcgagaaccaggaaggcgtcgacaacatcgaagaaattcttgaagtgtccgacggcctgatggttgcccgtggtgacctcggtgttgaaattccggctgaagatgtgccgctcgttcaaaaagatctgatcaaaaagtgcaaccagatcggaaagcccgtcatcacggctacgcaaatgcttgacagcatgcagcgtaacccgcgtccaacccgcgctgaagcgagtgatgttgcgaacgcgatctttgacggcacagatgcgatcatgctgtccggtgagacggcggcaggggattacccttatgaatccgtgactacgatggcaaacattgccctgaaaacggaatcagctctcaaataccgtgatattctccgtaagaaatcaaaggaaatcgaaaataccgtaacggatgccatcagtcagtctgtgtcccacacagcattgaacctgcacgcatctgccattgtaactgccactcaaagcggtcatacagcacggatgatctccaagtaccgtccggaagcgccgattgtagccgttacaagcagcagtcgcgtcaaccgcgcgttggcactcgtttggggtgtgcatcctcgcacgggtcctcaggtgaactccacggacgaaatgcttcgtctgtccgttgaagaagcgcagaagaccggtcttgtgaataatggcgacctcgttgtcatcactgcaggggtgccggtcggtgaatccggaacgacgaacatgatgaaagtacagcttgtcggtgaagtggctgcacgcggccagggaattggacgccgatccaaagccggtaaagtcgtggtcgcaaagactggcgcagaagcggtgtcaaaagtgacggaaggcgatattctgatcacttcctcaacggataaagacatgatggacgcttttgagaaagcgggcgctgtcattactgaatccggcggatag

SEQ ID NO: 747 - protein, 536 aa, Bacillus selenitireducens MLS10
MTIRKTKIVCTIGPASESPEKLTQLIDAGMNVARLNFSHGDFDEHGARIKSIREASEKAGKSVAILLDTKGPEIRTQTLEGGIAELEKGKTVRVSMEEVVGNADRISVTYPGLVNDVHVGSTLLLDDGLIELRVTAIEDKELVTEVVNSGTLKNKKGVNVPNVSVNLPGITEKDANDIVFGIEQDVDFIAASFVRRASDVHEIRELLEKHGAEHIQIIPKIENQEGVDNIEEILEVSDGLMVARGDLGVEIPAEDVPLVQKDLIKKCNQIGKPVITATQMLDSMQRNPRPTRAEASDVANAIFDGTDAIMLSGETAAGDYPYESVTTMANIALKTESALKYRDILRKKSKEIENTVTDAISQSVSHTALNLHASAIVTATQSGHTARMISKYRPEAPIVAVTSSSRVNRALALVWGVHPRTGPQVNSTDEMLRLSVEEAQKTGLVNNGDLVVITAGVPVGESGTTNMMKVQLVGEVAARGQGIGRRSKAGKVVVAKTGAEAVSKVTEGDILITSSTDKDMMDAFEKAGAVITESGG

SEQ ID NO: 748 - DNA, 1584 bp, Picea sitchensis
  CDS (1)..(1584)
atgcagggagcccacttattgctcgaggagcccattcgcatggcatccattctcgagccttccaaggctaatttctttcatgcaatgacaaaaattgttggcactcttggaccaaattcacgatccgttgaggtgattgaggggtgccttaaggctgggatgtctgttgctcgttttgatttctctgggggagacaatgactatcaccaagaaactcttgaaaatctgaagatcgctgtaaaagaaattaaaaaactttgtgctatcatgctggatacagttggtccagagttgcaagtgtttaacaggagtgaggaacctattgtgcttgagattgatgcatttgtgactctgacaccagatcagagcaaagaagcatcatctgaagtcttgccaataaattatgctgggctagccaagacagtgacgaaaggggataccatttttgttggtcaatatctctttacaggaagtgagaccacttctgtctggcttgaggttgcagagattaaagatcaagatgtagtttgttgtgtcaaaaacagtgcaactcttgctggtgcattgtttacaatgcacatctctcaagttcatattgatcttccaacactaagtgatacagataagcatgttattgcaacttggggagttcgcaacaacattgactttctttctttgtcatacacacgacatgctgaagacattagacaaacccgtgcttatcttgatgagcttgggaatcttcaacagacacagatatttgctaagattgaaactatagagggtctggagcattttgacgagatcttgcaagaggcagatggtattattctttcacggggtaatttagggatagatcttccaccagagaaggtgtttttattccagaaagctgccgtccacaagtgtaacatggctggaaagcctgctgtagtcacacgtgttgttgacagtatgtcgggtaatttacgtccaacacgtgcagaagcaactgatgttgcaaatgctgttctggatggtacagatgcaattctattaggtgcagaaactttccgtggattatacccctttgagactatctcaatagtcggaaagatctgtgcagaagcagagaaagtgtacaatcaagctgtttattttaagaggactatgaaacatagcaatgaaccaatgagtcacttggaatctattgcaactactgcagtaagtgcggcaatcaacgtgaaggcttcagttattgtcgtattcacagcatctggacgaactgctaggttaatagcaaaataccgtcctactatgccagtgttatctgttgtcatcccaagattgacaacaaatcagttgagatggagctttactggtgcatttcaagcaagacagactcttattgttagaggagttttccctatgctagcagatcctcgacattcggctgaatcaattaatgcgacgaatgagtctgtattggagattgcattggatcatggtaaaacagcagggttaattaaacctcatgatcgaattgttgtatgccaaaaagtaggggactcggcggttgttaagatacttgagcttgaagattag

SEQ ID NO: 749 - protein, 527 aa, Picea sitchensis
MQGAHLLLEEPIRMASILEPSKANFFHAMTKIVGTLGPNSRSVEVIEGCLKAGMSVARFDFSGGDNDYHQETLENLKIAVKEIKKLCAIMLDTVGPELQVFNRSEEPIVLEIDAFVTLTPDQSKEASSEVLPINYAGLAKTVTKGDTIFVGQYLFTGSETTSVWLEVAEIKDQDVVCCVKNSATLAGALFTMHISQVHIDLPTLSDTDKHVIATWGVRNNIDFLSLSYTRHAEDIRQTRAYLDELGNLQQTQIFAKIETIEGLEHFDEILQEADGIILSRGNLGIDLPPEKVFLFQKAAVHKCNMAGKPAVVTRVVDSMSGNLRPTRAEATDVANAVLDGTDAILLGAETFRGLYPFETISIVGKICAEAEKVYNQAVYFKRTMKHSNEPMSHLESIATTAVSAAINVKASVIVVFTASGRTARLIAKYRPTMPVLSVVIPRLTTNQLRWSFTGAFQARQTLIVRGVFPMLADPRHSAESINATNESVLEIALDHGKTAGLIKPHDRIVVCQKVGDSAVVKILELED

SEQ ID NO: 750 - DNA, 1584 bp, Populus trichocarpa
  CDS (1)..(1584)
atgcattcaaatcacttgcttttggaggagcctataaggatggcttcaattctggagccttcaaaatctagtttctttccagcaatgacgaagattgtaggcacactaggtccaaaatctcgatctgttgaggttatttctggttgcctcaaggctgggatgtccgtggctaggtttgatttttcatggggtaaccctgagtatcaccaggggactttggagaatttgaaggctgctgtcaagaccaccaagaagctctgtgctgtcatgctcgacacggtgggacctgagttgcaggttgttaataaaagtggcaaccccatttctcttctggcagatggttttgttattctgacaccagatcaagaacaggaagcttcatctaaagttctccccatcaattttgatggactatctaaggcagtgaagcatggagacaccatttttgtcggccaatacctcttcactggaagtgaaactacttctgtatggctggaggtttctgaggtgaagggcaatgatgtggtctgtgttataaagaactcagcgactttggctggatctttattcactttgcatgcctcccaaattcgtattgaacttcctactctttcagataaagataaggaggttataagtacttggggagttcaaaacaaaattgacttcctctcattgtcgtatacccggcatgcagaagatgtacgcaatgcccgtgagtacctatctaagctgggtgatctatatcagactcaaatttttgccaagattgagaatatagagggtttaactcattttgatgagatattacaagaagctgatggtattatcctttccagaggaaatttgggcatagatctcccaccagagaaggtgttcttatttcagaaggctgccctttacaagtgcaacatggctggcaagcctgcagtggtcactcgtgttgtggatagtatgactgacaacttaagaccaactcgtgcagaagcaactgatgttgctaatgctgtgttggatggaagtgatgcgattcttcttggtgctgagactcttcgtgggctgtaccctatagaaaccatttccactgttggtaaaatctgtgctgaggcagagaaggttttcaatcaagacttgtatttcaagaaaactgtcaaatatgttggagagccaatgacccaccttgaatccattgcttcatctgcggtacgagcagccatcaaggtgaagtcatccgtcattatatgcttcacttcttcaggaagggctgcaagattgattgccaagtataggccaacaatgccagttctgtctgttgtcatccctcgacttaagacaaatcaattgaaatggagctttagtggggcctttgaggcaaggcaatcgctcattgtcagaggtctctttcctatgcttgctgatccgcgacatcctgcggaatctacaagtgctacgaatgagtccattctaaaggttgctctagatcacggaaaagcttccggagtaataaagtcgcatgacagggtagttatttgccaaaaagttggggatgcatctgtggtcaagattattgagcttgaggattaa

SEQ ID NO: 751 - protein, 527 aa, Populus trichocarpa
MHSNHLLLEEPIRMASILEPSKSSFFPAMTKIVGTLGPKSRSVEVISGCLKAGMSVARFDFSWGNPEYHQGTLENLKAAVKTTKKLCAVMLDTVGPELQVVNKSGNPISLLADGFVILTPDQEQEASSKVLPINFDGLSKAVKHGDTIFVGQYLFTGSETTSVWLEVSEVKGNDVVCVIKNSATLAGSLFTLHASQIRIELPTLSDKDKEVISTWGVQNKIDFLSLSYTRHAEDVRNAREYLSKLGDLYQTQIFAKIENIEGLTHFDEILQEADGIILSRGNLGIDLPPEKVFLFQKAALYKCNMAGKPAVVTRVVDSMTDNLRPTRAEATDVANAVLDGSDAILLGAETLRGLYPIETISTVGKICAEAEKVFNQDLYFKKTVKYVGEPMTHLESIASSAVRAAIKVKSSVIICFTSSGRAARLIAKYRPTMPVLSVVIPRLKTNQLKWSFSGAFEARQSLIVRGLFPMLADPRHPAESTSATNESILKVALDHGKASGVIKSHDRVVICQKVGDASVVKIIELED

SEQ ID NO: 752 - DNA, 1539 bp, Populus trichocarpa
  CDS (1)..(1539)
atggccaacatagacatagaaggactcctaaaggagcaccaggatgatgaagaggggcgtgtccccaggactaagatcgtttgcactctaggaccctcttctcgatccgttcccatgctggagaagcttctcagggctggcatgaacgtggctcgcttcaatttctcccatggcacccacgagtaccaccaggagaccttgaacaatctcaggattgccatgcaaaacaccaacatcctcgctgctgtcatgctcgataccaagggacctgaaattcgtaccggtttcctaaaggatggaaacccaattcaactgaaggaaggtcaggaaatcaccatcacgactgattacagcatcaagggtgacacagacatgatctccatgagctacaaaaaactgcccgtggacatcaagcctagaaataccatcttgtgtgcagatggcaccatcaccctcactgttttatcttgtgatccaaaggctggaactgtcaggtgccgttgtgagaacactgcaatgcttggtgagagaaaaaatgttaatcttcctggtgttgttgtggatcttcccacgctgactgataaggataaggaagacatcttgggatggggtgttcccaacaacattgatatgattgccctttcttttgtacgcaagggctccgatcttgttaacgtgcgtaaggttcttgggccccatgccaagcacattcagttaatgtcaaaggtggagaaccaggagggagtggttaactttgatgagatcttgcgtgagacagactccttcatggttgctcgtggtgatcttggaatggagattccagttgagaagattttcctagcacagaagatgatgatatacaagtgcaatattgtgggaaagcctgttgttactgctactcagatgcttgagtccatgatcaagtctcctcggccaacccgcgctgaggcaactgatgttgccaacgctgtccttgatggtactgattgtgttatgctcagtggcgagagcgcagctggggcctatccagagcttgcagtcaagaccatgcgccggatttgtatcgaagcagaatcttcccttgactatgctgccatcttcaaggagatgataagatcaactccacttcctatgagcccattggagagccttgcatcctcggctgtgcgtaccgccaacaaagccagagcaaagctcattgtggtgttaacacggggcgggaccacagccaaattggttgccaagtacaggccagctgttccaatcctttccgtggttgttcctgtactgacaactgactcatttgactggacctgcagtgatgagacccctgcaaggcatagtctgatatacaggggcttgattccccttttggcagaaggatctgccaaggccacagatgcagaatctaccgaggtgattttggaagctgctctaaaatcagcaacgaagagaggattgtgcaagcctggtgatgcagttgttgcacttcatcgcattggagctgcctctgttataaaaatatgtttagtgaaatga

SEQ ID NO: 753 - protein, 512 aa, Populus trichocarpa
MANIDIEGLLKEHQDDEEGRVPRTKIVCTLGPSSRSVPMLEKLLRAGMNVARFNFSHGTHEYHQETLNNLRIAMQNTNILAAVMLDTKGPEIRTGFLKDGNPIQLKEGQEITITTDYSIKGDTDMISMSYKKLPVDIKPRNTILCADGTITLTVLSCDPKAGTVRCRCENTAMLGERKNVNLPGVVVDLPTLTDKDKEDILGWGVPNNIDMIALSFVRKGSDLVNVRKVLGPHAKHIQLMSKVENQEGVVNFDEILRETDSFMVARGDLGMEIPVEKIFLAQKMMIYKCNIVGKPVVTATQMLESMIKSPRPTRAEATDVANAVLDGTDCVMLSGESAAGAYPELAVKTMRRICIEAESSLDYAAIFKEMIRSTPLPMSPLESLASSAVRTANKARAKLIVVLTRGGTTAKLVAKYRPAVPILSVVVPVLTTDSFDWTCSDETPARHSLIYRGLIPLLAEGSAKATDAESTEVILEAALKSATKRGLCKPGDAVVALHRIGAASVIKICLVK

SEQ ID NO: 754 - DNA, 1437 bp, Dorea formicigenerans ATCC 27755
  CDS (1)..(1437): transl_table=11
atgaagaaaacaaagattgtctgcacaatgggaccgaattcaaacgatgagaatatcatgagacggcttgtaaaagaaggcatggatatcgcaagatttaacttttcacatggctcacatgaagaacaaaaaggccgtatggacatgttgaagaagattcgcgaagaagagaagaaaccagtggcaatccttctggatacaaagggaccggaaatccgtacaggtgttttgaaagacggaaaaaaggtattgttaaaagaaggcgagacaatcactctgacgaatgaagaaatcgaaggagatgaaacaaaagtttctctgacatacaaaggtctggtcgatgatgtgcagatcgggaacatgattctgatcgatgatggtctgatcggacttaaagtaaaagaaaagacggagacagatattatctgtacaatcgttaatggtggtgaacttggcgagagaaagggagtcaatgtcccgaatgttccagtcagacttccggcaattacagaaaaggataaagaagacctgaaattcggtgttgagcagaaaattgactttattgcagcatcatttgtaagaaatgctgagtgtattttggaaatccgttcttacttaaataaatgcggagcaccatatattccgatcattgcaaagattgagaactcagagggaattgataatattgatgagattatccgctgtgcagacggtatcatggttgccagaggagatctcggtgtagaaatcccggcagaagaagttccatatctccagaaattgatcattcagaaatgtaatgataattacaaaccggtcattacagcaactcagatgctggattctatgatccgtaatccacgtccgacaagagcagaggttggagatgtggcaaacgcagtttacgacggaacagacgctgtcatgctttcaggtgagactgcacaggggaaatatccggttgaagcactgaagatgatggtacacattgtagaaagtacggagcagcatctggattataaggagatgctggaaaaagcaggtgcacacagaatgagaaatgcttccagtgctctggcatatgcaactgtaacaactgcaagaaatctgaaagcagcgtgtattattacaccaactgtatcaggagcaactgcaagagttgtgtccaaatttaaaccgaagacagagattatcggtatatcaccaaatgaagatacacttcgcagaatgcagatttactggggagtacgtccgtattgctctattaatgcaaattctacagatgaaatctgtagcagcgcgttagatcttgtaagagcaaaacagattgcagagactggagacactgtagtcctgacagcaggaatcccttccccgaatatttccggaaatgttgccggagtcagcaatattatgaaaatagcagtgatagattaa

SEQ ID NO: 755 - protein, 478 aa, Dorea formicigenerans ATCC 27755
MKKTKIVCTMGPNSNDENIMRRLVKEGMDIARFNFSHGSHEEQKGRMDMLKKIREEEKKPVAILLDTKGPEIRTGVLKDGKKVLLKEGETITLTNEEIEGDETKVSLTYKGLVDDVQIGNMILIDDGLIGLKVKEKTETDIICTIVNGGELGERKGVNVPNVPVRLPAITEKDKEDLKFGVEQKIDFIAASFVRNAECILEIRSYLNKCGAPYIPIIAKIENSEGIDNIDEIIRCADGIMVARGDLGVEIPAEEVPYLQKLIIQKCNDNYKPVITATQMLDSMIRNPRPTRAEVGDVANAVYDGTDAVMLSGETAQGKYPVEALKMMVHIVESTEQHLDYKEMLEKAGAHRMRNASSALAYATVTTARNLKAACIITPTVSGATARVVSKFKPKTEIIGISPNEDTLRRMQIYWGVRPYCSINANSTDEICSSALDLVRAKQIAETGDTVVLTAGIPSPNISGNVAGVSNIMKIAVID

SEQ ID NO: 756 - DNA, 1452 bp, Anaerostipes caccae DSM 14662
  CDS (1)..(1452): transl_table=11
atgaaaaggagattaactatgctgacgaaaaaaacaaaaattgtttgcacaatggggcctgcgacggatgacgacgcggtgctcaaacagctgatgctggaaggaatggatattgcgagattaaacttttctcatggtgaccatgaagaacagcttggaaggatcaagaggattaaaagattccgtgaagaactgaatattccgattgcgatcttattggatacaaaaggaccggaaatccgtaccggacttttggatacagacggagatgtggaattaaaagaaggacaggaatttgttctgaccacaagagatatcaaaggaaatgattctatcgtaggaattacatacgaagagcttcctcaggatgttgcagaaggcaacacgattctgatcgacgacgggctgatcgagctgagagtcaaagagatcaaagacggaaccgatatcgtatgtgacgtagttaacggtggatttctgggaagccgcaaaggggtcaacgtaccaaatgtgcgtgtaaatcttccttctatcacagaaaaagataagagcgacattgaattcggactggaaaacggcattgatttcatcgctgcctcatttatccgaaatgctgacgcagtaaatgagatcaaagagattgtgaaagctcacaatatggaagtaggcgtcatttctaagatcgaaaatgtagaaggtgtagaaaatatcgagtccattatccaggcttctgacggaatcatggtagcccgaggtgatttaggtgtggaaattccagcagaggaagttcctttcatgcagaaagccatcatcaaaaagtgcaacaacgcatttaaaccggtaatcactgctactcagatgctggattccatgatccgcaaccctcgtcctacgagagcagaagtaacagacgttgccaatgcgatctacgatggtaccgacgcgatcatgctttccggggagactgcaaaagggaaatatcctgtggaagcagtcaggatgatgaatcagattgctatctcaacagagctgcacctggatacgaagatcaaggatttccgttctatctatgtgagccggggaatctcagcggcagttgcttactccgcagtacagactgcccataacatcaatgcaaaatgtattctggcttccagtatgtcaggatttacggcaagaatcgtatccaagtttaagccggatgcacagatcatcggattatctccggatgaggctgtcgtgcgcaaaatgcagctttactggggcgtgcgtccgttcaaatctcacaaggcgtcatctacgagggaacttttggatgaggctacggagatcgtattgagtgcagatcttgctcaggagaatgatattctcgttctgaccggaggcggtccggcagaccaccgcggaaaaggtgtgacaaacatgctgaaagttgtaaaaatcggcgaataa

SEQ ID NO: 757 - protein, 483 aa, Anaerostipes caccae DSM 14662
MKRRLTMLTKKTKIVCTMGPATDDDAVLKQLMLEGMDIARLNFSHGDHEEQLGRIKRIKRFREELNIPIAILLDTKGPEIRTGLLDTDGDVELKEGQEFVLTTRDIKGNDSIVGITYEELPQDVAEGNTILIDDGLIELRVKEIKDGTDIVCDVVNGGFLGSRKGVNVPNVRVNLPSITEKDKSDIEFGLENGIDFIAASFIRNADAVNEIKEIVKAHNMEVGVISKIENVEGVENIESIIQASDGIMVARGDLGVEIPAEEVPFMQKAIIKKCNNAFKPVITATQMLDSMIRNPRPTRAEVTDVANAIYDGTDAIMLSGETAKGKYPVEAVRMMNQIAISTELHLDTKIKDFRSIYVSRGISAAVAYSAVQTAHNINAKCILASSMSGFTARIVSKFKPDAQIIGLSPDEAVVRKMQLYWGVRPFKSHKASSTRELLDEATEIVLSADLAQENDILVLTGGGPADHRGKGVTNMLKVVKIGE

SEQ ID NO: 758 - DNA, 1803 bp, Eubacterium siraeum DSM 15702
  CDS (1)..(1803): transl_table=11
atgaaaaatgtatggacagctttaacggaagaaaggatatttatgaaaaagacaaagatagtatgcaccttaggccctgcaacagatgatgacaacgttctgcgtgaacttataaagagcggtatggactgcgcacgtttcaatttctcacacggtacccacgaggaccacaaaaagcgttacgagcaggttgaaagaataagaaaggaactcagacttcctataccggctattcttgacacaaaaggtcccgaggtaagaataaagagcttcaaggacgataagcccgtagaacttaagacgggcagtgaatataccctcacgacagaagatgttatcggtgacgaaaagagagccgccataaactatcccaatcttgcaagcgacattgaaacaggtgttactatccttatagacgacggcctgcttgaacttaaggtaacagagattgaccgcaaggagagcggcgacgatattcgctgtaaggttatccacggcggtatgttaaagcccaacaaaagctgtaacttccccggcatacatctttcaatgccctatctcagcgagcgtgacaagagcgatctgcttttcggcataaagacaggatttgatatagttgcggcaagctttgtgacccgtgacgaagatataatacagataagaaagctgcttgacgagaacggcggcaaggatataagcataatcgcaaagattgaaaatcaggacggtgttgacaatatcgacgatattctccgtgttgcagacggtataatggtggcaagaggagatatgggcgtagagattccgtttgttgagatacccagaattcagaaagagcttatccataagggctacaacgcaggcaaacaggtaataaccgctactcagatgcttgactcgatgataaagaatccccgcccgacaagagcggaaacaacagatgttgcaaatgccatctatgacggcacaagcgcaattatgctttcgggcgaaaccgccgcaggcgcatatcctattgatgcggtaaaaacaatgaaggctatcgctgtaaagacagagcaggatatagactaccgcaagcgtttcttcacaagagaaaacgagggtgtaccgaacgttacaaacgcaatagcgcacgcaacggtaacaacctcaattgacctcggcgcaaccgctatacttactgtaacaaagggcggacgcacagcaagaacattgtcgaagttccgtcccacctgtccgataattgcggctacaacaagtgaaagagcacagcgccagcttaatctttcgtggggagttatcccgataaaatcggaagagatgagcgacagcgactcgctttttgaccacgctgtaacaagagctatggaagaaggacttttaaaggacggagatctaatagttatcaccgcaggacttccgctcggagtttccggtacaacgaatatgatgaaggtgcatattgtcggcgatgttctgcttaaaggcaagggtgcgaccgcaaaagcagttaccgcccccgtctgcgtatgcaagaacgaggaggacgcaataaagctctgccattccggcgatattcttgttatcccaaagacgagcaataatataatgtctgttctcaagagtgcggcaggaattgtagtagaggatacaaaccccgactgccatgcggctgttgtaggtcaggctcttgatattcccgtgatttacggtgcagaaaatgcctcaaacgttttaaagagcggtgtcacagttacaattgatgccgaaaaaggtctgatctgctcctccaacaactag

SEQ ID NO: 759 - protein, 600 aa, Eubacterium siraeum DSM 15702
MKNVWTALTEERIFMKKTKIVCTLGPATDDDNVLRELIKSGMDCARFNFSHGTHEDHKKRYEQVERIRKELRLPIPAILDTKGPEVRIKSFKDDKPVELKTGSEYTLTTEDVIGDEKRAAINYPNLASDIETGVTILIDDGLLELKVTEIDRKESGDDIRCKVIHGGMLKPNKSCNFPGIHLSMPYLSERDKSDLLFGIKTGFDIVAASFVTRDEDIIQIRKLLDENGGKDISIIAKIENQDGVDNIDDILRVADGIMVARGDMGVEIPFVEIPRIQKELIHKGYNAGKQVITATQMLDSMIKNPRPTRAETTDVANAIYDGTSAIMLSGETAAGAYPIDAVKTMKAIAVKTEQDIDYRKRFFTRENEGVPNVTNAIAHATVTTSIDLGATAILTVTKGGRTARTLSKFRPTCPIIAATTSERAQRQLNLSWGVIPIKSEEMSDSDSLFDHAVTRAMEEGLLKDGDLIVITAGLPLGVSGTTNMMKVHIVGDVLLKGKGATAKAVTAPVCVCKNEEDAIKLCHSGDILVIPKTSNNIMSVLKSAAGIVVEDTNPDCHAAVVGQALDIPVIYGAENASNVLKSGVTVTIDAEKGLICSSNN

SEQ ID NO: 760 - DNA, 1437 bp, Clostridium ramosum DSM 1402
  CDS (1)..(1437): transl_table=11
atggtatttgaactaaaagaaagaaaaaagaaaactcgtgtcgtttgtacaattgggcctgcaagtgaaaacgaaaaaatgttaagaaagttaattcttgctggtatgaacgttatgagattaaacttctctcatggtgatttcgaagaacatggtggaagaattgttactgtacgtaagttaagcaaagagttaaataaaaacattgctatcttattagatacaaaaggaccagaaattagaactggtgatttcgtaggtggaaaaacagaattcaaaaaaggacaaactactgttattactactgaagatattgaaggtacaagtgatcgttttacaatcacttataaagaattatataaagatgttaaacctggtggtttcattttagtaaatgatggtcaagttgaattattagttgatcatgttgaaggagaagatattgtttgtgtatgtgctaacgatggtgtagttaaaaacaaacgtggaatcaatgttccaggaattaaattaggatttgattatttatctcctaaagatacagctgatattacttttggatgcgaacaaggagtaaactttattgctgcatctttcgtaagacgggcgcaagatgttttagatgttaaaaaattattaattgaaaatggtcatcctgaaattcaaattatcgctaaaatcgaaaacagcgaaggtgttgaaaacatggacgaaatcttaaaagtagctgatggtatcatggttgctcgtggagatttaggagttgaagtacctgctgaagatgtacctttaattcaaaaacaattaattaaaaaatgtcgtgctgctggtaaagttgttattactgctactcaaatgttagatagtatgcaagaaaatccaagaccaactcgtgctgaagtaagtgacgttgctaatgctatttatgatggtactgatgcaatcatgttatctggtgagtctgctcaaggtaaatatcctgaagaagcagttatgacaatgacaaaaattgcattaaagacagaagaaactttagattatgcttcattattaagaaaagcaatcagaactgctccagaagacccttcagaagcaatttgtatgtcagtagctgagattgcttctaaatttaaggtatctgctattgttgtttatactgaaagtggatcaactgctaaacgtgtatctcgttatcgtccagaatctatggtaattgcagctacaccttatgaaccagttactcgttcattagccttaaactggggtgtaaaaggtgttgtatgtcaacctatgcatgatcgtgcagctcaattagaatatgctcaagttcttgctaaagaaaatggtgttgaaccaggggaacaaattttaattactgctggaacaccaggtgttggtggaactactagctatttagaattagttactgtaaaataa

SEQ ID NO: 761 - protein, 478 aa, Clostridium ramosum DSM 1402
MVFELKERKKKTRVVCTIGPASENEKMLRKLILAGMNVMRLNFSHGDFEEHGGRIVTVRKLSKELNKNIAILLDTKGPEIRTGDFVGGKTEFKKGQTTVITTEDIEGTSDRFTITYKELYKDVKPGGFILVNDGQVELLVDHVEGEDIVCVCANDGVVKNKRGINVPGIKLGFDYLSPKDTADITFGCEQGVNFIAASFVRRAQDVLDVKKLLIENGHPEIQIIAKIENSEGVENMDEILKVADGIMVARGDLGVEVPAEDVPLIQKQLIKKCRAAGKVVITATQMLDSMQENPRPTRAEVSDVANAIYDGTDAIMLSGESAQGKYPEEAVMTMTKIALKTEETLDYASLLRKAIRTAPEDPSEAICMSVAEIASKFKVSAIVVYTESGSTAKRVSRYRPESMVIAATPYEPVTRSLALNWGVKGVVCQPMHDRAAQLEYAQVLAKENGVEPGEQILITAGTPGVGGTTSYLELVTVK

SEQ ID NO: 762 - DNA, 1431 bp, Clostridium ramosum DSM 1402
  CDS (1)..(1431): transl_table=11
atgctaaaaaacgaagtaatgagtaaaacaaaaattgtatgtacgataggaccagcatcagataacaaagagatgttaactaaattagttaaagctggaatgaatgtaatgagacttaatttttctcatggaactcatcctgagcatcaggcaaaaattgatttgattactgaaatcaataaggagttggatacaagcgttgctattttattagatactaaagggccggaaattagaacaggtgattttatcgatggttcaactgaatttaaaaaaggtcaggttgtcacaatttgtcaagaagatattgtcggaacaagtgatcgttttacaatcacttataaagaattatataaggatgtaaaacctggtgggtttattttggtaaatgacggtcaagtggaattgctagttgatcatgttgaaggtacagacattgtatgtgtttgtgctaataacggaattgtaaaaaataaaaggggaatcaatgtaccgggaattaaattaggtttcgattatctatcaccaaaagatattgatgatttaacttatggatgtacacaaccattcaattatgtggctgcttcttttgtaagacgtgcacaagatgtatttgatgtaaaaaaacttttggttgaaaatggtcgacctgatattcaaatcattgctaagattgaaaatagcgaaggtgttgaaaacatagatgagattctaaaaatagctgatgggattatggttgcccgtggtgatttaggagttgaagtacctgcagaggatgtcccattgattcaaaaggaagtcattacgaaatgtaaggatatgggaaaattagttattactgctactcaaatgcttgaaagtatgcagcaaaatcctcgcccgactcgtgcagaagtaagtgatgttgccaatgctatttttgatggaacagatgcaatcatgctatctggggaatctgcatcaggcctatatccacaagaagcagtaatgacaatgagtaagattgctttaaaaacagaaaatagcttagattatgatgcattacatcgtcaagctgtaagaactgctccacaagatacatctgaagctatttgtatgtcagttgcagaaattgcctctaaattccaagttgcagcgattattgcttttactgaaagtggatttactgctcgaaaaatgtctcgttatcgtcctgaagctcggatcattgctgctacacctgaagtagcaactactagagcccttgcaattaactggggagtaaaaccagtaaaatgcaaaacaatgaaaacacgttcaagtatgatggattatgctgaaatcattgcaaaagaaaatggtgttgaatcgggagaacttattttagttactggtggtaaaccaggacttaaaggggatactagctatttagagttagttcgtgttaaataa

SEQ ID NO: 763 - protein, 476 aa, Clostridium ramosum DSM 1402
MLKNEVMSKTKIVCTIGPASDNKEMLTKLVKAGMNVMRLNFSHGTHPEHQAKIDLITEINKELDTSVAILLDTKGPEIRTGDFIDGSTEFKKGQVVTICQEDIVGTSDRFTITYKELYKDVKPGGFILVNDGQVELLVDHVEGTDIVCVCANNGIVKNKRGINVPGIKLGFDYLSPKDIDDLTYGCTQPFNYVAASFVRRAQDVFDVKKLLVENGRPDIQIIAKIENSEGVENIDEILKIADGIMVARGDLGVEVPAEDVPLIQKEVITKCKDMGKLVITATQMLESMQQNPRPTRAEVSDVANAIFDGTDAIMLSGESASGLYPQEAVMTMSKIALKTENSLDYDALHRQAVRTAPQDTSEAICMSVAEIASKFQVAAIIAFTESGFTARKMSRYRPEARIIAATPEVATTRALAINWGVKPVKCKTMKTRSSMMDYAEIIAKENGVESGELILVTGGKPGLKGDTSYLELVRVK

SEQ ID NO: 764 - DNA, 1437 bp, Clostridium scindens ATCC 35704
  CDS (1)..(1437): transl_table=11
atgaagaaaacgaagattatatgtaccatgggaccaaataccaacgatgcaggactgatgcgggcgctggtccagaatggaatggatatcgcaagatttaatttttctcacggagatcacgaggagcagaaagaccgaatggatatgctaaagaagatccgggaagaagaaaacaagccggtggcgatccttctggataccaaggggccggagatccgtacagggatattaaaagatgggaagaagatcaacttgcaggccggtaacctctttacattatcgacagaggatattgttggcgacgagagcaaagtgtctattacttacgcgggtctggttgaggacgtgcaggttggaagcacgattcttgtggacgatggtctgattggcctgaaagtaaaggaaaagaaagccaaggagatcgtctgtaccgtaatcaatggaggagaactcggagagcgcaaaggcgtcaatgtgcccaatgtaccggtgcgcctgcctgccattaccgataaggacagagaggatatccgcttcggcgtagagcaggagattgactttatcgcggcttcctttgtccgcaatgcagagtgcatcctggagatcaaggcattccttcgggagtgcggcgcgccatatattccaattatcgctaagatcgagaatgcggaagggattaagaacatcgatgagatcatccgctgcgcggacggaatcatggtggcccgcggggacctgggcgtagagatcccggcggaggaagtgccctatctgcagaagatgatgatccagaaatgtaatgacaattataagccggtcatcacggcaacccagatgctggattccatgatccgcaatccacgtcctaccagggcggaagttaccgacgttgccaacgccgtatacgacggtacggacgcggtgatgctgtccggcgagacagcccagggcaaatatccggtggaagcgcttcagatgatggtgcatatcgtagagaataccgaggagcatctggactatgaaacacttctcaaaaaagcggaagaacaccggatgaagagcacgtcaagcgctttgggacatgcaacggttaccacggccaataaccttggcgcaaaatgcattattacgccatccgtatccggcgcgacggcaagagtggtatcaaagttcaagccgaggaccgagatcatcggcgtgacgccaaatgaggcgactttaagaagaatgcagatctattggggcgtaagaccattaaaatccatagaattcagcacaacggaggatatctgcaatggagccatcgaactgatatgtgccaagcagatcgcggagtccggggatattatcgtgctgacggcaggaatcccttccccgaacgtacaggctcaaaagaccagcgtcagcaatattatgcggattgcggtagtggattaa

SEQ ID NO: 765 - protein, 478 aa, Clostridium scindens ATCC 35704
MKKTKIICTMGPNTNDAGLMRALVQNGMDIARFNFSHGDHEEQKDRMDMLKKIREEENKPVAILLDTKGPEIRTGILKDGKKINLQAGNLFTLSTEDIVGDESKVSITYAGLVEDVQVGSTILVDDGLIGLKVKEKKAKEIVCTVINGGELGERKGVNVPNVPVRLPAITDKDREDIRFGVEQEIDFIAASFVRNAECILEIKAFLRECGAPYIPIIAKIENAEGIKNIDEIIRCADGIMVARGDLGVEIPAEEVPYLQKMMIQKCNDNYKPVITATQMLDSMIRNPRPTRAEVTDVANAVYDGTDAVMLSGETAQGKYPVEALQMMVHIVENTEEHLDYETLLKKAEEHRMKSTSSALGHATVTTANNLGAKCIITPSVSGATARVVSKFKPRTEIIGVTPNEATLRRMQIYWGVRPLKSIEFSTTEDICNGAIELICAKQIAESGDIIVLTAGIPSPNVQAQKTSVSNIMRIAVVD

SEQ ID NO: 766 - DNA, 1422 bp, Clostridium scindens ATCC 35704
  CDS (1)..(1422): transl_table=11
atgagaaagacgaagattgtctgcacgctgggaccggccacggatgaggggaacgtgctggagcagctgattcaggaagggatggatgttgccaggtttaatttttcgcatggcacgcatgaggagcagaaggcgcggctggaccggttaaaggaattgagaacgaagtatgacaggcccatcgcggcgatgctggatactaagggaccggagattcggattggctgttttaaagagggagaggcggttcttgaagaaggacagatatttacgctggtatcccggaatgtggaaggaaccagggactatgtctcaattacttacaaggaactttataaggatgtgagcccgggagataccatattgatcgatgacgggctgatcgagatggaagtgaaggaaatctcaggggaggacatcgcgtgcctggtgaggaatggaggaaggctgtctgatcagaagggagtcaatataccggggactgagttgaacatggagtttctcagcaaaaaggaccgggcggatctgctgtttggaattcaggaggactttgactttgtagccgcctcatttacccgcactgctgaagacatccgcgagatgcgcctgcttctggatgagaatggcggcagggacatcaatattattgcgaagatcgagaaccagcaaggggtggaccacattgatgagattatagaggcggcggacggcatcatgatcgcccgaggcgatatgggcgtggagatcccgctggagcgtgttccggtcatccagcagacgatcatcagaaaggtatactgtgctggaaagcaggtgataacggcaacccagatgctggattctatgatggagcatccgagacccacccgggcggagacctccgatatcgcgaatgcaatatatcaggggaccagcgccatcatgctgtccggggagacggcagcaggaaagtatccggtcagggcgcttcagaccatggtaagggtggcatcttatatggagcagaatatcaattacaatgagatatttaagaagcgggaccgggcggaagacccggatattaccaatgcgatctcccatgccacctgcatgaccgcaatggatctgaaagccaatatcattctggcagccagcgaaaccggatttacggcccgcatgatctccaagtaccgtccgggctgcatgatcggggggtgctccagttcccggaaggtatgccgccagctcaatatgtcctggggaatctatcccctctataccaaggaggaatacagttcggagattctgtgcctgcgggcaatggaggcggcaaaacgccacgggctcgtagaagatggggataagatcgtatttacaggcggagtgccgcttggaattccgggaaagacgaatctgatccgggtctgcatcgtgggagagtag

SEQ ID NO: 767 - protein, 473 aa, Clostridium scindens ATCC 35704
MRKTKIVCTLGPATDEGNVLEQLIQEGMDVARFNFSHGTHEEQKARLDRLKELRTKYDRPIAAMLDTKGPEIRIGCFKEGEAVLEEGQIFTLVSRNVEGTRDYVSITYKELYKDVSPGDTILIDDGLIEMEVKEISGEDIACLVRNGGRLSDQKGVNIPGTELNMEFLSKKDRADLLFGIQEDFDFVAASFTRTAEDIREMRLLLDENGGRDINIIAKIENQQGVDHIDEIIEAADGIMIARGDMGVEIPLERVPVIQQTIIRKVYCAGKQVITATQMLDSMMEHPRPTRAETSDIANAIYQGTSAIMLSGETAAGKYPVRALQTMVRVASYMEQNINYNEIFKKRDRAEDPDITNAISHATCMTAMDLKANIILAASETGFTARMISKYRPGCMIGGCSSSRKVCRQLNMSWGIYPLYTKEEYSSEILCLRAMEAAKRHGLVEDGDKIVFTGGVPLGIPGKTNLIRVCIVGE

SEQ ID NO: 768 - DNA, 1443 bp, Clostridium sp. SS2/1
  CDS (1)..(1443): transl_table=11
atgctaaccaagaagacaaaaatcatttgtacaatgggacctgcaacagacgacgatgaggtattaaaagacctgatgcgttcaggaatggacattgcccgtttaaacttctctcatggagatcatgaagagcagttaggacgtatcaagagaattaagaagttcagagaagaactgaatttaccaatcgctattttacttgatacaaaaggaccagagatccgtacaggattattagaaacagatgatgatgttgaattagtaacaggtcaggaatatacactgacaacaagagacatcaaaggaaataatgaaattaccagcattacatatgcggaacttccacaggatgtagaagctggaaacacaatcctgatcgatgacggattaattgagttaaaagttaaagagatcaaagatggaacagatatcgtatgtgacgttatcaacggaggacttttaggaagccgtaagggtgttaacgtacctaacgtaagagttaacttaccatctatcacagaaaaagataaagcagatatcgaattcggtcttgagaatggaatcgacttcatcgcagcatcattcatccgtaatgcagaagctgtagaagagatcaaagatatcatcggtgcacataacatgcatgttggtgtaatctctaagatcgagaacatggaaggtgttgaaaacattgatgcgatcatcgatgcatctgctggtatcatggttgctcgtggtgaccttggtgttgaagtacctgctgaagaagtacctttcttacagaaagagatcattagaaaatgtaacgatgcattcaaaccagttgttacagctacacagatgttagattctatgatccgtaacccacgtccaacaagagctgaggctacagacgtggcaaatgcgatctatgatggaacagatgcgatcatgttatctggagaaacagcaaaaggtaaatatccagtagaagctgttaagatgatgaatcagatcgcaatctcaacagaagttcacttaagcacaaagatcaaagattacagatctaaatatatcaatcgtggaatttcagcagcagttgcttattctgcagtacagacagcacacaatgtaaatgcaaaatgtatcttagcatcaagtatgtcaggattcacaacaagaatcgtatctaaattcaaaccagatgcacagatcatcggtctgtcaccagatgatgcgatcgtacgtcagatgcagatctattggggagtacgtcctttcaaatctcacaaagctgagacaacaaaagatctgttagatgaagcaacagatatcgtattagatgcaggacttgctgagaaagatgacatcttagtcttaacaggtggtggaccagctaaccatcgtggaaaaggtgttacaaacatgctgaaagttgtaaaaatcggcgaatttggcgagtaa

SEQ ID NO: 769 - protein, 480 aa, Clostridium sp. SS2/1
MLTKKTKIICTMGPATDDDEVLKDLMRSGMDIARLNFSHGDHEEQLGRIKRIKKFREELNLPIAILLDTKGPEIRTGLLETDDDVELVTGQEYTLTTRDIKGNNEITSITYAELPQDVEAGNTILIDDGLIELKVKEIKDGTDIVCDVINGGLLGSRKGVNVPNVRVNLPSITEKDKADIEFGLENGIDFIAASFIRNAEAVEEIKDIIGAHNMHVGVISKIENMEGVENIDAIIDASAGIMVARGDLGVEVPAEEVPFLQKEIIRKCNDAFKPVVTATQMLDSMIRNPRPTRAEATDVANAIYDGTDAIMLSGETAKGKYPVEAVKMMNQIAISTEVHLSTKIKDYRSKYINRGISAAVAYSAVQTAHNVNAKCILASSMSGFTTRIVSKFKPDAQIIGLSPDDAIVRQMQIYWGVRPFKSHKAETTKDLLDEATDIVLDAGLAEKDDILVLTGGGPANHRGKGVTNMLKVVKIGEFGE

SEQ ID NO: 770 - DNA, 1773 bp, Anaerotruncus colihominis DSM 17241
  CDS (1)..(1773): transl_table=11
atgagaaaaacaaaaattgtctgtacgctcggccctgcttccgacagcgaggaacgcatcgcgcagcttatcagcgcgggcatgaacgtggcgcgcttcaatttttcgcacggcacgcatgaaagccatcgcgccacctttgaacgcatctgccggctgcgcgatcagatgggcgtccccgtggccacgctgctcgatacgaaggggcctgagatcaggctcggtctttttaagggcggaaaagcgcagcttgacgcgggaagccgcttcacgctgtgcactggggagtgcgagggcgattcttcacatgcgtcgatcaccttcccggggctggccgcggatgttaaggcgggcagtacgattctgctcaacgacggcgcgattgagctgcgcgtcgcgggggtgcgcgagggcgccatcgaatgcgatgttgtcaacggcggcgttatctccgatcataagggcgtcaacgttcccggaatccatctgtcaatgccatatgtcagcgagcgcgaccgcgcggatatcatgttcggcgccgagatgggattcgattttatcgcggcttcgtttgtgcgctgcgccgatgatatcctccagatccgtcagatcctggagcgtcagggcaatgaaaaaatccgcatcattgcaaagatcgaaaacgccgagggcgttggcaacatcgacgacatcctgcgcgtcagcgacggcattatggtcgcgcgcggcgatatgggcgtcgaggttccgtttgaggaggtccccatccttcaaaagatgctgatctccaagtgctataacacaggtaagatggtcatcacagcgacgcagatgctggagagcatgattcataacccccgccccaccagagccgaggcggccgacgtggccaatgcgatctatgacgggacaagcgcgattatgctttcaggggaaacagccgccggcgattatccgatcgaggctgtttccacaatggcgcagatcgccgagcgcaccgagcgcgacatcaactatcaaaagcggtttttcgcccgctcgggcgagcgcgtgcccgatatcacaaacgcgatttcacacgcgacctgtacaacggcttatgatttgggcgcggcggcgatcattacagtcacctggtccgggacgacggcccgtatgctctccaagttcaggccggatatcccgattattgcctgcacgcatatgccgcacacatatcaccagctcgcgctgtcatggggcgtcacgccgctgttggctgacgttaagcagagcacggacgatctgttcgctcatgcggtggaacgcgcccaggccgccggttttgtgcgcgacggcgatattgtcgtaatcacggcgggcgtcccgctgggaattaacggcacgaccaatctgctgaaggtacatgttgtgggcgacatccttgtaagcgggcagggcgtcaacgggcgctgcgcgttcggcagactgtgcgtcgcgcgcaccggcgaggaggcgcttgcgtcttttaatgacggagatatcctggtggtgccgcagacttcaaacgagctgttgcccatcatgaaaaaagcatccggcatcgtaactgaacgcggcgggcttaattcgcacgcggcaatcgtcggcatggcgcttgatatcccggtgattgtgtttgcggaaaatgcgacctcgatcctcaaatcgtctacggtcgttgaaatcgacgcggccgccggtaccgtcagcaaccgcacacgtacggagcgggacggacagaaaaagggataa

SEQ ID NO: 771 - protein, 590 aa, Anaerotruncus colihominis DSM 17241
MRKTKIVCTLGPASDSEERIAQLISAGMNVARFNFSHGTHESHRATFERICRLRDQMGVPVATLLDTKGPEIRLGLFKGGKAQLDAGSRFTLCTGECEGDSSHASITFPGLAADVKAGSTILLNDGAIELRVAGVREGAIECDVVNGGVISDHKGVNVPGIHLSMPYVSERDRADIMFGAEMGFDFIAASFVRCADDILQIRQILERQGNEKIRIIAKIENAEGVGNIDDILRVSDGIMVARGDMGVEVPFEEVPILQKMLISKCYNTGKMVITATQMLESMIHNPRPTRAEAADVANAIYDGTSAIMLSGETAAGDYPIEAVSTMAQIAERTERDINYQKRFFARSGERVPDITNAISHATCTTAYDLGAAAIITVTWSGTTARMLSKFRPDIPIIACTHMPHTYHQLALSWGVTPLLADVKQSTDDLFAHAVERAQAAGFVRDGDIVVITAGVPLGINGTTNLLKVHVVGDILVSGQGVNGRCAFGRLCVARTGEEALASFNDGDILVVPQTSNELLPIMKKASGIVTERGGLNSHAAIVGMALDIPVIVFAENATSILKSSTVVEIDAAAGTVSNRTRTERDGQKKG

SEQ ID NO: 772 - DNA, 1425 bp, Clostridium perfringens E str. JGS1987
  CDS (1)..(1425): transl_table=11
atgcaaaaaacaaaaatgatatttacaattggtcctgcaagtgattcagaagaaattctaagagagttcataagaattggtatgaatgcagctagattaaacttctcacatggagaccatgcaagtcataaagaaaagatagaacttattaagagacttagaaaagaagaaaaatcagctacagctatcttattagacattaagggtcctaaaataagaacacataattttaaaaatggcgaagctgaattaaaaaatggtgatgaattcacattctcttgcggagatgaaatattaggtgataacactaaatgttcaatctcttataaagaactatatgaagacataaaacctggtggatcaatacttgttgatgatggacttttagaatttaaagtaaaggaagtccgtggaactgatataatatgtgaagttattgaaggaggtactataaaagaccataaaggtgtaaatgtacctaatgtaccaatcaaactccctgcagtaactgaaaaggatagatctgacttaatatttggttgcgaaatggaagtagactttgtagcagcttctttcataagaaaacctgaggatgtacttgaagttagagaaattctagactctcatggtggaaaagatataaaaataatatcaaaaatagaaagccaagaaggtgtagataacataaaagaaataattaaggttactgatggtgtaatggttgctagaggtgatatgggagtagaaattcctatagaaaatgtacctataattcaaaaaaatataattaagaaatgtaatcaagcagggaaaatagttataacggcaactcaaatgttagattctatgataagaaatccaagacctactagagctgaagcttctgacgtatgtaatgccatatttgatggtacagatgccataatgcttagtggagaaagtgcttctggtagcttccctatagaggcagcaatgacaatgtctagaatagcaaaaaaagcagaagctaacttagactataattatcttttaagaagattaaaggatccaaacccaaatccagatgcctttgcagatgccataagttattcagcatcaaaaacagctagtaaattccctacaaaagctatagtagcagccactcagactggttcaactgctaagatattatcaaaatataaacctagctgtccaataatagctattactccatatgaaaaagttagaagaagcctagctttaaactttggaataatttctaagaaatgcgcttattttaatagtacagatgaaattatagaagaagctagaaaagtagctaaagaatttgaaatagctgaaactggagataatataatggtagctgctggattcccaacatcaataactggtggaacaaacatgctaaaaattgaaaaaatataa

SEQ ID NO: 773 - protein, 474 aa, Clostridium perfringens E str. JGS1987
MQKTKMIFTIGPASDSEEILREFIRIGMNAARLNFSHGDHASHKEKIELIKRLRKEEKSATAILLDIKGPKIRTHNFKNGEAELKNGDEFTFSCGDEILGDNTKCSISYKELYEDIKPGGSILVDDGLLEFKVKEVRGTDIICEVIEGGTIKDHKGVNVPNVPIKLPAVTEKDRSDLIFGCEMEVDFVAASFIRKPEDVLEVREILDSHGGKDIKIISKIESQEGVDNIKEIIKVTDGVMVARGDMGVEIPIENVPIIQKNIIKKCNQAGKIVITATQMLDSMIRNPRPTRAEASDVCNAIFDGTDAIMLSGESASGSFPIEAAMTMSRIAKKAEANLDYNYLLRRLKDPNPNPDAFADAISYSASKTASKFPTKAIVAATQTGSTAKILSKYKPSCPIIAITPYEKVRRSLALNFGIISKKCAYFNSTDEIIEEARKVAKEFEIAETGDNIMVAAGFPTSITGGTNMLKIEKI

SEQ ID NO: 774 - DNA, 1437 bp, Clostridium spiroforme DSM 1552
  CDS (1)..(1437): transl_table=11
atggcatttgaattgaaagagagaaaaaagaaaacacgtgttgtttgtactattggacctgcaagtgaagatgaaaaaatgttaagaaaattaattcttgcaggaatgaatgtgatgagacttaatttttctcatggtgattttgaagaacatggtggaagaattaaaacagttcgtaaattaagcaaggaattaaataagaatattgcaattttattggatactaaaggacctgaaattagaacaggtgattttgttggtggtaagacagaatttaaaaaaggacaagttgttaccatttgtcaagaagatattgaaggaacaagtgatcgttttactattacatataaagaattatataaagatgttaaacctggtggatttattttagtaaatgatgggcaagttgaattgttagttgatcatgttgaaggaacagatattgtttgtgtatgcgcaaatgatggaattgttaaaaacaaaagaggtattaatgtaccaggtgttaaattaggttttgattacttatcaccaaaagatacagctgatattacttttggttgtgaacaaggtgttaatttcattgcagcatcttttgtaagacgtgctcaagacgttttagatgttaaaaaattattaattgaaaatggacatccagaaatccaaatcatcgccaaaattgaaaacaatgaaggtgttgataacatggatgaaattttaaaagtggctgatggtatcatggttgctcgtggtgatttaggagttgaagtgcctgcagaagatgtacctttaattcaaaagaaattaattaaaaaatgtcgtgctgctggaaaggtagttattactgctacacaaatgttagatagtatgcaagaaaatccaagaccaacacgtgctgaagtaagtgacgttgctaacgctatttacgatggtactgatgcaattatgttatctggtgaatcagctcaaggtaaatatccagaagaatcagttatgacaatgactaaaattgcattaaaaactgaagaaactttggattatgcttctttattaagaaaagcaattagaactgcaccagaagatccttctgaagcaatctgtatgtctgttgctgaaattgcatcaaaattcaaagtgtctgctattgttgtatatacagaaagtggttcaactgctaagcgtgtatcacgttatcgtccggaatctatgatcattgctgctactccttatgaaccagtaactcgttcattagcacttaactggggagtaaaaggtgttgtttgtaaacgaatgaatgatcgtgcttctcaattagaatatgcacaaattttagcaaaagaaaatggtgttgaaccaggtgaacaaattttaattacagctggtacaccaggtgttgggggaactactagttatttagaattagttactgtaaaataa

SEQ ID NO: 775 - protein, 478 aa, Clostridium spiroforme DSM 1552
MAFELKERKKKTRVVCTIGPASEDEKMLRKLILAGMNVMRLNFSHGDFEEHGGRIKTVRKLSKELNKNIAILLDTKGPEIRTGDFVGGKTEFKKGQVVTICQEDIEGTSDRFTITYKELYKDVKPGGFILVNDGQVELLVDHVEGTDIVCVCANDGIVKNKRGINVPGVKLGFDYLSPKDTADITFGCEQGVNFIAASFVRRAQDVLDVKKLLIENGHPEIQIIAKIENNEGVDNMDEILKVADGIMVARGDLGVEVPAEDVPLIQKKLIKKCRAAGKVVITATQMLDSMQENPRPTRAEVSDVANAIYDGTDAIMLSGESAQGKYPEESVMTMTKIALKTEETLDYASLLRKAIRTAPEDPSEAICMSVAEIASKFKVSAIVVYTESGSTAKRVSRYRPESMIIAATPYEPVTRSLALNWGVKGVVCKRMNDRASQLEYAQILAKENGVEPGEQILITAGTPGVGGTTSYLELVTVK

SEQ ID NO: 776 - DNA, 1431 bp, Clostridium spiroforme DSM 1552
  CDS (1)..(1431): transl_table=11
atgttaaaaaatgaaaaaatgagtaaaactaaaattatatgtacaattggaccagcatctgaaagtaaagaaatgatgactaaattggtgaaagctggaatgaatgtaatgagacttaatttttctcacggaagtcatgaagaacatttaaatagaattaaattgattactgaaattaataaggaattaggatcatctgttgccatattattagatactaagggacctgaaattagaacaggagattttaaagggggatatgcagaatttaaaaaagggcaaattgttactatttgtcaagaagatatagaaggtacaagtgatcgttttacaatatcttataaagatttatatcatgatattaaaccaggaagttttattttagtaaatgatggacaagttgagctattagttgatcatgttgatggcactgatatagtatgtgtttgtgcaaatgatggagtggtaaaaaataagcgcggaataaatgtaccaggaataaaattaggatttaactatttatctaagcgagatattgacgatctaaaatttggctgcttacaaccatttaattatgtagcagcatcatttgtaagaagagcacaagatatttttgatataaagaaattgttaattgaaaatgatcgaccagatattcaagtaattgctaaaattgaaaataaagaaggagtcgaaaatattgatgaaattctaaatattgctgatggtatcatgattgctcgtggtgatttaggagttgaggtaccagcagaggatgtaccattaattcaaaaaagtataattagtaaatgtaaagatatgggaaaaattgttatcacagcaactcaaatgttagaaagtatgcaaacaaatccacgaccaactcgtgccgaagtaagtgatgtagcaaatgctatttttgatggaacggatgcaattatgttatctggtgaatcagcagcaggacaatatccacaagaatcagttatgacaatgagtcgtattgctttaaaaaccgaacaaagcttagattatgatgctttacatcgacaagctgttttaacagctggtaaagatacatctgaagcaatttgcatgtcagttgctgaaattgcttcaaaatttcaagttgcggcaattattgcttttacagaaagtggatttactgctcgaaaaatgtctcgttatcgcccagaagcaagaattattgcagcaacgcctattgttaatacaacaagatcattagctcttagttggggagtaacaccggttatttgtaaaactatgaaaacacgttctagtatgatggattatgcagaaatcattgctaaagaaaatggtgtagcttctggagatttaattcttgtaacaggtggaaaacctggtttaattggagatactagttatttagaattagttagagtaaaataa

SEQ ID NO: 777 - protein, 476 aa, Clostridium spiroforme DSM 1552
MLKNEKMSKTKIICTIGPASESKEMMTKLVKAGMNVMRLNFSHGSHEEHLNRIKLITEINKELGSSVAILLDTKGPEIRTGDFKGGYAEFKKGQIVTICQEDIEGTSDRFTISYKDLYHDIKPGSFILVNDGQVELLVDHVDGTDIVCVCANDGVVKNKRGINVPGIKLGFNYLSKRDIDDLKFGCLQPFNYVAASFVRRAQDIFDIKKLLIENDRPDIQVIAKIENKEGVENIDEILNIADGIMIARGDLGVEVPAEDVPLIQKSIISKCKDMGKIVITATQMLESMQTNPRPTRAEVSDVANAIFDGTDAIMLSGESAAGQYPQESVMTMSRIALKTEQSLDYDALHRQAVLTAGKDTSEAICMSVAEIASKFQVAAIIAFTESGFTARKMSRYRPEARIIAATPIVNTTRSLALSWGVTPVICKTMKTRSSMMDYAEIIAKENGVASGDLILVTGGKPGLIGDTSYLELVRVK

SEQ ID NO: 778 - DNA, 1728 bp, Anaerofustis stercorihominis DSM 17244
  CDS (1)..(1728): transl_table=11
atgaaaaaaacaaaaattgtttgtacaatcggtcccgcaagcgaagataaaaaggtattgacacatttgatcgcttcgggaatgaatgttgcaagacttaatttctctcacggagattatgaagaacatcaaggaagaattgatactatcaaagaaatcagacaaaaattaaatcagcctatagctattttgcttgatacaaaaggtcctgaaatcaggactaaaaaatttaaagacggcggagtatttttaaaagaaggcagcatgtttactcttacagtcggagatgaactcggagatgaaaataaatgttccacgacttatgatcatttagctgaagagcttaaaaaaggcgatgtagtacttattgatgatggtttaattaaactaactgttagagaaataaaaggtaaagacgtaatccttagagtagataacggcggtcccgttaaaaatcataagagtatcaacattccgggagttaatatcaagcttcccgctcttaccgaaaaagatacgaatgacttattatttggtataaaaaatgatgttgattttgtagctgcttctttcattagaagtaaagaagatgttttcgctataagagaggtccttaataataacggcggagaagatatccatataatttctaagatcgaaaacaggcaaggtgtagacaatatagatgagatcattgaagccagtgacggaataatggttgctagaggtgaccttggcgttgaaatccctgctgaagaagtgcctatagttcaaaaggatattatcaagaaatgtaactacgtaggcaaacctgttattaccgctactcaaatgcttgacagtatgataaacaaccctagagcaacaagagctgaagtaacggatgttttcaatgctatttttgacggtacggatgcaattatgttatcgggagaaaccgcggcaggtaaatatcctattgaagctgttcagactatgggtataatagctgaatcggcagaaggtaagttagctagtgatttcagaaccagaagtaaatatataaatgaccaaagtatgaccagtgcagtaagtctatcaacagtacaaatcgctgattctctaaatgcaaaagcaatacttacacctacaagctcaggttatactgcaagaaggatctcaaaatacagacctaactgtgatatagtggcttatacggataaagaatatgtacaaagaagattatctcttgtttggggtgttgaagcttataagatagatgtgttctcggatgtggaattactttataaaactattatcaagagtgcaaaagatcatttccacgttcaaaacggagatatggtagttattactgcgggtattcctttgggggtaaaaggaacaacaaactctataaggatcgaaactgtcggcgaacatgtacttaaaggtgcaggactgatcagaggcagagtaagaagcggcttaaggatttataataaaggattatctgacttcaaagaaggagagatattagcattaacttcttttgattcaaaagctatggatttaatagaaaaagccggcggtgtagtttacagcgaaaaggctttccctaatgaagttgaaatgaaattaaagggacttgatatccctacattggttggtgttgagtcttttgaaggatatgaagataaagaaaaagttactttagatgcttcaagaggtattttgtataaaatcaactaa

SEQ ID NO: 779 - protein, 575 aa, Anaerofustis stercorihominis DSM 17244
MKKTKIVCTIGPASEDKKVLTHLIASGMNVARLNFSHGDYEEHQGRIDTIKEIRQKLNQPIAILLDTKGPEIRTKKFKDGGVFLKEGSMFTLTVGDELGDENKCSTTYDHLAEELKKGDVVLIDDGLIKLTVREIKGKDVILRVDNGGPVKNHKSINIPGVNIKLPALTEKDTNDLLFGIKNDVDFVAASFIRSKEDVFAIREVLNNNGGEDIHIISKIENRQGVDNIDEIIEASDGIMVARGDLGVEIPAEEVPIVQKDIIKKCNYVGKPVITATQMLDSMINNPRATRAEVTDVFNAIFDGTDAIMLSGETAAGKYPIEAVQTMGIIAESAEGKLASDFRTRSKYINDQSMTSAVSLSTVQIADSLNAKAILTPTSSGYTARRISKYRPNCDIVAYTDKEYVQRRLSLVWGVEAYKIDVFSDVELLYKTIIKSAKDHFHVQNGDMVVITAGIPLGVKGTTNSIRIETVGEHVLKGAGLIRGRVRSGLRIYNKGLSDFKEGEILALTSFDSKAMDLIEKAGGVVYSEKAFPNEVEMKLKGLDIPTLVGVESFEGYEDKEKVTLDASRGILYKIN

SEQ ID NO: 780 - DNA, 1755 bp, Paenibacillus sp. JDR-2
  CDS (1)..(1755): transl_table=11
atgcgtaaagctaagattgtatgtacgattggaccttccagcgaatcgttggaaaacacgaaaaaactgattaaagcggggatgaacgttgcccgtctgaacttctcccacggcgactttgaagaacatggcaaccgtatcaaaaacatcggcatcgcaaacaaagagcttggaactagcgtagcgattctgctcgacaccaaaggtccggagattcgtcttggcaagctgaaagaagagccgatcgagcttgtggcaggcgagcgcgttgctctgacaacggaagagattttgggcgacattaatcgtgtgcctattacttacgacaaccttcctaacgacgtttccgtaggttcgactattctgatcgatgacggtttgatcggtctgacggttgaagaagttcaaggcactgaaattatttgccgcatcaacaacagcggacaaatcaagagcaaaaagggcgttaacgttcctggcgttgcgatttcccttccgggcatcacggaaaaagacgctaacgatatcatcttcggtatcgaaatgggcatcgacttcgtagcggcatcgttcgttcgtaaagcaagcgacgtgcttgaaattcgcgagctgcttgagcgccacaatgcaagccacatccaaatcatctccaaaatcgagaaccaacaaggcgttgacaatcttgatgagattctggaagtttccgacggtctgatggttgcccgtggcgaccttggcgttgagattccggctgaagaagtaccgctggtacaaaaaacaatgatcgaaaaatgtaaccgtgccggtaaaccggttatcacggctacacaaatgctggattcgatgcagcgcaacccgcgtcctacacgcgctgaagcaagtgacgtagcgaacgcaatcttcgacggtacggatgcaatcatgctctccggcgaaacagctgccggtaaatacccggttgaagcggtaactacaatgtcccgtattgctgagcgcgcggaagcggctctggaataccgtgaaatcttcacgaaacaagctaacgctcaaaaaacttccgtaacggaagcaatcagccaagcggttgcagtttccgctctggacctgaacgcggcagcaatcgtgacttcgacgcaaagcggtttcacagctcgtatggtatccaaataccgtccgaaagcaccaatcatcgcggtaactaacgatgagaaggttatgcgccgtctggctctgatctggggcgttaaaccggttctcggcgaaatcgctgaaacaacggacgcaatgttcgagaatgcggttgatggtgcaagaagcactggcttgatcagccttggcgacacaatcgttattacagcaggtgttccggttggccgcgcaggtacaacaaacctgatcaagattcaccatgttggcgagcttctggctcaaggccaaggcatcggcagccaaacggctactggccgcatcgttgttgcccgcacgcctgaagaagcaaacgcacgcgtaacttccggttcgatcctggttacggtatcgacggataaagaatatatgcctgctttcgaaaaagcagctgccgttattacagagcaaggcggtattacaagccatgcagctgtatgcggtattaacctgggtattccggttattctgggcatctcgaatgctacagaattgctgatggacggtacggaagtaacggtctacggcgagactggcgttgtatactccggacaagctaaagtcctgtaa

SEQ ID NO: 781 - protein, 584 aa, Paenibacillus sp. JDR-2
MRKAKIVCTIGPSSESLENTKKLIKAGMNVARLNFSHGDFEEHGNRIKNIGIANKELGTSVAILLDTKGPEIRLGKLKEEPIELVAGERVALTTEEILGDINRVPITYDNLPNDVSVGSTILIDDGLIGLTVEEVQGTEIICRINNSGQIKSKKGVNVPGVAISLPGITEKDANDIIFGIEMGIDFVAASFVRKASDVLEIRELLERHNASHIQIISKIENQQGVDNLDEILEVSDGLMVARGDLGVEIPAEEVPLVQKTMIEKCNRAGKPVITATQMLDSMQRNPRPTRAEASDVANAIFDGTDAIMLSGETAAGKYPVEAVTTMSRIAERAEAALEYREIFTKQANAQKTSVTEAISQAVAVSALDLNAAAIVTSTQSGFTARMVSKYRPKAPIIAVTNDEKVMRRLALIWGVKPVLGEIAETTDAMFENAVDGARSTGLISLGDTIVITAGVPVGRAGTTNLIKIHHVGELLAQGQGIGSQTATGRIVVARTPEEANARVTSGSILVTVSTDKEYMPAFEKAAAVITEQGGITSHAAVCGINLGIPVILGISNATELLMDGTEVTVYGETGVVYSGQAKVL

SEQ ID NO: 782 - DNA, 1422 bp, Paenibacillus sp. JDR-2
  CDS (1)..(1422): transl_table=11
atgcgcaagacaaaaattgtttgcaccatgggaccggcatgcgaatcgacggaagtattaattgacatgattaatgcggggatgaacgttgcccgtttgaatatggcacacggagagctggaggatcatgcggcacgtattgcgcgtattcgcgaagctgctgcggctacgaacagtattgttgcgattttgcttgatattaaaggtccggaagtgcggatcggcaagctggaggaagcttcttacctgctgaaggttggagagaagctgacgctgactacggaagagattatcggtaacggcgagcgcattcacgtgaactatgcggagctgcctctggtcgtgaaccctggcaataaaattttgctcgacgatggccttatcgaaatggaagttgtatcggttaacggaacggaaatcgagtgcgtcattctgaatggcggcgtaattaaagcgagaaaaggcgtcaacctgccgggtatccgcacaacgcttcctggcgtaacggaacgcgatatccgccatatccagttcggcatcgaacagcaaattgatattatcgctccttcctttgtgagaagagcggaagatattttgcaaatccgcgagcttcttcatgacggcggcgcagggcatatccaaatcatctcgaagatcgagaatgaagaaggcgttaataacctcgattcgatcatcgaagcttcggacggcatcatggttgcccgcggcgaccttggcgtagaagtaccggcttgggacgtaccgatgattcagcgcgaaatgatctcgaaatgtaacacagcgggtaaagtagtcattgttgcgacgcaaatgcttgattcgatgcaggttaaccctcgcccatcccgcgcggaagtaagcgacgttgcgaacgccgtccttcaaggcacggatgcgattatgctttcgggcgagacggctgccggcaaatatccggtagaatcggtcagcatgatggcttccattgcggtgaaggcggagtccatgatggattacttcgatgagttccaacagcgcagaggcgctcaaccaacaacgattacggaagtaattagccaagcggttgtaagctcgtctttggagctgaacgcaaaagctatcgtaacgccaacggagagtgggttcacagcccgtatggtatcgaaataccgtccaaaatcgccaattatcgcggttgcttcggatgagaaggttctgcctcgcctggctgttatgtggggagttatcccggtgaaaggtggccgacctaactcgacggacgatatttttgaatcggcattaacaaacggcggcagcacgggtctcctggagaaaggcgactacgttgttattacagcgggtacgccaacaggcaaagccggcgctaccaatcttgtgaagatcgcgcaatacggcctataa

SEQ ID NO: 783 - protein, 473 aa, Paenibacillus sp. JDR-2
MRKTKIVCTMGPACESTEVLIDMINAGMNVARLNMAHGELEDHAARIARIREAAAATNSIVAILLDIKGPEVRIGKLEEASYLLKVGEKLTLTTEEIIGNGERIHVNYAELPLVVNPGNKILLDDGLIEMEVVSVNGTEIECVILNGGVIKARKGVNLPGIRTTLPGVTERDIRHIQFGIEQQIDIIAPSFVRRAEDILQIRELLHDGGAGHIQIISKIENEEGVNNLDSIIEASDGIMVARGDLGVEVPAWDVPMIQREMISKCNTAGKVVIVATQMLDSMQVNPRPSRAEVSDVANAVLQGTDAIMLSGETAAGKYPVESVSMMASIAVKAESMMDYFDEFQQRRGAQPTTITEVISQAVVSSSLELNAKAIVTPTESGFTARMVSKYRPKSPIIAVASDEKVLPRLAVMWGVIPVKGGRPNSTDDIFESALTNGGSTGLLEKGDYVVITAGTPTGKAGATNLVKIAQYGL

SEQ ID NO: 784 - DNA, 1413 bp, Escherichia albertii TW07627
  CDS (1)..(1413): transl_table=11
atgaaaaagaccaaaattgtttgcaccatcggaccaaaaaccgaatctgaagagatgttagctaaaatgctggacgcaggcatgaacgttatgcgtctgaacttctctcatggtgactatgcagaacacggtcagcgcattcagaatctgcgcaacgtgatgagcaaaaccggtaaaaccgccgctatcctgctcgatactaaaggcccggaaatccgcaccatgaaactggaaggcggtaatgacgtttctctgaaagccggtcagacctttactttcactactgacaaatccgttatcggcaacaacgaaatggttgcggtaacttatgaaggtttcaccactgacttgtccgtcggcaacaccgtactggttgacgatggtctgatcggtatggaagttaccgctattgaaggtaacaaagttatctgtaaggtactgaacaacggcgatctgggtgaaaacaaaggcgtcaacctgccaggtgtttccatcgctctgccagctcttgctgaaaaagacaaacaggatctgatcttcggttgcgaacaaggcgttgactttgttgctgcgtcctttattcgtaagcgttctgacgttatcgaaatccgtgagcacctgaaagcacacggcggcgaaaacatccacatcatctctaaaatcgaaaaccaggaaggcctgaataacttcgacgaaatcctcgaagcgtctgacggcatcatggttgcgcgtggcgacctgggtgtagaaatcccggttgaagaagttatcttcgcccagaaaatgatgatcgaaaaatgtatccgtgcacgtaaagtcgttatcacggcgacccagatgctggattccatgattaaaaacccacgtccgactcgtgcggaagccggtgacgttgccaacgccatcctcgacggtaccgacgcagtcatgctgtctggtgagtcagcaaaaggtaaatatccgctggaagcggtttctatcatggcgaccatctgtgaacgaaccgaccgcgtaatgaacagccgtctcgagttcaacaacgacaaccgtaaactgcgtattaccgaagcggtttgccgtggcgctgttgaaactgcggaaaaactggatgcgccactgatcgtcgtagcgacccgaggcggtaagtctgctcgcgcagtgcgtaaatacttcccggatgccaccattctggcgctgaccactaacgaaaaaacggctcaccaactggtgctgagcaaaggtgtcgtaccgcagttagtgaaagaaatcacctctactgatgatttctatcgtctgggtaaagaactggcgctacaaagcggtctggcacacaaaggcgacgtcgtggtaatggtttccggtgcgctggtaccaagcggcaccactaacaccgcatctgttcacgtgctgtaa

SEQ ID NO: 785 - protein, 470 aa, Escherichia albertii TW07627
MKKTKIVCTIGPKTESEEMLAKMLDAGMNVMRLNFSHGDYAEHGQRIQNLRNVMSKTGKTAAILLDTKGPEIRTMKLEGGNDVSLKAGQTFTFTTDKSVIGNNEMVAVTYEGFTTDLSVGNTVLVDDGLIGMEVTAIEGNKVICKVLNNGDLGENKGVNLPGVSIALPALAEKDKQDLIFGCEQGVDFVAASFIRKRSDVIEIREHLKAHGGENIHIISKIENQEGLNNFDEILEASDGIMVARGDLGVEIPVEEVIFAQKMMIEKCIRARKVVITATQMLDSMIKNPRPTRAEAGDVANAILDGTDAVMLSGESAKGKYPLEAVSIMATICERTDRVMNSRLEFNNDNRKLRITEAVCRGAVETAEKLDAPLIVVATRGGKSARAVRKYFPDATILALTTNEKTAHQLVLSKGVVPQLVKEITSTDDFYRLGKELALQSGLAHKGDVVVMVSGALVPSGTTNTASVHVL

SEQ ID NO: 786 - DNA, 1758 bp, Clostridium botulinum Bf
  CDS (1)..(1758): transl_table=11
atgcaaaagactaaaatgatatttacaataggtcctgcaagctcgacagaagaaattgtatcaaagttaatagaagctggaatgagtgtatcaagacacaatttttctcacggatcacatccagaacacaaagaaagaatgatgatgattaagaaattaagagaaaagcataacaaacacatagctatcatgttagacaccaaaggaccagaaataagaacgggtaatttttcagtggataaagtggaattaaaagaaggggcagagtttacaatatattgtagagaagacataataggtgacgaaacaaaatgttctattacttatgatgaactatataaagatgtagttaaaggaaataaaatactgatagatgatggattagtagagttagaggttcaatcagtagaagataataaaattcatacagtagttaaaaattcaggaactgtttcaaatcacaagggagtaaatgttccaggagtttcagtatcacttccagcagttactgaaaaagatatagaagatttaaaatttggatgtgaagtaggagtagatttaataagtgcatcctttataagaaaagcctctgatgtattagctataagaaaaatattagaagaaaatggtggaaatgaaatacagataatctctaagatagaaaatcaagagggcgttgacaatatagatgagataataaaattttctgatggaataatggtagctagaggagatatgggagttgaaattcctatagaagaggttccaatagtacaaaaaagaataatagaaaaatgtaataaggcaggtaagcctgtaattacagcaactcaaatgttagattctatgatgagaaaccctagaccaacaagagctgaagcctcagacatagccaatgcaatatttgatggaacagacgccataatgttaagtggagaatcagcaaatggaaaatatccggtagaagctgcaagaactatgtctagaatagctaaaacagcagaagcaaaattaaattatgatgctatattaaataaaatgagagaaagtcatatattaaatgttcctaatgctataagcttatcagcgtgtactacagcatcagaattaaatgctacagctataatcacagcaactcaaagcggacatactgcaaaaatggtatcaaaatatagaccacaatgccctattatagcagtaacaccaaatgaaatagttgctagaaaattagcattaaattggggagtagtgccactattaacagaaacatttaattctacagatgagcttatagataaatctgttaataaatctttagaagaaggatatgttaaaaatggcgacttagttgttatagcaggaggaataccagtgtcttactcaggaacaactaatatgctaaaagttcatatagtaggagatatattatctcaaggtagaggctcaggaactagaccaacttatggaaatgtaaaagtagtaaaaaatcctgcggaggcagaagatatagttgaaagagatgacatattagtagttaaaaatttagatagaagatatataactattttagacagagtatcaggcatagtggctgaagaaggtggaataacatcacacttagctatagaatgcatagcaagagatattccatttatatgtaatgcaggtggagctatggatgttttaaaaacaggaacatatgtaacacttgatacagtaagaggaatagtatacaacggaagagctaatatagtttaa

SEQ ID NO: 787 - protein, 585 aa, Clostridium botulinum Bf
MQKTKMIFTIGPASSTEEIVSKLIEAGMSVSRHNFSHGSHPEHKERMMMIKKLREKHNKHIAIMLDTKGPEIRTGNFSVDKVELKEGAEFTIYCREDIIGDETKCSITYDELYKDVVKGNKILIDDGLVELEVQSVEDNKIHTVVKNSGTVSNHKGVNVPGVSVSLPAVTEKDIEDLKFGCEVGVDLISASFIRKASDVLAIRKILEENGGNEIQIISKIENQEGVDNIDEIIKFSDGIMVARGDMGVEIPIEEVPIVQKRIIEKCNKAGKPVITATQMLDSMMRNPRPTRAEASDIANAIFDGTDAIMLSGESANGKYPVEAARTMSRIAKTAEAKLNYDAILNKMRESHILNVPNAISLSACTTASELNATAIITATQSGHTAKMVSKYRPQCPIIAVTPNEIVARKLALNWGVVPLLTETFNSTDELIDKSVNKSLEEGYVKNGDLVVIAGGIPVSYSGTTNMLKVHIVGDILSQGRGSGTRPTYGNVKVVKNPAEAEDIVERDDILVVKNLDRRYITILDRVSGIVAEEGGITSHLAIECIARDIPFICNAGGAMDVLKTGTYVTLDTVRGIVYNGRANIV

SEQ ID NO: 788 - DNA, 1422 bp, Clostridium butyricum 5521
  CDS (1)..(1422): transl_table=11
atgagaaagactaaaatgatttgtactataggtccagctagtgaagacagagaaacattaaaaaaagtaatgttagcaggtatgaatgcttcaagacataacttttcacatggtgaccatgaagagcacaaaggtagaatagtaaaggtaagagaaatagctaaagaacttggaagagaagttgcagttattcttgatactaaaggaccagaaataagaactggtaaattcgaaccaaacaaagttgaattacaaaaaggtactgaatttacagtatatgctggagatatgtcagtagttggtgatactactaaatgtgctgttacatacgaaggtttagcaaacgacgttgttccaggaaacacaatcttaatagatgatggtttagtaggattaactgttaaatctatcgaaggaaacgctgttaagtgtgaagttcaaaacactggtttagttggaactcataaaggagttaacgttcctggagtatctattaaattaccagctttaactgaaaaagataaaggtgatttaatatttggatgtgaaatgggcgtaaacatgatcgctgcttcattcatcagaaaagctgatgacgttagagctatcagaaaattattaaacgaaaacggtggagaaagaatattaatatgttctaagatcgaaaaccaagaaggtgttgataacatcgatgaaatcttagcagaatcagatttaatcatggttgctagaggagaccttggtgttgaaatcccagtacaaaacgtacctgcagtacaaaaaatgatcatcaagaagtgtaacgaagctggtaagccagtagtaactgctacacaaatgttagactcaatgatcagaaacccaagaccaacaagagcagaagtttcagacgtagctaacgctatcttagatggaactgattgtatcatgttatcaggtgaaagtgctaacggagattacccagtagaagcagtaagcacaatggctaaaattgctgaagaaactgaaaaaactttagaatacaaagtagctgtatctaaggctaaatctcatactccagctatttcaggagttatctcaagagcagcagctaatgcagctaatgaattaaatgcttcagctgttataacttcaactcaaacaggagctactgctaagagaatttctcaatgcagaccagaatgtccaattatagctgttactccagacgtaatagttgctagacaattatcattctcatggggtgtatatccagtagttgctgacaaaatggcttcaactgatgaaatgttagaaaaatcagtagaaatcgctaagaacagtgaattcgttgcagctggagatacagttgtattagcagctggtgtaccagtagatcaagttggtgctactaacttattaaaggttactgaagttaaatag

SEQ ID NO: 789 - protein, 473 aa, Clostridium butyricum 5521
MRKTKMICTIGPASEDRETLKKVMLAGMNASRHNFSHGDHEEHKGRIVKVREIAKELGREVAVILDTKGPEIRTGKFEPNKVELQKGTEFTVYAGDMSVVGDTTKCAVTYEGLANDVVPGNTILIDDGLVGLTVKSIEGNAVKCEVQNTGLVGTHKGVNVPGVSIKLPALTEKDKGDLIFGCEMGVNMIAASFIRKADDVRAIRKLLNENGGERILICSKIENQEGVDNIDEILAESDLIMVARGDLGVEIPVQNVPAVQKMIIKKCNEAGKPVVTATQMLDSMIRNPRPTRAEVSDVANAILDGTDCIMLSGESANGDYPVEAVSTMAKIAEETEKTLEYKVAVSKAKSHTPAISGVISRAAANAANELNASAVITSTQTGATAKRISQCRPECPIIAVTPDVIVARQLSFSWGVYPVVADKMASTDEMLEKSVEIAKNSEFVAAGDTVVLAAGVPVDQVGATNLLKVTEVK

SEQ ID NO: 790 - DNA, 1419 bp, Clostridium butyricum 5521
  CDS (1)..(1419): transl_table=11
atgcaaaaaacaaaaatgatttttaccattggacctgctagtgataacgaagaaacattaagaaaatttattgaaattggtatgagtgcagcaagattgaatttttctcacggcacacatgaaagtcacaaagaaaaaattgacttaatcaaacgtttaagaagtgagatgaactctcctactgctatcgttcttgatattaagggaccaaaaattagaactcataattttataaatgatggagtagaacttaaagaaggtaatgactttacttttatttgtggtgatgaaatacttggtgatgaaacacaatgttcaatttcttatacagaactttgtgaagatattaaagttggtggaaacatattagtagatgatggtctattaaaattcaaagttacaggtgttgaaggaaataaaattcatactaaagttactgttgggggagaaattaaaaatcataaaggtgttaatgttcctaacgtaattatcaaactaccatcaattacagaaaaagatatagaagatattaaatttggatgtgaaatgggcgttgattttatcgctgcttctttcataagaaaagcaagtgatatacttgatgtaaagaaaattcttcaagaaaataacggaaatcacatcaaagttattgcaaaaatagaaaatcaggaaggtgtagacaacatagattctataatagaagttacagatgctgtaatggttgccagaggagatatgggtgttgaaattccaatagaaaaagttcctataaatcaaaaaatgataatcaaaaagtgtaatgaagcaggaaaaatagttataactgctactcaaatgcttgattcaatgattagaaactctttacctacaagagcagaagctagtgatatctgtaatgctatctttgatggtactgatgctataatgctaagtggtgaaagtgcttctggattattccctatcgaagccgcaaaaacaatgtctaaaattgctcaagaagctgaacaatacttagattacaatcacttaactgctagatttagagaaccatcattaacagattacgctgctgctataagctactcagcatgtagaactgcaaatcttttagatgcaaaagcaattgttgcagctactaagagtggtgcaactgcaaaacttctttcaagatataaagctaaggctccagttatcgcaattactccttatgatcatgtaagaagaggattaaacttaaactttggattaatccctatgcaatgtgatatgtttaatactacagatgaaatattaactgaggctaaaaatgttgtatttaaacttggaattacagaaccaggtgatgatataattgttgctgctggaatgccaacaactcaaactggcggaactaacatgttaaaaatagaaaaactataa

SEQ ID NO: 791 - protein, 472 aa, Clostridium butyricum 5521
MQKTKMIFTIGPASDNEETLRKFIEIGMSAARLNFSHGTHESHKEKIDLIKRLRSEMNSPTAIVLDIKGPKIRTHNFINDGVELKEGNDFTFICGDEILGDETQCSISYTELCEDIKVGGNILVDDGLLKFKVTGVEGNKIHTKVTVGGEIKNHKGVNVPNVIIKLPSITEKDIEDIKFGCEMGVDFIAASFIRKASDILDVKKILQENNGNHIKVIAKIENQEGVDNIDSIIEVTDAVMVARGDMGVEIPIEKVPINQKMIIKKCNEAGKIVITATQMLDSMIRNSLPTRAEASDICNAIFDGTDAIMLSGESASGLFPIEAAKTMSKIAQEAEQYLDYNHLTARFREPSLTDYAAAISYSACRTANLLDAKAIVAATKSGATAKLLSRYKAKAPVIAITPYDHVRRGLNLNFGLIPMQCDMFNTTDEILTEAKNVVFKLGITEPGDDIIVAAGMPTTQTGGTNMLKIEKL

SEQ ID NO: 792 - DNA, 1425 bp, Clostridium perfringens D str. JGS1721
  CDS (1)..(1425): transl_table=11
atgcaaaaaacaaaaatgatatttacaattggtcctgcaagtgattcagaagaaattctaagagagttcataagaattggtatgaatgcagctagattaaacttctcacatggagaccatgcaagtcataaagaaaagatagaacttattaagagacttagaaaagaagaaaaatcagctacagctatcttattagacattaagggtcctaaaataagaacacataatttaaaaaatggcgaagctgaattaaaaaatggtgatgaattcacattctcttgcggagatgaaatattaggtgataacactaaatgttcaatctcttataaagaactatatgaagacataaaacctggtggatcaatacttgttgatgatggacttttagaatttaaagtaaaagaagtccgtggaactgatataatatgtgaagttattgaaggaggtactataaaagaccataaaggtgtaaatgtacctaatgtaccaattaaactccctgcagtaactgaaaaggatagatctgacttaatatttggttgtgagatggaagtagactttgtagcagcttctttcataagaaaacctgaggatgtgcttgaagttagagaaattctagactctcatggtggaaaagatataaaaataatatcaaaaatagaaagccaagaaggtgtagataacataaaagaaataattaaagttactgatggtgtaatggttgctagaggtgatatgggagtagaaattcctatagaaaatgtacctataattcaaaaaaatataattaagaaatgtaatcaagcagggaaaatagttataacggcaactcaaatgttagattctatgataagaaatccaagacctactagagctgaagcttctgacgtatgtaatgccatatttgatggtacagatgccataatgcttagtggagaaagtgcttctggtagcttccctatagaggcagcaatgacaatgtctagaatagcaaaaaaagcagaagataacttagactataattatcttttaagaagattaaaagatccaaatccaaatccagatgcctttgcagatgccataagttattcagcatcaaaaacagctagcaaattccctacaaaagctatagtagcagccactcagactggctcaactgctaagatattatcaaaatataaacctagctgtccaataatagctattactccatatgaaaaagttagaagaagcctagctttaaactttggaataatttctaagaaatgcgcttattttaatagtacagatgagatcatagaggaagctagaaaagtagctaaagaattccaaatagctgaaactggagataatataatggtagctgctggattcccaacatcaataactggtggaacaaacatgctaaaaattgaaaaaatataa

SEQ ID NO: 793 - protein, 474 aa, Clostridium perfringens D str. JGS1721
MQKTKMIFTIGPASDSEEILREFIRIGMNAARLNFSHGDHASHKEKIELIKRLRKEEKSATAILLDIKGPKIRTHNLKNGEAELKNGDEFTFSCGDEILGDNTKCSISYKELYEDIKPGGSILVDDGLLEFKVKEVRGTDIICEVIEGGTIKDHKGVNVPNVPIKLPAVTEKDRSDLIFGCEMEVDFVAASFIRKPEDVLEVREILDSHGGKDIKIISKIESQEGVDNIKEIIKVTDGVMVARGDMGVEIPIENVPIIQKNIIKKCNQAGKIVITATQMLDSMIRNPRPTRAEASDVCNAIFDGTDAIMLSGESASGSFPIEAAMTMSRIAKKAEDNLDYNYLLRRLKDPNPNPDAFADAISYSASKTASKFPTKAIVAATQTGSTAKILSKYKPSCPIIAITPYEKVRRSLALNFGIISKKCAYFNSTDEIIEEARKVAKEFQIAETGDNIMVAAGFPTSITGGTNMLKIEKI

SEQ ID NO: 794 - DNA, 1413 bp, Providencia stuartii ATCC 25827
  CDS (1)..(1413): transl_table=11
atgaaaaaaacgaaaattgtttgtaccatcggtccaaaaaccgaatcagaagaaaaattgaaccaacttcttgatgcaggcatgaatgtcatgcgtctcaacttctctcacggcgactatgaagagcatggtcaacgtatcaaaaatctacgtgcagtctgtgcgagaactggcaaacaagccgctatcctgcttgatactaaagggcctgaaatccgcaccatgaaacttgagggcggtaacgatgtttctctcgttgctggtcaaacttttacattcactacagatacctcagttatcggtaataaagacagagttgctgtaacttatgccggtttgaccgcagatcttaacgcgggtgataccgttttagtcgacgacggtttaattggcatgaaagtgaaagatgtcaccgcgacagaagtgatctgtgaagtcttgaataatggtgatttaggtgagaaaaaaggcgttaacctacccggcgtctctattggtttacctgctctcgctgaaaaagataaagaagacctgatttttggttgtgagcaaggcgtcgattttgtcgccgcgtcgtttatccgtaaacgttctgatgtggaagaaatccgtgctcacctgaaaaaacacggtggcgaaaatattcagatcatctccaaaattgaaaaccaagaaggtttgaataactttgatgatatcctagaagcgtctgatggtatcatggttgcccgtggtgacttgggtgttgagatccctgtagaagaagttattttcgcccaaaaaatgatgattgagaaatgtgttgctgcacgtaaagtcgtgatcaccgcaacgcaaatgttagattcaatgatcaaaaacccacgccctactcgcgctgaagcaggcgacgtggcaaacgccatccttgatggtacggatgctgtgatgctttcaggtgaaagtgctaaaggcaaataccctgttgaagccgttactatcatggcaacgatttgtgagcgcacagatcgcatcatgccaacccgtattgataaccaaaaaccaggccaacgcctacgtgtcaccgaagcggtttgccgtggcgccgttgagatgtctgagaagttagacgttccactgattgtcgttgctactttcggcggtaaatcagccaaatcagtccgtaaatacttccctaccgcgcctattttagcgctaaccactaacgaagaaaccgctcgtcagttgttattggtaaaaggtgtagtaccaatgatggttggtggtttcacatcaacagatgatttttaccgcgaaggtaaacgtgcagctttaaatagcggcttggcgaaagaaggtgatgctattgtgatggtatctggtgcattagttccaagcggaacaaccaatacatcttccgtacacgtgctgtaa

SEQ ID NO: 795 - protein, 470 aa, Providencia stuartii ATCC 25827
MKKTKIVCTIGPKTESEEKLNQLLDAGMNVMRLNFSHGDYEEHGQRIKNLRAVCARTGKQAAILLDTKGPEIRTMKLEGGNDVSLVAGQTFTFTTDTSVIGNKDRVAVTYAGLTADLNAGDTVLVDDGLIGMKVKDVTATEVICEVLNNGDLGEKKGVNLPGVSIGLPALAEKDKEDLIFGCEQGVDFVAASFIRKRSDVEEIRAHLKKHGGENIQIISKIENQEGLNNFDDILEASDGIMVARGDLGVEIPVEEVIFAQKMMIEKCVAARKVVITATQMLDSMIKNPRPTRAEAGDVANAILDGTDAVMLSGESAKGKYPVEAVTIMATICERTDRIMPTRIDNQKPGQRLRVTEAVCRGAVEMSEKLDVPLIVVATFGGKSAKSVRKYFPTAPILALTTNEETARQLLLVKGVVPMMVGGFTSTDDFYREGKRAALNSGLAKEGDAIVMVSGALVPSGTTNTSSVHVL

SEQ ID NO: 796 - DNA, 1461 bp, Bacteroides coprocola DSM 17136
  CDS (1)..(1461): transl_table=11
atgatgctcaaacaaacaaaaatcgttgcgtccatttcggacttacgttgtgaagtagattttatcagagacctttttaatgccggtatgaatgttgttcgtatgaatacagctcatgccagtcgtgaaggattcgaaaaattaatcagtaacgtgcgtgcggtatcaaaccgtatcgctatcctgatggatacaaaaggtccggaagtacgtactactgcaagcgcagaaggtcctattgattttaaaacaggagataaagtacgtattgttggcaatcctgcacaggaaactactcgtgaatgcattgctgtgacctatccgggctttgtacacgatttgtcggttggtgccgatgtattgattgatgacggtgaactggaactgaaggttgtagaaaagagtgaagatactttgttttgcgaggtttgtaacgacgctacactgggaagccgtaagagcgtgaatgttccgggtgtacgtataaaccttccttcactgactgaaaaagacagaaacaatattctttatgcaatcgaaaaggatattgatttcatcgcacattcatttgtacgcaataagcaagatgtacttgacattcgtgaaatattggatgcacacaagagcgacattaagattattgcaaagattgaaaatcaggaaggtgtagataatattgatgaaatacttgaggtagctgacggagttatggttgctcgtggtgacttaggtattgaagtccctcaggaacgtattccgggtattcagcgtcagcttatcaagaaatgtattctggcaaagaaaccggttatcgtagcaactcagatgctgcataccatgattaacaacccacgtcctactcgtgcagaggttacagatattgcaaatgcaatctattatcgtacagacgcgctgatgttgagtggtgaaactgcatatggaaaatatccggtagaagctgttaagacaatggccaagattgctgcacaggctgaaaaggataaaatggaagaaaatgatatccagattcctttgactccggaaaatacagatgttactgcattccttgctaaacaggctgtacgttctgctacattgatgccgattcgtgctatcattactgactgtttcagtggtttgactgctcgtaacctggcagctttccgtggaaaatatcctgtgttggctgtatgttataaggaaaagactatgcgtcatctggcattatcttatggagtggaagctatctatatgccagaaaaagccagtggtcaggaatattatttcacagcattgcgtaaattgattgctgatggagttctttcagataaagacatggtggcttatttgagcggaggaaagaaaggtactcatacttcattccttgaaatcaatcaggtaggcgatgtgttggacagtgaagatgaatatgttttacccaaccgtaaccgttacttataa

SEQ ID NO: 797 - protein, 486 aa, Bacteroides coprocola DSM 17136
MMLKQTKIVASISDLRCEVDFIRDLFNAGMNVVRMNTAHASREGFEKLISNVRAVSNRIAILMDTKGPEVRTTASAEGPIDFKTGDKVRIVGNPAQETTRECIAVTYPGFVHDLSVGADVLIDDGELELKVVEKSEDTLFCEVCNDATLGSRKSVNVPGVRINLPSLTEKDRNNILYAIEKDIDFIAHSFVRNKQDVLDIREILDAHKSDIKIIAKIENQEGVDNIDEILEVADGVMVARGDLGIEVPQERIPGIQRQLIKKCILAKKPVIVATQMLHTMINNPRPTRAEVTDIANAIYYRTDALMLSGETAYGKYPVEAVKTMAKIAAQAEKDKMEENDIQIPLTPENTDVTAFLAKQAVRSATLMPIRAIITDCFSGLTARNLAAFRGKYPVLAVCYKEKTMRHLALSYGVEAIYMPEKASGQEYYFTALRKLIADGVLSDKDMVAYLSGGKKGTHTSFLEINQVGDVLDSEDEYVLPNRNRYL

SEQ ID NO: 798 - DNA, 1446 bp, Geobacter sp. M21
  CDS (1)..(1446): transl_table=11
atgttccgtcacacaaagatcgttgccaccgtcggacccgccagcgaatcagaagagatgctcggcgccttgataaaggccggcgtcgacgttttccgcctcaacttctcccacggcgaccatgccgccaaatccgccgtcatccgcagcatccgcaaactctccgaccagcatgagcattcagtcgccattttaggggacctgcaggggcccaagatccgcaccggtctcatgaaagggggcgggatgccgctcacctccggaaccgaagtgatcgtcaccacccgggaactgctgggcgaggggaacctcattcccaccatctaccaggggctccccggggacgtgaggcccgacgaccgcatccttttggacgacggcctgatggagctgaaggtgctgggggtggagggggacgacgtgcgctgcctcgtcgtgaccggaggcctcctcaaggaccgcaaggggatcaacctccccggcgccaaggtttccgcccccgccatgaccgacaaggaccgtgacgacctcgagttctgcatggagcagcgcctcgacttcgtcgcgctttccttcgtgcgcgaggcctccgacgtgcaggaattgaggagcatcatcgacagccgcggctcccggcttcgcatcatctcgaagatcgagaagccggaggctgtgatcaacttcggcgccatcttgcgcgtctccgacggggtcatggtggcgcgcggcgacctgggggtggagttgaaccccgagaaggtcccgctgatccagaaacggatcatccgcgattgcaacgacgccggcaagccggtgatcaccgccacccagatgctggagagcatggtgaacaacccgcgcccgacccgcgccgagacctccgacgtcgccaacgccatcctcgacggcaccgacgccatcatgctttccgccgagacggcgtccggcaagtaccccatcgaggcggtctccatgatggtgcaggtggcgcgcgacgtggaagcggacccgcagctcatgtcgcaaagctgccacatcgcccagaccgaggcggagccgaacctctccgaggtgatcgggcttgccgcctgccgggcggcggagagcgtcaaggcgtcggcgatacttgccttcacccagaccggagggaccgcggctttggtttccaaatgccgcccggcccagcccatcatcgccgtgacgccctccgaagaggtgcggcgcgtgctcgccctctacgccggggttcattcgctgcgcgtggatatcgagggggacaccgagtcccagatcatctcggtcgagaaggcggtgctggaaaccggctggctcaagaagggggaccttgtggtgataaccatgggaagtccgctttcctcggcgggaaccaccaacctgatgaaggtgcaccggctgggggagcctgaggtcaagcggcgactttga

SEQ ID NO: 799 - protein, 481 aa, Geobacter sp. M21
MFRHTKIVATVGPASESEEMLGALIKAGVDVFRLNFSHGDHAAKSAVIRSIRKLSDQHEHSVAILGDLQGPKIRTGLMKGGGMPLTSGTEVIVTTRELLGEGNLIPTIYQGLPGDVRPDDRILLDDGLMELKVLGVEGDDVRCLVVTGGLLKDRKGINLPGAKVSAPAMTDKDRDDLEFCMEQRLDFVALSFVREASDVQELRSIIDSRGSRLRIISKIEKPEAVINFGAILRVSDGVMVARGDLGVELNPEKVPLIQKRIIRDCNDAGKPVITATQMLESMVNNPRPTRAETSDVANAILDGTDAIMLSAETASGKYPIEAVSMMVQVARDVEADPQLMSQSCHIAQTEAEPNLSEVIGLAACRAAESVKASAILAFTQTGGTAALVSKCRPAQPIIAVTPSEEVRRVLALYAGVHSLRVDIEGDTESQIISVEKAVLETGWLKKGDLVVITMGSPLSSAGTTNLMKVHRLGEPEVKRRL

SEQ ID NO: 800 - DNA, 1416 bp, Geobacillus sp. Y412MC10
  CDS (1)..(1416): transl_table=11
atgcttaagacaaaaatcatctgtacgatggggccggcatgcgattccatcgagctgttgaaaaatatgattcaggaggggatgacggtcgcccgattgaatatggcacatggcgagccggaggatcacgtggcccggattcggaatgttcgccaggccgcatccgaattaaacacgtatgtcccgatcatgatggacattaaaggtcccgaggtccggatcggcaagctgaaagaggcttcctgccttctgaaaccgggtgaggaactgatcctgacgaccgaagaaattctgggagacgcccagcgcatctcggtcaattatgccgagctgaatctagtcgtgaaaccgggagaccgcatcttgatcgatgacggccttgtcgacctgaacgtcattcgcgtcgacggaccggacattctttgcaaaatcgtcagcggcggcgtgctcaaaccgcgcaaaggcgtcaacctgcctggcatcaaaacgacgctgcctggcgtcaccgagcgtgatgtcatgcatatcggcttcggactggagaacaacatcgagatcattgctgcatctttcgtgcgccatggcgacaacatccgcgaaatccgcagcatcctgaaggaacgcggcgcggagcatgtgcagatcatctccaagatcgaaaacggagagggcatggagaacctggacgacatcattgaagcctccgacggaatcatggttgcccgcggcgatctgggcgtcgaagtgccaatcgaagaagtgccgatgatgcagaaagaaatgatcgataaatgcaatctggcaggcaagccggttatcgtggcaacgcatatgctggaatcgatgcaggtcaatccccgccctacccgctccgaggtgagcgacgtggctaacgccgtgatccagggcgcagacgtggtcatgctgtccggagaatccgccgctggcaaatatccggtggaatccgttcgtacgatggcggcagtcgcccgccgtgccgagaccatgatcgattataaggaccagttcgctttcaaatccagacaacaagtagccgatattaccgaggtcatcagccaaggcgcggtcagctcttccctcgtgttgaatgccaaagccatcattacgtcaacggagagcggatttacggcgcggatgatttcgaaatatcgtccggaagcaccgatcatcgccgtcacgcagcatgaagaagtgctggccaaaatctgcctgctctccggcgtcatcccggtaaaaggcgacaaggttaccacaacggacgaaatgttcgagtccgcgacccgcaacgccatcaagacaggctacatcgaaaaaggcgacattatcgtattgtctgccggcgtgccgatcggtcaatccggcaacacgaatctgattaaggttctccaagtgtaa

SEQ ID NO: 801 - protein, 471 aa, Geobacillus sp. Y412MC10
MLKTKIICTMGPACDSIELLKNMIQEGMTVARLNMAHGEPEDHVARIRNVRQAASELNTYVPIMMDIKGPEVRIGKLKEASCLLKPGEELILTTEEILGDAQRISVNYAELNLVVKPGDRILIDDGLVDLNVIRVDGPDILCKIVSGGVLKPRKGVNLPGIKTTLPGVTERDVMHIGFGLENNIEIIAASFVRHGDNIREIRSILKERGAEHVQIISKIENGEGMENLDDIIEASDGIMVARGDLGVEVPIEEVPMMQKEMIDKCNLAGKPVIVATHMLESMQVNPRPTRSEVSDVANAVIQGADVVMLSGESAAGKYPVESVRTMAAVARRAETMIDYKDQFAFKSRQQVADITEVISQGAVSSSLVLNAKAIITSTESGFTARMISKYRPEAPIIAVTQHEEVLAKICLLSGVIPVKGDKVTTTDEMFESATRNAIKTGYIEKGDIIVLSAGVPIGQSGNTNLIKVLQV

SEQ ID NO: 802 - DNA, 1428 bp, Geobacillus sp. Y412MC10
  CDS (1)..(1428): transl_table=11
atgcgcaaaactaaaattgtatgtaccatcggtccttccagtgaatcgttggaaaacaccaagaagctcattatggccggcatgaacgtggctcgtctgaacttctcccacggcgacttcgaggagcatggcaaccggatcaagaacatccgccaagcttgcgaagagttgaacaaaacggtagcgatcctgcttgataccaaaggaccggagatccgtacaggcaaacttgaagtggaaccgattgagcttgtacaagatgaatatatcacccttactaccgaggaaatccttggtgataagaatcgtttgtccattacttataaagagttgcctcaagacgttcaagtcggatcgacgatcctgatcgacgacggtctgatcggtctgaccgtggtggagattcaaggcaccgaaatcagatgccgcatcgttaatggcggaaccattaagagcaaaaaaggtgttaacgtgccgggagtcgcgatttccctcccaggtattacggaaaaagacgccaacgacatcattttcgggatcgagcagggcatcgattttattgccgcttccttcgttcgtaaagcaagtgacgtgctggaaattcgcgaattgctgaagaagcacaatggcgagcacatccaaatcatctccaaaatcgagaaccagcagggcgttgacaacctggatgaaatcctggaagtatccgacggcttgatggtagcccgtggcgacctcggcgttgaaattccggctgaggaagttccattggttcaaaaacgcatgatcgaaaaatgtaacctggccggcaaaccggtcattacggctacgcaaatgctggattccatgcagcgcaacccgcgtcctacccgtgcggaagcaagtgacgttgccaatgcgattttcgacggaaccgatgccatcatgctctccggcgaaacggctgcaggtaaatacccggtggaatccgtattgacgatgtcccgcatcgcggaaaaagcggaatccgcactgaactatcgtgaattgttcttgaagcagcgcattgcacaagaaaccagcgtaaccgaagcgatcagccaatcggttgcgatttcggcactcgacctgaatgccaaagcgatcatttcgtctaccgaatctggtcaaacagctcgcatggtatccaaataccgtccacaggctcctatcgtcgccgtaacgactcaagaaagaacgctgagacgtttggcactgacttggggcgtaacgccggttaaaggcgagcaggcttcttctacggacgagatgtttgattatgcgctgcaaggcggcgtgaaatccggactcgtgaaagaaggcgaccttgttgtgattacggctggcgtgccgctgggacgttccggttccacgaacctgctgaaagtggaccaaattccacagcagaagtag

SEQ ID NO: 803 - protein, 475 aa, Geobacillus sp. Y412MC10
MRKTKIVCTIGPSSESLENTKKLIMAGMNVARLNFSHGDFEEHGNRIKNIRQACEELNKTVAILLDTKGPEIRTGKLEVEPIELVQDEYITLTTEEILGDKNRLSITYKELPQDVQVGSTILIDDGLIGLTVVEIQGTEIRCRIVNGGTIKSKKGVNVPGVAISLPGITEKDANDIIFGIEQGIDFIAASFVRKASDVLEIRELLKKHNGEHIQIISKIENQQGVDNLDEILEVSDGLMVARGDLGVEIPAEEVPLVQKRMIEKCNLAGKPVITATQMLDSMQRNPRPTRAEASDVANAIFDGTDAIMLSGETAAGKYPVESVLTMSRIAEKAESALNYRELFLKQRIAQETSVTEAISQSVAISALDLNAKAIISSTESGQTARMVSKYRPQAPIVAVTTQERTLRRLALTWGVTPVKGEQASSTDEMFDYALQGGVKSGLVKEGDLVVITAGVPLGRSGSTNLLKVDQIPQQK

SEQ ID NO: 804 - DNA, 1425 bp, Geobacillus sp. Y412MC10
  CDS (1)..(1425): transl_table=11
atggggccttttaagcgcaccaagatcgtggccaccctgggcccggccacggactccctagaggccatccgcgccctggccgaggcgggggcggacgtcttccggatgaacttcagccacggggctcccgaggaccacaagcggcgggcggcctgggtgcggcaggtctccgaggagctgggccggaccctggccctccttcaggacctccaggggcccaagattcgcatcggccgcttcaaggagggccgggtggagctaaagcccggccagcccttcgtcctcacccgcgttcccctcgagggggacgagacccgggtttccctcacctaccggggcctgcccgatgacgtggtgccgggccaggtcctcctcctggacgacgggcggatccgcctccgggtggagcgggtggtgggggacgagatccacaccgtggtggaggtggggggggtcctttccgacaacaagggcatcaacgtccccggggccgacctctccatccccgccctctcggagaaggacatccaggacctggccctgggagcggaagtgggggtggactgggtggccgtctccttcgtgcgcacccgggacgaccttcttctcgcccgccactacctggcccgctacggctcccgcgcccgcctcatggccaagattgagaagccctcggcggtggatcggtttgaggagatcctggaggaggcggacggcatcatggtggcccggggggacctgggggtggagatgcccctggaggaggtccccatcgtgcaaaagcgcatcatcctccggtgcatcgccgccgggaagcccgtgatcaccgccacccagatgctggagtccatggtgcaaaacccaagccccacccgggccgaggcctccgacgtggccaacgccatctttgacggcaccgacgccgtgatgctctccgccgagaccgccgccggcaagtacccggtggaggcggtggccatgatggcccggatagccaggacggtggaggcctccccggagtttatccagaagctcaacgtcctgaggcccgcccccacgcccaccacccaggacgccatcgcccaggccgccgacgacatcgtggaggcggtgggggccagggccatcgtggtcttcaccgccaccgggggctccgcccggcgcatcgcccgcaccaggccccaggtgcccatcctggccctgaccccaaacctcgaggtccgcaaccagctggccttggtctggggcgtgattccccacctggcccccgacccccgggacaccgacgacatggtgcgcctggccctcgaggccgtgaaggccctgggcctggcccaggtgggggagcgggtggtcatcgccgccggggtgcccttcggcgtgcggggcaccaccaacctcatccgggtggagcgggtggcctaa

SEQ ID NO: 805 - protein, 474 aa, Geobacillus sp. Y412MC10
MGPFKRTKIVATLGPATDSLEAIRALAEAGADVFRMNFSHGAPEDHKRRAAWVRQVSEELGRTLALLQDLQGPKIRIGRFKEGRVELKPGQPFVLTRVPLEGDETRVSLTYRGLPDDVVPGQVLLLDDGRIRLRVERVVGDEIHTVVEVGGVLSDNKGINVPGADLSIPALSEKDIQDLALGAEVGVDWVAVSFVRTRDDLLLARHYLARYGSRARLMAKIEKPSAVDRFEEILEEADGIMVARGDLGVEMPLEEVPIVQKRIILRCIAAGKPVITATQMLESMVQNPSPTRAEASDVANAIFDGTDAVMLSAETAAGKYPVEAVAMMARIARTVEASPEFIQKLNVLRPAPTPTTQDAIAQAADDIVEAVGARAIVVFTATGGSARRIARTRPQVPILALTPNLEVRNQLALVWGVIPHLAPDPRDTDDMVRLALEAVKALGLAQVGERVVIAAGVPFGVRGTTNLIRVERVA

SEQ ID NO: 806 - DNA, 1413 bp, Escherichia coli B171
  CDS (1)..(1413): transl_table=11
atgaaaaagaccaaaattgtttgcaccatcggaccgaaaaccgaatctgaagagatgttagctaaaatgctggacgctggcatgaacgttatgcgtctgaacttctctcatggtgactatgcagaacacggtcagcgcattcagaatctgcgcaacgtgatgagcaaaactggtaaaaccgccgctatcctgcttgataccaaaggtccggaaatccgcaccatgaaactggaaggcggtaacgacgtttctctgaaagctggtcagacctttactttcaccactgataaatctgttatcggcaacagcgaaatggttgcggtaacgtatgaaggtttcactactgacctgtctgttggcaacaccgtactggttgacgatggtctgatcggtatggaagttaccgccattgaaggtaacaaagttatctgtaaagtgctgaacaacggtgacctgggcgaaaacaaaggtgtgaacctgcctggcgtttccattgctctgccagcactggctgaaaaagacaaacaggacctgatctttggttgcgaacaaggcgtagactttgttgctgcttcctttattcgtaagcgttctgacgttatcgaaatccgtgagcacctgaaagcgcacggcggcgaaaacatccacatcatctccaaaatcgaaaaccaggaaggcctcaacaacttcgacgaaatcctcgaagcgtctgacggtatcatggttgcgcgtggcgacctgggtgttgaaatcccggttgaagaagttatcttcgctcagaagatgatgatcgaaaaatgtatccgtgcacgtaaagtcgttattactgcgactcaaatgctggattccatgatcaaaaacccacgtccaacccgcgcagaagcaggtgacgttgctaacgccattctggatggtactgacgcagttatgctgtctggtgaatccgcaaaaggtaagtatccgctggaagctgtttctattatggcgaccatttgcgaacgtactgaccgtgtaatgaccagccgtctggatttcaacaacgacagccgtaaactgcgtatcactgaagcagtttgccgtggtgcagttgaaactgcagaaaaactggatgctccgctgatcgttgttgcgacccagggcggtaaatctgcacgtgcggtgcgtaaatacttcccggatgcaaccatcctggcgctgaccaccaacgaaaaaactgcacatcagctggtgctgagcaaaggcgttgtgccgcagttggtgaaagaaatcacctctactgatgacttctaccgtctgggtaaagaactagctttgcagagcggtctggctcagaaaggtgatgttgtggtcatggtttctggcgcactggtaccgagcggcactactaacaccgcatctgttcacgtcctgtaa

SEQ ID NO: 807 - protein, 470 aa, Escherichia coli B171
MKKTKIVCTIGPKTESEEMLAKMLDAGMNVMRLNFSHGDYAEHGQRIQNLRNVMSKTGKTAAILLDTKGPEIRTMKLEGGNDVSLKAGQTFTFTTDKSVIGNSEMVAVTYEGFTTDLSVGNTVLVDDGLIGMEVTAIEGNKVICKVLNNGDLGENKGVNLPGVSIALPALAEKDKQDLIFGCEQGVDFVAASFIRKRSDVIEIREHLKAHGGENIHIISKIENQEGLNNFDEILEASDGIMVARGDLGVEIPVEEVIFAQKMMIEKCIRARKVVITATQMLDSMIKNPRPTRAEAGDVANAILDGTDAVMLSGESAKGKYPLEAVSIMATICERTDRVMTSRLDFNNDSRKLRITEAVCRGAVETAEKLDAPLIVVATQGGKSARAVRKYFPDATILALTTNEKTAHQLVLSKGVVPQLVKEITSTDDFYRLGKELALQSGLAQKGDVVVMVSGALVPSGTTNTASVHVL

SEQ ID NO: 808 - DNA, 1413 bp, Salmonella enterica subsp. enterica serovar Newport str. SL317
  CDS (1)..(1413): transl_table=11
atgaaaaagacgaaaattgtttgtactatcggtccgaaaaccgaatccgaagagatgttaagcaaaatgctggacgcgggcatgaacgtgatgcgtctgaacttctctcatggcgattatgcagaacacggtcagcgtatccagaacttacgcaacgtgatgagcaaaactggtaaaaaagccgctattctgcttgatactaaaggaccagaaatccgcaccattaaactggaaggcggtaacgacgtttcgctgaaagcgggtcaaacctttacttttaccaccgacaaatccgtgatcggtaataatgaaatcgttgccgtcacctatgaaggcttcaccagcgacctgagcgttggcaacaccgtcctggttgacgatggtctgatcggtatggaagtgaccgccatcgaaggcaataaagtcatttgtaaggtgctgaacaacggcgatctgggcgagaacaaaggcgttaacctgccgggcgtttctattgctctgccggcgctggctgaaaaagacaaacaggacctgatcttcggttgcgaacagggcgttgactttgttgcggcgtcctttatccgtaaacgttctgacgttgtcgaaattcgcgagcatctgaaagcccacggcggcgaaaacatccagattatctctaagatcgaaaaccaggaaggcctgaacaacttcgatgaaattctcgaagcttccgacggcatcatggttgcgcgtggcgacctgggcgtagaaatcccggttgaagaagtgatttttgcgcagaaaatgatgatcgaaaaatgtatccgcgcacgtaaagtcgtgatcaccgcgactcagatgctggattctatgatcaaaaacccgcgtccgacccgcgcagaagcaggcgacgttgcgaacgccatcctcgacggtacggatgcggttatgctgtccggcgaatccgcaaaagggaaatacccgctggaagccgtttctatcatggcgaccatctgcgaacgtaccgaccgtgtcatgaacagccgtctggactacaacaacgacagccgtaaactgcgcattacggaagcggtatgccgcggtgcggtagaaaccgccgaaaaactggaagcgccgctgatcgtggtagcgacccagggcggtaaatccgctcgcgccgtgcgtaaatacttcccggacgccaccatcctggcattgaccaccaatgaagtgaccgcccgtcagttagtactgagcaaaggcgtggtatcgcagctggtgaaagaaatcaattctactgatgatttctaccgtctgggcaaagatgtcgccctgcaaagcggcctcgcccagaaaggcgacgtcgtagtgatggtctccggcgcgctggttccaagcggcaccactaacaccgcctctgttcacgtactgtaa

SEQ ID NO: 809 - protein, 470 aa, Salmonella enterica subsp. enterica serovar Newport str. SL317
MKKTKIVCTIGPKTESEEMLSKMLDAGMNVMRLNFSHGDYAEHGQRIQNLRNVMSKTGKKAAILLDTKGPEIRTIKLEGGNDVSLKAGQTFTFTTDKSVIGNNEIVAVTYEGFTSDLSVGNTVLVDDGLIGMEVTAIEGNKVICKVLNNGDLGENKGVNLPGVSIALPALAEKDKQDLIFGCEQGVDFVAASFIRKRSDVVEIREHLKAHGGENIQIISKIENQEGLNNFDEILEASDGIMVARGDLGVEIPVEEVIFAQKMMIEKCIRARKVVITATQMLDSMIKNPRPTRAEAGDVANAILDGTDAVMLSGESAKGKYPLEAVSIMATICERTDRVMNSRLDYNNDSRKLRITEAVCRGAVETAEKLEAPLIVVATQGGKSARAVRKYFPDATILALTTNEVTARQLVLSKGVVSQLVKEINSTDDFYRLGKDVALQSGLAQKGDVVVMVSGALVPSGTTNTASVHVL

SEQ ID NO: 810 - DNA, 1425 bp, Cyanothece sp. PCC 7822
  CDS (1)..(1425): transl_table=11
atgaaattactgacacaccgaaccaaaattgtcgctaccatcgggcctgcaagtagttcccccgaaattctcaaacaaatgattgatgcgggaatgaacgtggcgcggctaaacttttctcatggaagctatgaagaccatgctcgtatggttttcttactgcgttctgtatctaaagagctagattaccccattacgctacttcaagatttacaaggtcccaaaattcgtgtcggacaattaccctccggacagattatgctcactgaaggagaatatatcactctagttccccaggccgaatttgacaatcaacctcatactatctctattgattatcctcatatagcccaagatgctcaacctggagaacaggtactcctcgatgatggactcttagaattacgagtagaggatattcaaggcaatgctgtgaaatgtaaaattattgaagggggtatcctcaaaagtcgtaaaggtgtcaattttcctcaattaaatttacgtcttccctcaatgactgaaaaagacgaaaaagatctcgaatttggcttatctcagggtatagattgggtatctcttagctttgtccgaaaaggcgaggatatacgctatttgaaaaactttttagccgccaaaggccaaggggatgttcctgtgatcgccaagattgaaaaaccgcaagccattgaccatttagaagagattgtgagcgaatgtgatggattaatggtggccagaggcgacttaggcgtagaaatgagtcccgaaaaagtgcctttactgcaaaagaaaattatccgcttgtgtaacctccaaaatcgtccagtgattacggcgactcagatgttagaaagtatgattcataacccccggcccacaagagccgaagcgtctgatgtggctaatgctatcattgatggaacagatgcagtgatgttatctggagagtcggcagtaggagactttccggtcaaagcggtagaaatgttggcaaaaattgccatatctgtagaaagagacgtggaatttattaatcatcccccctcagataatgatgaaactcacgcgctttcagaagctttaaatgccattgagaaaacgctggatctgcgctatattgtctcgtttaccagtacgggttacagcgctattttagcctctaaagaacgtccgtctgttccggttattgccatcactccttcagaaaaagtttatcatcgtttaaatttagtttggggggttattcctttattaattgaacagcaagttaatacttttgaagatttaattgagcaagtagaaaccaatttaatcgggcaaaatttagctgcgaagggcgataaaattttaattatgggaggtatccccactcaacaggcccgaaagactaactttttaaaaattcacaccattagtcattaa

SEQ ID NO: 811 - protein, 474 aa, Cyanothece sp. PCC 7822
MKLLTHRTKIVATIGPASSSPEILKQMIDAGMNVARLNFSHGSYEDHARMVFLLRSVSKELDYPITLLQDLQGPKIRVGQLPSGQIMLTEGEYITLVPQAEFDNQPHTISIDYPHIAQDAQPGEQVLLDDGLLELRVEDIQGNAVKCKIIEGGILKSRKGVNFPQLNLRLPSMTEKDEKDLEFGLSQGIDWVSLSFVRKGEDIRYLKNFLAAKGQGDVPVIAKIEKPQAIDHLEEIVSECDGLMVARGDLGVEMSPEKVPLLQKKIIRLCNLQNRPVITATQMLESMIHNPRPTRAEASDVANAIIDGTDAVMLSGESAVGDFPVKAVEMLAKIAISVERDVEFINHPPSDNDETHALSEALNAIEKTLDLRYIVSFTSTGYSAILASKERPSVPVIAITPSEKVYHRLNLVWGVIPLLIEQQVNTFEDLIEQVETNLIGQNLAAKGDKILIMGGIPTQQARKTNFLKIHTISH

SEQ ID NO: 812 - DNA, 1506 bp, Zea mays
  CDS (1)..(1506)
atgtatagtgaggctagtagtgaaatcccttcacaggcagctattgcaaattctaggaggaagacaaagatagtatgcaccataggtccctcaaccaacactcgtgagatgatttggaagcttgcagagactggaatgaatgtagcacgccttaatatgtcccatggtgaccaccagtcacaccagaaggttatcaatttggtcaaggagtacaatgcacagaacactgatggaaatgttattgccatcatgctggacactaagggtcctgaagttagaagtggggatgttccagagccaattatgctcagtgaagggcaagagttcaatttcacaattaaaagaggggtgagcactgaagacactgtcagcgtgaactatgatgacttcataaatgatgttgaagctggtgacatactgttagtggatggaggaatgatgtcgcttgctgtgaagtctaaaacagctgatacagtcaagtgtgaagtagttgacggcggggaattgaaatcaaggcgccacctaaatgttcgtggaaaaagtgctactttgccatctatcactgagaaggattgggaagacataaaatttggtgtcgaaaacggtgttgatttctatgcagtttcctttgtgaaggatgccaaagttatccatgaattaaaggactacctaaaaggtgttaatgcggatatacatgtcattccaaaaattgaaagtgcagactcaataccaaatctgcagtccattattgctgcttcagatggggcaatggtggcacgtggagaccttggtgctgaacttccgattgaggatgttcctttgctacaggcagagattgttcaaacatgtcgaaacatggagaaaccagttattgtcgccacaaatatgttggaaagcatgattgaccatcctactccaactagggcagaagtttctgacatagctattgcagtcagggaaggtgctgatgccatcatgttatctggtgaaactgctcatggaaagtacccactaaaggcagtcaaggtgatgcacactgtggccctcagaacagaatccagcatttataacccaactacttcccctagtgttatagcatctgcacagggtctacagaacgaggagttttccccaagccagctaagtaaaatgtttggatcccatgcaactatgatggccaacacccttcggacaccaatcattgtatttacgcagacaggctccatggctgtcctcctgagccactatcgtccctcgtctacaatatttgcgtttacaaacgaggaacgagtgaagctacggctagcactctaccagggggtcatccctattcacatggagttctctgacgacgcagaagaaactttctccagagcaattagcagcttgctgaaagcacaatatgtgaagaagggagactacgtcactcttgttcagagcggagtgacttcaatctggagagaggaatccactcacaacatccaagtgaggagagctcaggtctga

SEQ ID NO: 813 - protein, 501 aa, Zea mays
MYSEASSEIPSQAAIANSRRKTKIVCTIGPSTNTREMIWKLAETGMNVARLNMSHGDHQSHQKVINLVKEYNAQNTDGNVIAIMLDTKGPEVRSGDVPEPIMLSEGQEFNFTIKRGVSTEDTVSVNYDDFINDVEAGDILLVDGGMMSLAVKSKTADTVKCEVVDGGELKSRRHLNVRGKSATLPSITEKDWEDIKFGVENGVDFYAVSFVKDAKVIHELKDYLKGVNADIHVIPKIESADSIPNLQSIIAASDGAMVARGDLGAELPIEDVPLLQAEIVQTCRNMEKPVIVATNMLESMIDHPTPTRAEVSDIAIAVREGADAIMLSGETAHGKYPLKAVKVMHTVALRTESSIYNPTTSPSVIASAQGLQNEEFSPSQLSKMFGSHATMMANTLRTPIIVFTQTGSMAVLLSHYRPSSTIFAFTNEERVKLRLALYQGVIPIHMEFSDDAEETFSRAISSLLKAQYVKKGDYVTLVQSGVTSIWREESTHNIQVRRAQV

SEQ ID NO: 814 - DNA, 1434 bp, Microcoleus chthonoplastes PCC 7420
  CDS (1)..(1434): transl_table=11
atgaaacctctaagtaatcgcactaaaatcgttgccactattggtccggcgagtaattcaccagacgttctcaagcaaatggtgcaagcaggaatgaatgtagcacggttaaacttctcccatggtagctacgatgaccatgctcacaccatttctttgctacgttctattgaagaggaattagatacaccgattacgttactccaagacctacaaggaccgaaaattcgagtcgggaaactgcccgatgcaggacttaacttggttcaaggagaatccatttccttagttcccgtttctgaattcaatcatcaaccgaaaaccgttgctatcgactatccccacctggctcaagaagcagaacctggagtgcagattctcctggatgatggacttttagaactgcgggttgaggacattgagggcaataccgttaaatgtcaagttgtcgaaggggggatactcaaaagccgtaaaggggttaacctgcccggattgagcctaaatcgcctaccctcaatgactgacaaagacaaacaagatttagaatttggcattgctcaaggggttgactgggtgtccttaagctttgtgcgttctgcggaagatattcgtactctcaaaggatttctccagcaacacaatgcctcatccctacctgtgattgccaaaatcgaaaaacctcaggcgatcgcgaacttagaagccattatcaatgagagcgatgggatcatggtagcacggggcgatttgggtgtagaaatgagtccggaaaaagtgccgtttctgcaaaagaaaattattcggatttgtaaccaaaaggggattccggtaatcacagccacccaaatgctcgatagtatgattaataatccccgtccaactcgtgctgaagccagtgatgtggcgaatgcaattatcgatggcaccgatgcggtgatgctgtctggggagtcagccgtgggtaaatatcccctgaaagcggtgacgatgctagcccgtattgccacggatgtggaaccagaaattaagtttgttaactatcccccagccgcaaccaatgaagccaatgccctaagtgaagcgctcaacacgattgataaaattctggatttgcgctgtattgcggctttcaccagtaccggtcacaccgccaaactagccgccgccgagcgtccaggagtccctgttatttctctgactcctaatcggaaagtttaccacaatttgaatttggtttggggggtaaaaccattgttactcgagcaagaagttgagtcctttgaagagttagtgaatcaagcccaaactcagttactcaaacggaatttagtggtagaaggagataaaattttaattatcgctgggattccggcaaaagtctcaggcgggactaacttgctcaagattcatacgattagcgccgaatcctaa

SEQ ID NO: 815 - protein, 477 aa, Microcoleus chthonoplastes PCC 7420
MKPLSNRTKIVATIGPASNSPDVLKQMVQAGMNVARLNFSHGSYDDHAHTISLLRSIEEELDTPITLLQDLQGPKIRVGKLPDAGLNLVQGESISLVPVSEFNHQPKTVAIDYPHLAQEAEPGVQILLDDGLLELRVEDIEGNTVKCQVVEGGILKSRKGVNLPGLSLNRLPSMTDKDKQDLEFGIAQGVDWVSLSFVRSAEDIRTLKGFLQQHNASSLPVIAKIEKPQAIANLEAIINESDGIMVARGDLGVEMSPEKVPFLQKKIIRICNQKGIPVITATQMLDSMINNPRPTRAEASDVANAIIDGTDAVMLSGESAVGKYPLKAVTMLARIATDVEPEIKFVNYPPAATNEANALSEALNTIDKILDLRCIAAFTSTGHTAKLAAAERPGVPVISLTPNRKVYHNLNLVWGVKPLLLEQEVESFEELVNQAQTQLLKRNLVVEGDKILIIAGIPAKVSGGTNLLKIHTISAES

SEQ ID NO: 816 - DNA, 1428 bp, Microcoleus chthonoplastes PCC 7420
  CDS (1)..(1428): transl_table=11
atgcgtcgcactaaaattatctgtaccattggaccggctaccgcctcacccgaacgcctcgatgccttaatcgaagcggggatggatgtttcccggttaaacttttcccacggttcccatgagtttcacggacagacgattcagcaactccgagcaattagtagccaacatcgcaaacccctcgccttgctgcaagatttatgcggaccgaaaattcgtctgggaaaactgcctcccgatgggattaaggtgcaaacgggtgatgaagtaacctttgtgttaaatgaggaaggcaacaacccggatgagattcccttacccattcccaccctgtttgctatggtgcgcgtgggtgaaccgatttcaattaatgatggtcgagtcaagctgatagtcacggaacgggatacagatagtattcgggcattggtgaaaattggtggactcttgtcttctaaaaagggggttaacttacctgaaacctatttacctgtcacctccgtcaccgaaaaagacatgaccgatttacggtttgggttgcaatcgggtatcgactgggtggcggtgtcttttgtgcgaagcgccagtgatttagaacccgtgcggcggatgattgaagccgcaggcgcgaaaacccgtgtgattgccaaaattgaaaaacgggaagcggtggaaaacttagaggaaatcctccaggttgcggatggaattatgattgctcgcggtgacttgggggtagagacgccattggatcgggtacctttaattcaaaaagaaattactcgtcgctgcaaccaactcggtaaacctgtgattacagccacccagatgctagagtcaatgatcaacgctcctgatccgacgcgggctgaagccacagatgtcgccaactcaattttagatgggacggatgcggtaatgctttcgggtgaaaccgccgtgggagaatatcccatcgctgctgtggaaatgatgaacaatatagctatccagacggaaaaagccctagccgaaggattgcaaaccgcgtcagagtttcccagttgcagtattagcaccaccgaatccgtagccgaagccgcttgtcatattgccagtcaattaggcgcacggggaattatgtgcaacacctcatccggcggttccgcccgactggtgtctaagtatcgccccaaaaccccgattattgcctttacgccagaagaaagtacctatcgtcagttggctttgtcttggggagtgcaaccttatctgattacccctgtatacaatgccgaacagatgttaactaatgtggtaaatgctgcggtggagatggagttagccgaatacggggacaaagtggtaattacctccggtgttcccattggtacgccaggaaccacgagtctgatcaaagtccacaagattggacaggcgatcgcctaa

SEQ ID NO: 817 - protein, 475 aa, Microcoleus chthonoplastes PCC 7420
MRRTKIICTIGPATASPERLDALIEAGMDVSRLNFSHGSHEFHGQTIQQLRAISSQHRKPLALLQDLCGPKIRLGKLPPDGIKVQTGDEVTFVLNEEGNNPDEIPLPIPTLFAMVRVGEPISINDGRVKLIVTERDTDSIRALVKIGGLLSSKKGVNLPETYLPVTSVTEKDMTDLRFGLQSGIDWVAVSFVRSASDLEPVRRMIEAAGAKTRVIAKIEKREAVENLEEILQVADGIMIARGDLGVETPLDRVPLIQKEITRRCNQLGKPVITATQMLESMINAPDPTRAEATDVANSILDGTDAVMLSGETAVGEYPIAAVEMMNNIAIQTEKALAEGLQTASEFPSCSISTTESVAEAACHIASQLGARGIMCNTSSGGSARLVSKYRPKTPIIAFTPEESTYRQLALSWGVQPYLITPVYNAEQMLTNVVNAAVEMELAEYGDKVVITSGVPIGTPGTTSLIKVHKIGQAIA

SEQ ID NO: 818 - DNA, 1785 bp, Microcoleus chthonoplastes PCC 7420
  CDS (1)..(1785): transl_table=11
atgcaactgtacacatcccggcgtcgaaccaagattgtagccacgattggtcctgctaccagtcatccagagatactcagagacctgattaaagcaggtgcgacaacgttacggctcaacttttcccatggcactcatgatgaccatcagcgtagcattcgcctgattcgccaaacggcatttgaactgaatcaacccgtaggtatcctgcaagacttacaaggaccgaaaatccgtttaggcaaatttgagaacggttcgattacactagaacgaggcgatcgcttcaccttaaccagtgaacccctaatcggcactcaagagatcagttccgtcacataccaacccctcgctgatgaagtccccaacggtgcgacgattctcttggatgatggcagagtggagatgcgggtagaagagattaatcgcgagaaacgcgccttacactgtcgggtcgttgtcggtgggacgctctccaataacaaaggggtcaactttccaggggtctacctctccattcgcgccctcacggataaagaccgccgggatttgatgtttggcttagaccaaggggtcgattgggtcgcccttagctttgttcgcaatcctcaagatgtgctggagatcaaagaactgattaccagcgccgggaaagatgttccggttattgtcaagattgaaaagcacgaagccatagaacaaatggatgctatcctctccctcgccgatggggtgatggtggcgaggggtgacttaggggtagagttaccggctgaggatgtacctatcttacaaaagcggctaattaccaccgccaatcgtctgggaattcccgtaattaccgccacccagatgctggatagtatggtcaactctccacgcgctacccgtgcagagatttccgatgtagcaaatgccattttagacgggactgacgccgtaatgctgtccaatgaaaccgccgtggggaactatcccgtcgaagcggtatcgacgatggcaaaaattgctacccgtatcgaacaagaggaaattgtgcggaatatggaagatacccgccgttcaattcccaatgcgatatcccaggcggtgggtcaaattgccgaacagttacaagcctgtgcgattatgaccttaaccaaaacgggttccacagcaagaaatgtctccaagtttcgcccctcgactccaattctggcggtgactccccatgtggatgtggcgcgacaactgcaattggtgtggggaattcgccccctattggtgctggatttaccctcaacgggtcagacattccaagccgcgattaatgtcgcccaggaaaaacagcttgtcgctgagggggatttggtggtgatgacggctgggacattgcaaggggttccaggttcgacggatttaattaaagtggaagtggtcacggctgtcctgggtcaagggattggtattggtaaaggttcagtgagtggtttagcgcgggtggcgtatagtgctgcagaggtgagtaactttagtccaggtgaaatcttggtggttccgtcaaccagtgcggattttgttgataccatgcggaaagcctccggagtggtgacggaggaagatagtttaaccagtcatgcggcggtgattggaatgcgcttgggggttccggtgattgtcggcgtgaaaaatgcgactcagcggattcgagatggggcgattatcaccctggatacccagcgcggtttagtctattctggggcgatggcggcgagtccagctagcagtggggcggtcatggtttga

SEQ ID NO: 819 - protein, 594 aa, Microcoleus chthonoplastes PCC 7420
MQLYTSRRRTKIVATIGPATSHPEILRDLIKAGATTLRLNFSHGTHDDHQRSIRLIRQTAFELNQPVGILQDLQGPKIRLGKFENGSITLERGDRFTLTSEPLIGTQEISSVTYQPLADEVPNGATILLDDGRVEMRVEEINREKRALHCRVVVGGTLSNNKGVNFPGVYLSIRALTDKDRRDLMFGLDQGVDWVALSFVRNPQDVLEIKELITSAGKDVPVIVKIEKHEAIEQMDAILSLADGVMVARGDLGVELPAEDVPILQKRLITTANRLGIPVITATQMLDSMVNSPRATRAEISDVANAILDGTDAVMLSNETAVGNYPVEAVSTMAKIATRIEQEEIVRNMEDTRRSIPNAISQAVGQIAEQLQACAIMTLTKTGSTARNVSKFRPSTPILAVTPHVDVARQLQLVWGIRPLLVLDLPSTGQTFQAAINVAQEKQLVAEGDLVVMTAGTLQGVPGSTDLIKVEVVTAVLGQGIGIGKGSVSGLARVAYSAAEVSNFSPGEILVVPSTSADFVDTMRKASGVVTEEDSLTSHAAVIGMRLGVPVIVGVKNATQRIRDGAIITLDTQRGLVYSGAMAASPASSGAVMV

SEQ ID NO: 820 - DNA, 1812 bp, Synechococcus sp. PCC 7335
  CDS (1)..(1812): transl_table=11
atgcgatctcatctgggaaaggcgctgacagcacgcccagccttgcgtcgaaccaaaatcgtcgcaaccataggccctgccacccaggaccctgacacacttagagcaattatcgaggcaggcgcaacgacccttcggttaaatttctcgcacggtgacaaagagaaccaccgtcaaaacattcagctaatccgtcaaatttcctttaagttgcagcagccagtaggcatcttacaggatcttcagggacccaaaattcgcctagggcaattcgaagagggagctatttggttatctaaaggagatagctttattcttactagtcgcaaaattccaggcactcaaactgagagctcggtcacctatgagccgctagtcgaagaagttccagaaggcgcaactatcttgcttgatgatggcaaagtagagatgaaggtagttggaaaagacatcgcacagcgcaacttgaagtgtgaggttgtcgttggtgggaagctttcaaatagcaaaggtgtcaactttccgggcgtttatctatcgatcaaggcgctcaccgaaaaggataaagaagatctacagtttggtctaaatcagaatgtggactgggtagcgctgagctttgtacgtaatccccaagacgtcttagaaattaaagagatcatccaaagctctacgaatcgccgggtgccggtaattgtaaagattgaaaagcacgaagcgattgagcagatggacgcaatcctgtcgctctcagacggggttatggtggctcggggagatctcggtgtagagctgccggctgaggatgtgccgatcttgcaaaagcgactaatcgcaacagcaaaccgattgggcattccggtgattacagctactcagatgctagatagtatggtagagagcccaaggccaactagggcagaagtttcggatgtagcaaatgctatttttgacgggaccgatgcggtgatgctttcgaatgaaacagctgtcggtgactatccagtagaagccgttgctacgatggcacgaattgcgctccgggccgaacaagagcaacaagtgcgctctattgacgaatttaacaaaagtcatacgattccgaatgcgattagtcaggcggtagggcagattgcggctcagctagatgcatcagccatcatgacactgactagatcaggcgcaaccgcacgtaacgtatcaaagttccgaccacgagctcccattttggcggtaacaccgctagtagatgtttctcggcagcttcaggtagtttggggagtgaatccactgctagttgttgatttgcattcttcagggcaaactttccaggcggcgatgaacgtagctcaagaagatggattgcttaatgacggcgatctcgtggtgatgacagcaggtacgctacagggtgtttctgggtctaccgacctgatcaaagtcgaggtggtaacagccgtgattggctctggtcgaggcgttggcgaaggctccgtgagcggtcgagcccgcgtcgcccacgatacagcagcaatcaaagactttaatacgggtgagattttggtggtaccacgaacaagtgcggactatgtcgatgcgattcgtagagcaggtggcatcgtcactgaggatgatagcttaacgagccatgcggcggtgttgggtctgcgactaggaattccggtaattgtcggggtaaatagggccaccgagatcatccgaaatggcaccattgtgacgctagatgtaagtaacggagtagtttgctctggaacgttcacctcaccacaagaagaagtcgcactaggttag

SEQ ID NO: 821 - protein, 603 aa, Synechococcus sp. PCC 7335
MRSHLGKALTARPALRRTKIVATIGPATQDPDTLRAIIEAGATTLRLNFSHGDKENHRQNIQLIRQISFKLQQPVGILQDLQGPKIRLGQFEEGAIWLSKGDSFILTSRKIPGTQTESSVTYEPLVEEVPEGATILLDDGKVEMKVVGKDIAQRNLKCEVVVGGKLSNSKGVNFPGVYLSIKALTEKDKEDLQFGLNQNVDWVALSFVRNPQDVLEIKEIIQSSTNRRVPVIVKIEKHEAIEQMDAILSLSDGVMVARGDLGVELPAEDVPILQKRLIATANRLGIPVITATQMLDSMVESPRPTRAEVSDVANAIFDGTDAVMLSNETAVGDYPVEAVATMARIALRAEQEQQVRSIDEFNKSHTIPNAISQAVGQIAAQLDASAIMTLTRSGATARNVSKFRPRAPILAVTPLVDVSRQLQVVWGVNPLLVVDLHSSGQTFQAAMNVAQEDGLLNDGDLVVMTAGTLQGVSGSTDLIKVEVVTAVIGSGRGVGEGSVSGRARVAHDTAAIKDFNTGEILVVPRTSADYVDAIRRAGGIVTEDDSLTSHAAVLGLRLGIPVIVGVNRATEIIRNGTIVTLDVSNGVVCSGTFTSPQEEVALG

SEQ ID NO: 822 - DNA, 1437 bp, Ruminococcus lactaris ATCC 29176
  CDS (1)..(1437): transl_table=11
atgaaaaagacgaaagtagtatgtacgatgggacccaatacgaatgataaagaactgatgagaaagctgatccggaatggaatggatgtggcacgtttcaatttttcccacggagatcatgcagagcagaaaagccgtatggatcttctgaaggagcttcgtgaggaggagcattctaatgttgcgatcctgctggataccaaaggaccggagatccgtaccggactgctgaaggacggaaagaagatcatgctggaggccggaaagaaatttacgcttacgacagaagaggtggcaggagatgagaatatcgtatctatttcttatccgggactgatcaatgatgtgagcaggggaaagacaatcctgatcgatgacggactgatcggactgaaagtagtcgagaagaaagaaaaagaactgatctgtgagattatcaacggtggagagcttggtgagagaaaaggtgtgaatgtgccgaatgtaccgatccgtcttccggcgatcacagagaaggataaagaagatatcaagtttggtgcagagcagggaattgattttatcgcagcatcctttgtgagaaatgcagagtgtatcctggagatcagggcttatctgaagtctctcggagcaccgttcattccgatcattgcaaaagttgaaaattcagagggaattgacaatattgatgaaattatccgtgcagcagacggtgttatggttgcccgtggagatctcggtgtggagattccggcagaggaagttccatatttgcagaagatgatcattcagaagtgtaacagtcactttaagacagttattacagcaacccagatgctggattccatgatgcggaatccacgtcctacaagagccgaggtaacagacgttgccaatgctgtttatgacggaacagatgcagtgatgctttccggtgagactgcacagggcaagtacccggtggaggcacttcagatgatggttcatatcattgaaaatacagagcagcacttagattatgaggagatgcttgagaaggagtatggtcatttaaagagcggtgtatccagtgccattggatattcctccgtacttgctgctgcaaatctgaatgcaaagtgtattctgacgccaactgtttcgggtgcaactgcaagggtggtttccaatttaagaccgagacaggagattcttggaatcacaccgaacgaaagaactttaagaagaatgtccatatactggggagtcagaccgctgaagtctctggagcatgacaatacggaggatatctgcgagaatgctatggagcttgcaaaagtaaagaagtatgtagagcagggggatgtagttgtcctgacggcaggaatcccttctccgaatgtaggaaaagaaagaagttatacaagcaatatgatgcgaattgctacgatcgactga

SEQ ID NO: 823 - protein, 478 aa, Ruminococcus lactaris ATCC 29176
MKKTKVVCTMGPNTNDKELMRKLIRNGMDVARFNFSHGDHAEQKSRMDLLKELREEEHSNVAILLDTKGPEIRTGLLKDGKKIMLEAGKKFTLTTEEVAGDENIVSISYPGLINDVSRGKTILIDDGLIGLKVVEKKEKELICEIINGGELGERKGVNVPNVPIRLPAITEKDKEDIKFGAEQGIDFIAASFVRNAECILEIRAYLKSLGAPFIPIIAKVENSEGIDNIDEIIRAADGVMVARGDLGVEIPAEEVPYLQKMIIQKCNSHFKTVITATQMLDSMMRNPRPTRAEVTDVANAVYDGTDAVMLSGETAQGKYPVEALQMMVHIIENTEQHLDYEEMLEKEYGHLKSGVSSAIGYSSVLAAANLNAKCILTPTVSGATARVVSNLRPRQEILGITPNERTLRRMSIYWGVRPLKSLEHDNTEDICENAMELAKVKKYVEQGDVVVLTAGIPSPNVGKERSYTSNMMRIATID

SEQ ID NO: 824 - DNA, 1785 bp, Cyanobium sp. PCC 7001
  CDS (1)..(1785): transl_table=11
atgccccagcccgatctcatgcgtcgcaccaagatcgtcgccacgatcgggcccgccaccgaatctcccgaacgtctcaaggcactcatcgaggccggcgccaccaccttccggctcaacttctcccacggcgaccacagcgaccacgccgcccgcatcgccacaatccgccaggtttcggtggagatgggcgtgcatgtggggattcttcaggatctccagggtccgaagatccgcctgggtcgattcgccgatggcccgatcaccctggcccggggtgccagcttcagcctcacctcccgggacgtggcctgcaaccaggagatcgccaccgtcacctacgccaagctggccgatgaggtgaccccgggcagccgcatcctgttggatgacggccgcgtggagatgtgcgtggaatcggtgaacacggccgatcacaccctccattgcagcgtcagcgtgggtggggtgttgagcaacaacaaaggggtgaacttccccgatgttcagctctcgatccgcgccctcaccgacaaggatcgggccgatctcaccttcggactgcagcacggcgtggactgggtggccctcagcttcgtccgcaacccctccgacctccaggagatcaaggatctgatcgccagccagggccataccacgcccgtggtggccaagatcgagaaattcgaggccatcgatcagatcgacgacatcctgatgttgtgcgatggcgtgatggtggcccgcggcgatctcggggtggagatgccggctgaggaagtgccgctgctgcagaaggaactgatccgcaaggccaacagcctggggattccggtcatcaccgccacccagatgctggattcgatggtgagctgcccgcggcccacccgcgccgaggtgagtgatgtggccaacgccatcctcgatggcacggacgccgtgatgctctccaacgagagtgccgtgggcgactacccggtggaggcggtggccaccatggccacgatcgcccgtcgcatcgagcgcgactaccccaagcggctgatcgacagccgcatggccaccaccattcccaacgccatctgccaggcggtgagcaacatcgcccgcaacctcaacgcggcggcgatcctgcccctcaccaagagcggtgccaccgcccgcaacgtgagcaagttcaggcccagcaccccgatcctggcggtgaccagcgagccccaggtagcccgccagctgcagctgatctggggggtgaatccgctgctcgtgcccgagcagacctccaccaccagcaccttcagcctggcgatgggcctggcccgcgacggcggtttccttcaggacggcgacctggtggtgcagaccgcgggcaccctggccggtgtgagcgggtccaccgacttcatcaaggtgggcatcgtgactgcggtgctgccccgcggcctgggcatcggcaccggctcggtgagcgggcgggtgcgggtcgtgacccgggccgaggatgccgccgccatccagaccggcgagatcctggtggtgcgggagaccagcgccgccttcgtggaggccttccgccgggccaaggccgtgatcgccgagacgggcggtgccgaaagccacgctgccgtgatcgcccagcgcaccggcatcccggcgatcgtgggcgtcaccaacgccctcgagagcctgcgcgacggggagatcgtgaccctggacctgcaccacggcctggtgcaccgcggcgcccgcagccacaacgccgacccgatcggcgccatcgtctag

SEQ ID NO: 825 - protein, 594 aa, Cyanobium sp. PCC 7001
MPQPDLMRRTKIVATIGPATESPERLKALIEAGATTFRLNFSHGDHSDHAARIATIRQVSVEMGVHVGILQDLQGPKIRLGRFADGPITLARGASFSLTSRDVACNQEIATVTYAKLADEVTPGSRILLDDGRVEMCVESVNTADHTLHCSVSVGGVLSNNKGVNFPDVQLSIRALTDKDRADLTFGLQHGVDWVALSFVRNPSDLQEIKDLIASQGHTTPVVAKIEKFEAIDQIDDILMLCDGVMVARGDLGVEMPAEEVPLLQKELIRKANSLGIPVITATQMLDSMVSCPRPTRAEVSDVANAILDGTDAVMLSNESAVGDYPVEAVATMATIARRIERDYPKRLIDSRMATTIPNAICQAVSNIARNLNAAAILPLTKSGATARNVSKFRPSTPILAVTSEPQVARQLQLIWGVNPLLVPEQTSTTSTFSLAMGLARDGGFLQDGDLVVQTAGTLAGVSGSTDFIKVGIVTAVLPRGLGIGTGSVSGRVRVVTRAEDAAAIQTGEILVVRETSAAFVEAFRRAKAVIAETGGAESHAAVIAQRTGIPAIVGVTNALESLRDGEIVTLDLHHGLVHRGARSHNADPIGAIV

SEQ ID NO: 826 - DNA, 1767 bp, Lactobacillus rhamnosus HN001
  CDS (1)..(1767): transl_table=11
atgaaaaaaaccaagatcgtcagcacacttggacctgcaagtaacaccactgatatcatcgttaagttgattgaagcgggtgccaacgttttccgtttcaacttctcacatggtgatcatgaagagcatttggcacggatgaacatggttcacgaagctgaaaagatcacgggcaaaaccgttggtatcatgcttgatacaaagggtgccgaaattcggacgactgttgaggatacccctaatggcaagattgaattccatacgggcgataaggttcgtatctccatggatgcaagcctgaagggtactaaggaaaaggttgccgttacttatcctggtctttatgatgatacccatgttggtggccacgttttgttcgatgatggcttgatcgacatgaagatcaccgaaaaagatgagaagaaccgcgaacttgtcaccgttgttcaaaatgacggtgttcttggtggcaagaaaggggtcaacgcacctggtgttgcgatcaacttgccaggtatcacagagaaggattccaacgatattcgttttggtctggacaatggcattaactttattgctgcatccttcgttcgtaagcctcaagatgttttggacattcgtgaactccttgaagaaaagaacgcacttaatgtccaaatcttccctaagatcgaatctcaagaaggtatcgacaatatcgatgacatcttgaaagtgtctgacggcttgatggttgctcgtggcgacatgggtgttgaaattccatttgaacatgttccgatcgttcaaaagcgcttgatcaagaagtgcaacgctttaggcaaaccagttattaccgctacccagatgttggattccatgcaggaaaacccacgtcctacccgtgccgaagttaatgacgttgctaacgctgtctttgatggcaccgatgcaaccatgctttccggtgaatctgctaatggtgagtatccagttgaatctgttgctgcaatggcacggattgatgaatacaccgaagcagctatgcaggatcaggatgcttttgcattgaaggaatacagtaacaagaacattaccgaagcagtaggtcagagtgttgcacacacggctcgtaaccttggtgttaagaccattgttgctgctactgaatctggctacaccgcacggatgatctccaagtatcgtcctaaggctgatattcttgcgattaccttcagtgaaaagactcagcgtggtttgatggtcaactggggtgtttatcctattgttgccgacaagcctgccaacactgatgcaatgtttgacttggctaccaagaaggctcaagatcttggctttgctaaggaaggcgacttgattctgattacagccggtgttccagttggcgaatcaggtacgactaatgtcatgaaggttcaactgatcggttccaagctggttcaaggctctggtgtcggtgatgaatctacaattggtaaagctgttattgcaagcaacgctcaggaagccgctgccaagatgcaaaaaggcgacattctggttgttaagacaactgacaaagactacctgccagcaatcgaaaaggccgctgccttggttgttgaaacaggcggcttgaccagtcacgctgctgttgtcggcatcgcgatgggtattccggttgttgttggtgctgaaaatgctaccagcgttatctctgatggtcagattatcaccgttgattcacgtcgcgggattgtctacaagggtgctactaacgcactttaa

SEQ ID NO: 827 - protein, 588 aa, Lactobacillus rhamnosus HN001
MKKTKIVSTLGPASNTTDIIVKLIEAGANVFRFNFSHGDHEEHLARMNMVHEAEKITGKTVGIMLDTKGAEIRTTVEDTPNGKIEFHTGDKVRISMDASLKGTKEKVAVTYPGLYDDTHVGGHVLFDDGLIDMKITEKDEKNRELVTVVQNDGVLGGKKGVNAPGVAINLPGITEKDSNDIRFGLDNGINFIAASFVRKPQDVLDIRELLEEKNALNVQIFPKIESQEGIDNIDDILKVSDGLMVARGDMGVEIPFEHVPIVQKRLIKKCNALGKPVITATQMLDSMQENPRPTRAEVNDVANAVFDGTDATMLSGESANGEYPVESVAAMARIDEYTEAAMQDQDAFALKEYSNKNITEAVGQSVAHTARNLGVKTIVAATESGYTARMISKYRPKADILAITFSEKTQRGLMVNWGVYPIVADKPANTDAMFDLATKKAQDLGFAKEGDLILITAGVPVGESGTTNVMKVQLIGSKLVQGSGVGDESTIGKAVIASNAQEAAAKMQKGDILVVKTTDKDYLPAIEKAAALVVETGGLTSHAAVVGIAMGIPVVVGAENATSVISDGQIITVDSRRGIVYKGATNAL

SEQ ID NO: 828 - DNA, 1422 bp, Arthrospira maxima CS-328
  CDS (1)..(1422): transl_table=11
atgaaacctttaaaccgtcgaaccaaaattgtagctaccattggtccagctagtaattctcctgaagttctttatcaaatgattaaagcggggatgaatgtagtacgcctcaacttctcccatggtagccatgaacaacacacgaaaacggtcgccctactgaaagaaatttcacaggagttaaaaacgtctatcacgctattacaagacctacagggtccgaaaattagggtaggacagcttcctgatggtggtatacaattgatagcgggagaatatattaccctggttcctattgacgaatacaagagtaaacctaatacgattgcgatcgactatctgcacctgggagaagaagcagaaatcggtgcccaggttctgctagatgatggattattggaattgaaggttgaggaaatttccggtaatcaagttaaatgtaaaatccttgaaggggggactctgaaaagccgtaaaggggttaaccttcccagtttaactctacgtttaccgtctttaactgaaaaagatcagcaagatttggaatttgggatttctctaggtgttgattgggtgtctcttagctttgtgcggaacgcagaagatgtgcgagttcttaaagactttttagcgtccaaaaatgcgtcacaaatatcggtgatggccaaaatcgaaaaacctcaagcgatcgctaatttagaggagattatttccgagtgtaatggtttaatggtagcccggggtgatctgggggtcgaaatgagtcccgaaagagtcccactactgcaaaaacaaattattcgcctttgcaatcaaaaagggattccagtaattacagctactcaaatgctggacagtatgatcaataatccccgtccgacaagggctgaagcgtctgacgtagctaatgcaattattgatggaactgatgcggtgatgttatcaggggaatcagcagttggtaaatatccgattcgggctgtggaaatgttagcgaaaattgcggaggatgtggaaccggaaatcaatttcatcaactacccacccgcgttcaatgatgagacccatgctatcagtgaagcgataaataccattgataaaattatcgatctacattgtattattgcctacacctgtagtggttatactgggcaattagcggcggctgaacgcccgaaagcgcctgtggttgccttaactcctaatcccaaggtttaccatcgtttaaacctggtttggggtgtgaaacctctgctgctggaacaggaggtagaatcctttgaggaactgatcaatcaagcccaaacttatctattagtgcgccaaatggcttcccccggagacaaaattttgattattggtggtatcccttctgggaaggctaagggaaccaattttatcaaaatccacaccataggataa

SEQ ID NO: 829 - protein, 473 aa, Arthrospira maxima CS-328
MKPLNRRTKIVATIGPASNSPEVLYQMIKAGMNVVRLNFSHGSHEQHTKTVALLKEISQELKTSITLLQDLQGPKIRVGQLPDGGIQLIAGEYITLVPIDEYKSKPNTIAIDYLHLGEEAEIGAQVLLDDGLLELKVEEISGNQVKCKILEGGTLKSRKGVNLPSLTLRLPSLTEKDQQDLEFGISLGVDWVSLSFVRNAEDVRVLKDFLASKNASQISVMAKIEKPQAIANLEEIISECNGLMVARGDLGVEMSPERVPLLQKQIIRLCNQKGIPVITATQMLDSMINNPRPTRAEASDVANAIIDGTDAVMLSGESAVGKYPIRAVEMLAKIAEDVEPEINFINYPPAFNDETHAISEAINTIDKIIDLHCIIAYTCSGYTGQLAAAERPKAPVVALTPNPKVYHRLNLVWGVKPLLLEQEVESFEELINQAQTYLLVRQMASPGDKILIIGGIPSGKAKGTNFIKIHTIG

SEQ ID NO: 830 - DNA, 1413 bp, Enterobacter cancerogenus ATCC 35316
  CDS (1)..(1413): transl_table=11
atgaaaaagacgaaaattgtttgcaccatcggcccaaaaaccgaatctgaagagatgctgagcaaaatgctggacgccggcatgaacgttatgcgtctgaacttctctcacggtgactatgctgagcacggtcagcgtatccagaacttgcgcaacgtgatgagcaagaccggcaaaaaagccgcgatcctgctggacaccaaaggtcctgaaatccgtactatcaagctggaaggcggtaacgacgtttccctgaaagcgggtcagaccttcaccttcaccaccgacaagtctgttgtcggcaacagcgaaaccgttgcggtaacctatgaaggcttcaccagcgatctgtccgttggcaacaccgttctggtggacgacggcctgatcggcatggaagtgactgctatcgaaggtaataaagttatctgtaaagtgctgaacaacggcgacctgggcgaaaacaaaggcgttaacctgccgggcgtttccatcgcgctgccagcactggctgaaaaagacaagcaagacctgatcttcggctgcgagcaaggcgttgacttcgtggcagcgtcctttatccgtaagcgttccgacgtggtggaaatccgtgagcacctgaaagcgcacggcggcgagaagattcaaatcatctccaaaattgaaaaccaggaaggcctgaacaacttcgacgaaatcctcgaagcgtctgacggcatcatggttgcacgtggtgacctgggcgttgaaatcccggttgaagaagttatcttcgcgcagaagatgatgatcgagaaatgcgttcgcgcgcgtaaagtggttatcaccgcgacgcagatgctggactccatgatcaaaaacccacgccctacccgcgcagaagcaggcgacgtggcgaacgccatcctcgacggtaccgacgcagtcatgctgtccggtgagtctgcaaaagggaaatacccgctggaagccgttagcatcatggcgaccatctgcgagcgcactgaccgcgtgatgaccagccgtctggacttcaacaacgacagccgtaaactgcgcatcaccgaagcagtgtgccgcggtgcggtagaaaccgccgaaaaactggacgcgccgctgatcgttgtggcaacccagggcggtaaatctgctcgcgcagtgcgtaaatacttcccggacgccaccatcctggcgctgaccactaacgaaacgactgcgcgtcagctggtgctgagcaaaggcgttgtggcgcatctggtggaagaaatcgcatcaactgatgatttctacatccagggtaaagaactggcgctgcaaagcggtctggcacagaaaggcgacgttgtggtaatggtttctggtgcgctggtcccagcgggcactactaacaccgcatctgttcacgtgctgtaa

SEQ ID NO: 831 - protein, 470 aa, Enterobacter cancerogenus ATCC 35316
MKKTKIVCTIGPKTESEEMLSKMLDAGMNVMRLNFSHGDYAEHGQRIQNLRNVMSKTGKKAAILLDTKGPEIRTIKLEGGNDVSLKAGQTFTFTTDKSVVGNSETVAVTYEGFTSDLSVGNTVLVDDGLIGMEVTAIEGNKVICKVLNNGDLGENKGVNLPGVSIALPALAEKDKQDLIFGCEQGVDFVAASFIRKRSDVVEIREHLKAHGGEKIQIISKIENQEGLNNFDEILEASDGIMVARGDLGVEIPVEEVIFAQKMMIEKCVRARKVVITATQMLDSMIKNPRPTRAEAGDVANAILDGTDAVMLSGESAKGKYPLEAVSIMATICERTDRVMTSRLDFNNDSRKLRITEAVCRGAVETAEKLDAPLIVVATQGGKSARAVRKYFPDATILALTTNETTARQLVLSKGVVAHLVEEIASTDDFYIQGKELALQSGLAQKGDVVVMVSGALVPAGTTNTASVHVL

SEQ ID NO: 832 - DNA, 1437 bp, Clostridium nexile DSM 1787
  CDS (1)..(1437): transl_table=11
atgaagaagacaaaaattatttgtaccatgggaccaaacacaaacgacagagagttaatgaaaaaattagtcgaaaatggaatggacattgcccgtttcaatttctcacatggagatcatgaagaacagaaaagcagaatggatatgctcaaagcaattcgtgaagaagctggaaaaccaattgcgattcttttggatacaaaaggaccggagattcgtacaggtgtgataaaagatgataaaaaagtgacacttgtagagggacaaaaattcacattaactacaaaagacgtggaaggcgatgcaaatcgagtttccatcacatatgaaggtcttgtagaagatgttgaaatcggaaagaaaattttgattgatgacggcttgattgagctggaagtaaagaatattacggatacggatattatttgccgtgtaattaacggtggtgaactgggacagaaaaaaggtgtgaatgtgccgaatgtaccggtgagacttcctgcactgacagaaaaagaccgtcaggatattatttttggtgtggaacaaggggttgactttattgcggcgtcgtttgtgcgttcggcagaaggcgttcttgagatcaaagcattgttaaaagagtgtggagcaccacatcttccggttattgccaagattgagaatgcagaaggaattaaaaatattgatgagattatccgctgtgcagacggaatcatggttgcacgtggagacctgggagtggagattccggcggaagaagttccatatcttcagaagatgctgatccaaaaatgtaacagtaactataaaccggttattacagcgacacagatgttggattctatgatgagaaatccaagaccgacaagagctgaggtgacagatgttgccaatgcggtatatgatggaacagatgcggtgatgctctcaggtgaaactgcacagggaaaatatcctttagaagcacttcagatgatggttcatattatcgagaatacagaagagcatttggattatgagacacttcttggaaaagcacaggcacatcgcaaaaaaggaatttccagtgcgatcggctactcatctgttgcaacagcagcaagcctgaatgcaaaatgtatcgtcacaccgacggtatccggtgcaacagccagagtggtatcaaaattcagaccgaaagcacctattatcggagtgagcccaagtgcgctgacgcttcgcaaaatgcagctttacagaggcgtatatccaatcaaatcaattcagttggagacgacagaagatatttgtgaagaggctattaatcttgtaagtgcaaaacaaattgtggaaccgggagacatcgttgtattgacagcaggaattccggcaagaagcgaaggaatggcaaaagagggaataagcaacatgatgcgtattgctgttgtagagtag

SEQ ID NO: 833 - protein, 478 aa, Clostridium nexile DSM 1787
MKKTKIICTMGPNTNDRELMKKLVENGMDIARFNFSHGDHEEQKSRMDMLKAIREEAGKPIAILLDTKGPEIRTGVIKDDKKVTLVEGQKFTLTTKDVEGDANRVSITYEGLVEDVEIGKKILIDDGLIELEVKNITDTDIICRVINGGELGQKKGVNVPNVPVRLPALTEKDRQDIIFGVEQGVDFIAASFVRSAEGVLEIKALLKECGAPHLPVIAKIENAEGIKNIDEIIRCADGIMVARGDLGVEIPAEEVPYLQKMLIQKCNSNYKPVITATQMLDSMMRNPRPTRAEVTDVANAVYDGTDAVMLSGETAQGKYPLEALQMMVHIIENTEEHLDYETLLGKAQAHRKKGISSAIGYSSVATAASLNAKCIVTPTVSGATARVVSKFRPKAPIIGVSPSALTLRKMQLYRGVYPIKSIQLETTEDICEEAINLVSAKQIVEPGDIVVLTAGIPARSEGMAKEGISNMMRIAVVE

SEQ ID NO: 834 - DNA, 1761 bp, Clostridium hiranonis DSM 13275
  CDS (1)..(1761): transl_table=11
atgttaaacgatattaaaagaacaaaaatagtttgtacactaggacctgcatcacagagtgaagaagttttaagagaacttatactaaatggattaaatgtatgtagattcaacttctctcatggttctcatgaagaacacaagggaagaatagacatggttaaaaaagttagagaagaattaaacagaccaatagctatacttcttgatacaaaaggaccagaaataagaactggtaactttgcagacccagaagttcttcttgaagaaggatctgagtttacaataacaatggacgaagtagttggtacaaaagaaatatgtacagtaagctacaaaggattagcagatgacgttaaagaaggcgacactatattaatagacgatggtctagttggacttagagttaaatctgttgaaaatggaaacataaaatgtatagtagaaaactctggaatagttaaaaaccacaaaggtgttaacgtaccaggagttaaaataaacttaccagctataacaccaaaagacgtaagcgatatagaatttggtataagagaaggtatagatatgatagctgcatcattcgttagaaaagcttctgacgtattagctataagagaaatacttgaaaaaaataacgctggagatgttttaatactttctaaaatagaaaaccaggaaggtgttgaaaacatagatgaaatactacaggtttcagacggtataatggttgccagaggtgaccttggggttgaaataccaactgaagaaatacctatagttcagaaaatgataatcaaaaaatgtaatgaattagctaaaccagttataacagctactcagatgcttgattctatgataagaaacccaagacctacaagagcagaagttacagacgttgcaaatgctatatacgatggtacagatgcaataatgctttctggagaaactgctgcaggtaaatacccagtagaagctgttaaagtaatggctagtatagctaagagaatagaacaaactttagactacgatagaatgttaaaagaaaaaggttctaaaaatgttactgttacagatgcaataagtcacgctacttgtactactgcagttgacctaaatgcttcagcaataataacatctacttcttcaggatatacagcaaaaatggtatctaaattcagaccacaggctccaatcatagcagctacaagcaatgaagcagttatgagaagacttgcattaacttggggtgtatatccaataaaatctgctttagcaggaaatacagatgaagttatagaaaaatctatagaagcttcaatagaagcaggatacgttaaaaacggagaattagttgtaataacagctggtgtacctgttggtgtaagcggaactactaacttaataaaagttcacgttataagtgaagtacttggaaacggtgttggtataggaaatggtactgttgaaggtagagttagagtagctaatgataatggagaaataaaagacttcaaaaaaggtgatataatagttgctaaaacaactgataaagatatgaacggatatatagaagatgcagcagctatagttactgaatttggtggaatgacttctcacgcagcaatagttggattaaacttaaacactccagttgttgtatcagtagctgatataactaaaactgttaaagatggcgatatagtaacagttgatgctaaagctggtataatatacaaaggatcttcaagagttttataa

SEQ ID NO: 835 - protein, 586 aa, Clostridium hiranonis DSM 13275
MLNDIKRTKIVCTLGPASQSEEVLRELILNGLNVCRFNFSHGSHEEHKGRIDMVKKVREELNRPIAILLDTKGPEIRTGNFADPEVLLEEGSEFTITMDEVVGTKEICTVSYKGLADDVKEGDTILIDDGLVGLRVKSVENGNIKCIVENSGIVKNHKGVNVPGVKINLPAITPKDVSDIEFGIREGIDMIAASFVRKASDVLAIREILEKNNAGDVLILSKIENQEGVENIDEILQVSDGIMVARGDLGVEIPTEEIPIVQKMIIKKCNELAKPVITATQMLDSMIRNPRPTRAEVTDVANAIYDGTDAIMLSGETAAGKYPVEAVKVMASIAKRIEQTLDYDRMLKEKGSKNVTVTDAISHATCTTAVDLNASAIITSTSSGYTAKMVSKFRPQAPIIAATSNEAVMRRLALTWGVYPIKSALAGNTDEVIEKSIEASIEAGYVKNGELVVITAGVPVGVSGTTNLIKVHVISEVLGNGVGIGNGTVEGRVRVANDNGEIKDFKKGDIIVAKTTDKDMNGYIEDAAAIVTEFGGMTSHAAIVGLNLNTPVVVSVADITKTVKDGDIVTVDAKAGIIYKGSSRVL

SEQ ID NO: 836 - DNA, 1596 bp, Penicillium chrysogenum Wisconsin 54-1255
  CDS (1)..(1596)
atggctgccaccaactccctcgaccacctgagcaaccgcatgaagctggagtggcactccaagctcaacaccgagatggtgcctgcgaagaacttccgccgcacctccatcatttgcaccattggcagtcgatcaggtcccaagacgaactccgctgagaagatcaatgctctccgcacagtcggtcttaacgtcgttcgcatgaacttctcccacggatcatacgactaccaccaatctgtcattgacaacgctcgcgaggccgcccgtatccagactggtcgccctcttgccattgccctcgacaccaagggccccgagatccgtaccggtaacaccgtcggtgacaaggactaccccatcaagcagggcaccgtgctcaacatcaccaccgatgaggcatacgccgctgcttctgacgataagaacatgtaccttgactacaagaacatcaccaatgtgatcgctcccggcaagctcatctatgttgatgatggcattatgtccttcgaggtgcttgaggttgttgatgagaagaacctcaaggtgaagtgcctgaacgacggcaacatctcatcccgcaagggtgtcaacctgcccggcactgatgtagacctgcctgctctctcggagaaggatattgccgatttgcgattcggtgttaagaacaaggtcgatatggtcttcgcttcatttatccgtcgcggcagcgatatcaagcacatccgtgaagtccttggcgaggatggcaaggagattcagattatcgccaagattgagaaccagcagggtgtcaacaacttcgatgagatcctcgacgagaccgacggtgttatggttgcccgtggtgacctcggtatcgagatccccgcccctaaggtcttccttgcccagaagatgatgatcgccaagtgcaacatcaagggcaagcccgttatctgtgccacccagatgttggagtccatgacatacaacccccgccccactcgtgctgaggtttccgatgttgccaacgccgtcctcgacggtgccgactgtgtcatgctgtctggtgagaccgcgaagggtaactacccttgcgaggccgttaagatgatgtccgagacttgcttgctggctgaggttgccattcctcatttcaacgtctttgacgagctgcgcaacctcgcccctcgccccaccgaaacctccgagtccgttgccatggccgctgtcagtgccagtttggagctgaacgccggcgccatcatcgttctgaccaccagtggtaaaaccgctcgcctggtgtcgaagtaccgtcccgtctgtcccatcctgatggtcactcgcaatgagaccgctgcccggtactcccacctgtaccgcggtgtgtggcccttctacttccccgagaccaagcctgacttcaacgtcaagatctggcaggaggatgtcgaccgtcgcctcaagtggggtatcaaccacggtctcaagctcggaatcatcaacaagggcgatcctatcgtctgtgtccagggatggcgtggcggaatgggccacaccaacaccgttcgtgtggtgcccgccgacgagaacctcggtctcgccatggagtaa

SEQ ID NO: 837 - protein, 531 aa, Penicillium chrysogenum Wisconsin 54-1255
MAATNSLDHLSNRMKLEWHSKLNTEMVPAKNFRRTSIICTIGSRSGPKTNSAEKINALRTVGLNVVRMNFSHGSYDYHQSVIDNAREAARIQTGRPLAIALDTKGPEIRTGNTVGDKDYPIKQGTVLNITTDEAYAAASDDKNMYLDYKNITNVIAPGKLIYVDDGIMSFEVLEVVDEKNLKVKCLNDGNISSRKGVNLPGTDVDLPALSEKDIADLRFGVKNKVDMVFASFIRRGSDIKHIREVLGEDGKEIQIIAKIENQQGVNNFDEILDETDGVMVARGDLGIEIPAPKVFLAQKMMIAKCNIKGKPVICATQMLESMTYNPRPTRAEVSDVANAVLDGADCVMLSGETAKGNYPCEAVKMMSETCLLAEVAIPHFNVFDELRNLAPRPTETSESVAMAAVSASLELNAGAIIVLTTSGKTARLVSKYRPVCPILMVTRNETAARYSHLYRGVWPFYFPETKPDFNVKIWQEDVDRRLKWGINHGLKLGIINKGDPIVCVQGWRGGMGHTNTVRVVPADENLGLAME

SEQ ID NO: 838 - DNA, 1569 bp, Penaeus vannamei
  CDS (1)..(1569)
atgtcgaaggtagcacccatgcaacttggggccgcagatacccacacccaggtggaccatatggcggccctggatattgactccaaaccattctcgaagcgactctccggcatcatctgcaccattggacctgtctctcggtctgtagagatgctggagaaaatgatggaggctggcatgaacatcgcacgtatgaacttctcccacggcacccatgaataccacagcgagaccatgatgaatgtccgtaaggcagcccagaagtattccgacaagattgggcattcttatcctgttgccattgctcttgacacaaagggacctgaaattcgtactggccttttggaaggtggaccatcagctgaaattgaattgaaagaaggtgctacaatcaagttgaccacagatgccagttactatgaaaagtgctcagaagacgtgctttacttggactatgtcaacattaccaaagttgtgaagcctggcaaccgcatctttgttgatgatggccttatctctcttattgctaaggatgtgggcagtgattccattgactgtgaggttaaaaatggaggtatgcttgggagcaagaagggagtgaatctcccaggtgttccagtagaccttcctgcagtctctgagaaggaccgtggtgatctcctccttggtgtcaaaatgggagtagacattgtgtttgtatccttcatccgtgatgctgctggagtccgtgagatcagagatgttcttggcgaaaagggcaagaatatcaaaatcatcagcaagattgagaatcaccagggatgcaagaacattgatgacatcattgaagagggagatggtatcatgattgctcgtggtgatttgggtattgagattcctgctgagaaggtcttcgtggcccagaaacagatgattgccaagtgcaacaaagttggaaagccagtcatttgtgctacccagatgttggaatccatggtgaagaagccccgtcccacacgtgctgaagtgtctgatgtgggtaatgctatccttgatggtgctgactgtgtcatgctgtctggtgaaactgctaagggaggctaccctcttgtttgtgtacgaaccatggccaacattgcacgtgaagctgaagctgcaatttggcacaagcaactcttcactgagctgtctcagcaggtccatctgcctactgactcaacacacaccacagctattgctgctgttgaagcttcattcaaagcaatggccacagctattattgttattaccaccactggtcgctctgctcatctggtttcaaagtacaggcctcgctgcccaattgtggctgtaacacgatacccacaggtggccagacagtgccatctctaccgtggcattattcccatccactacactgctgaacgtattgaagactggatgaatgacgtcaatgctcgtgtagactatgctgttcagtatggcaaggagtgtggtttcattaagcccggcgacccagttgttgtggtgactggctggcagaagggagctggctttaccaataccatgcgcgtcctgattgtgccttga

SEQ ID NO: 839 - protein, 522 aa, Penaeus vannamei
MSKVAPMQLGAADTHTQVDHMAALDIDSKPFSKRLSGIICTIGPVSRSVEMLEKMMEAGMNIARMNFSHGTHEYHSETMMNVRKAAQKYSDKIGHSYPVAIALDTKGPEIRTGLLEGGPSAEIELKEGATIKLTTDASYYEKCSEDVLYLDYVNITKVVKPGNRIFVDDGLISLIAKDVGSDSIDCEVKNGGMLGSKKGVNLPGVPVDLPAVSEKDRGDLLLGVKMGVDIVFVSFIRDAAGVREIRDVLGEKGKNIKIISKIENHQGCKNIDDIIEEGDGIMIARGDLGIEIPAEKVFVAQKQMIAKCNKVGKPVICATQMLESMVKKPRPTRAEVSDVGNAILDGADCVMLSGETAKGGYPLVCVRTMANIAREAEAAIWHKQLFTELSQQVHLPTDSTHTTAIAAVEASFKAMATAIIVITTTGRSAHLVSKYRPRCPIVAVTRYPQVARQCHLYRGIIPIHYTAERIEDWMNDVNARVDYAVQYGKECGFIKPGDPVVVVTGWQKGAGFTNTMRVLIVP

SEQ ID NO: 840 - DNA, 1776 bp, Penaeus vannamei
  CDS (1)..(1776)
atgtcgaaggtagcacccatgcaacttggggccgcagatacccacacccaggtggaccatatggcggccctggatattgactccaaaccattctcgaagcgactctccggcatcatctgcaccattggacctgtctctcggtctgtagagatgctggagaaaatgatggaggctggcatgaacatcgcacgtatgaacttctcccacggcacccatgaataccacagcgagaccatgatgaatgtccgtaaggcagcccagaagtattccgacaagattgggcattcttatcctgttgccattgctcttgacacaaagggacctgaaattcgtactggccttttggaaggtggaccatcagctgaaattgaattgaaagaaggtgctacaatcaagttgaccacagatgccagttactatgaaaagtgctcagaagacgtgctttacttggactatgtcaacattaccaaagttgtgaagcctggcaaccgcatctttgttgatgatggccttatctctcttattgctaaggacgtgggcagtgattccattgactgtgaggttgaaaatggaggtatgcttgggagcaagaagggagtgaatctcccaggtgttccagtagaccttcctgcagtctctgagaaggaccgtggtgatctcctccttggtgtcaaaatgggagtagacattgtgtttgcatccttcatccgtgatgctgctggagtccgtgagatcagagatgttcttggcgaaaagggcaagaatatcaaaatcatcagcaagattgagaatcaccagggatgcaagaacattgatgacatcattgaagagggagatggtatcatgattgctcgtggtgatttgggtattgagattcctgctgagaaggtcttcgtggcccagaaacagatgattgccaagtgcaacaaagttggaaagccagtcatttgtgctacccagatgttggaatccatggtgaagaagccccgtcccacacgtgctgaagtgtctgatgtgggtaatgctatccttgatggtgctgactgtgtcatgctgtctggtgaaactgctaagggaggctaccctcttgtttgtgtacgaaccatggccaacattgcacgtgaagctgaagctgcaatttggcacaagcaactcttcactgagctgtctcagcaggtccatctgcctactgactcaacacacaccacagctattgctgctgttgaagcttcattcaaagcaatggccacagctattattgttattaccaccactggtcgctctgctcatctggtttcaaagtacaggcctcgctgcccaattgtggctgtaacacgatacccacaggtggccagacagtgccatctctaccgtggcattattcccatccactacactgtgcctcagaatgctgaacgtattgaagactggatgaatgacgtcaatgctcgtgtagactatgctgttcagtatggcaaggagtgtggtttcattaagcccggcgaccctgttgttgtggtgactggctggcagaagggagctggctttaccaataccatgcgcgtcctcgttgtaccttcaactggcccaacagcctccattgtgaaactaggagcacactcatctgttaagtcaggccctgttaagtcaggccctcaagccagtggagagcaccagagaactggaaaggctcagccagatattccatggccgagtttccttgcgcacatgggtccttaccacctatgtgctgcagcagttgctaacaagatttaa

SEQ ID NO: 841 - protein, 591 aa, Penaeus vannamei
MSKVAPMQLGAADTHTQVDHMAALDIDSKPFSKRLSGIICTIGPVSRSVEMLEKMMEAGMNIARMNFSHGTHEYHSETMMNVRKAAQKYSDKIGHSYPVAIALDTKGPEIRTGLLEGGPSAEIELKEGATIKLTTDASYYEKCSEDVLYLDYVNITKVVKPGNRIFVDDGLISLIAKDVGSDSIDCEVENGGMLGSKKGVNLPGVPVDLPAVSEKDRGDLLLGVKMGVDIVFASFIRDAAGVREIRDVLGEKGKNIKIISKIENHQGCKNIDDIIEEGDGIMIARGDLGIEIPAEKVFVAQKQMIAKCNKVGKPVICATQMLESMVKKPRPTRAEVSDVGNAILDGADCVMLSGETAKGGYPLVCVRTMANIAREAEAAIWHKQLFTELSQQVHLPTDSTHTTAIAAVEASFKAMATAIIVITTTGRSAHLVSKYRPRCPIVAVTRYPQVARQCHLYRGIIPIHYTVPQNAERIEDWMNDVNARVDYAVQYGKECGFIKPGDPVVVVTGWQKGAGFTNTMRVLVVPSTGPTASIVKLGAHSSVKSGPVKSGPQASGEHQRTGKAQPDIPWPSFLAHMGPYHLCAAAVANKI

SEQ ID NO: 842 - DNA, 1530 bp, Zea mays
  CDS (1)..(1530)
atggcggcgggcggtgagttggcgtggggggaggagcccgtggcgcggcgccggcctaagaccaagatcgtctgcacgctcggcccggcgtcgcgatccgtcgagatgatctcgcgcctgctgcgcgccgggatgtgcgtcgcgcgcttcaacttctcccatggctcccacgagtaccaccaggagacgctcgacaacctgcacgccgccatggagctcaccgggatcctctgcgccgttatgctcgacaccaagggtccagagattagaactggatttttgaaagatgggaatcctattcaattgataaaaggccaagaaatcacaatttctacagactatagcattcagggtgatgagaaaatgatatcaatgagctacaagaagcttgctgttgatctgaagccaggcagtgtcatattgtgtgctgatggtaccatcactcttactgttcttcactgtgataaagaacaaggcttggttcgctgccgctgtgagaacactttcaagcttggcgagaggaagaatgttaatcttccaggagttattgttgatctccccacactcacagacaaggacaaggaggacatccttaaatggggtgttccaaacaagattgacatgattgccttgtcatttgttcggaagggttcggatcttgtggaggttaggaaggtacttggtgagcatgccaagtccataatgctgatgtcaaaggttgagaatcaagagggagtagctaactttgatgatatcctggcaaactctgatgcttttatggtggcaagaggtgatttaggaatggaaattcctatagagaagattttctttgcacagaaggtgatgattttcaagtgcaatattcaaggcaagcctgttgtgactgcaacccagatgttggaatctatgatcaagtctcctcgccctactcgggcagaagcaacggatgttgcaaacgcagttcttgatggcacagactgtgttatgctcagtggtgagactgctgctggggcttatccagagttggcggtgcagactatggctaagatctgcctgcaagcagagtcttgcgtagaccatgctgctattttcaaatcaatcatggcttcagctccaattccaatgagtccattggagagccttgcatcatcagctgttcgcacagcaaactctgccagggcagcacttatcttggtcctgaccaggggaggaactactgctaggcttgtagccaagtataggccatccatgccgattctgtccgttgtggttcctgagctgaagacagactcgttcgactgggcctgcagtgacgagggtccggcaaggcacagcctcattgtgaggggtgtcatcccaatgctgagtgccgccactgccaaggcctttgacaacgaagccactgacgaagctattggttttgccattgaaaatgcgaagacgatggggctatgcaacaccggtcaatccgttgtggccctgcaccgcatcgggatttcatccgtcatcaagcttcttactgtgaagtag

SEQ ID NO: 843 - protein, 509 aa, Zea mays
MAAGGELAWGEEPVARRRPKTKIVCTLGPASRSVEMISRLLRAGMCVARFNFSHGSHEYHQETLDNLHAAMELTGILCAVMLDTKGPEIRTGFLKDGNPIQLIKGQEITISTDYSIQGDEKMISMSYKKLAVDLKPGSVILCADGTITLTVLHCDKEQGLVRCRCENTFKLGERKNVNLPGVIVDLPTLTDKDKEDILKWGVPNKIDMIALSFVRKGSDLVEVRKVLGEHAKSIMLMSKVENQEGVANFDDILANSDAFMVARGDLGMEIPIEKIFFAQKVMIFKCNIQGKPVVTATQMLESMIKSPRPTRAEATDVANAVLDGTDCVMLSGETAAGAYPELAVQTMAKICLQAESCVDHAAIFKSIMASAPIPMSPLESLASSAVRTANSARAALILVLTRGGTTARLVAKYRPSMPILSVVVPELKTDSFDWACSDEGPARHSLIVRGVIPMLSAATAKAFDNEATDEAIGFAIENAKTMGLCNTGQSVVALHRIGISSVIKLLTVK

SEQ ID NO: 844 - DNA, 1584 bp, Zea mays
  CDS (1)..(1584)
atgcattcgaccaacctgctgctggaggagcccatccggatggcctccatcctggagccatccaagaccagcttcttcccggcgatgaccaagatcgtcggcacgctcggccccaagtcgcgctccgtcgacaccatctcctcctgcctcaaggccggcatgtccgtcgcgcggttcgatttctcgtggggagacgccgcctaccaccaggagacgctcgagaacctcaagctcgccatcaagtccaccaagaagctgtgcgctgttatgcttgacacggttggaccggagctgcaggtggtcaacaagagtgaaacccccatctccctcgaggagaacgggactgtcgtgctcacgccgcatcagggccaagaagcctcctccaccttgctgcccatcaacttcgatggactcgccaaggctttgacaccaggtgcaacgatatttgtgggccaatacttgttcactggtagcgagactacttcagtttggttggaggtttctgaagttaaaggagatgatgtggtttgtatcatcaagaacacagctaccttggctgggtcgctcttcacgctgcattgttcccagattcatattgacttgcccacgctgtctgatgaggataaggatgttatcaaaaaatggggtgctccaaataagattgacttcctctctctgtcttacacaagacatgcagaagatgtgcggcaggcacgtgagttcctctcgaaattgggtgatcttagccaaactcagatctttgccaaaattgagaatgttgagggcttgaaccattttgatgaaatactggcagaggcagatggtatcattctgtcaagaggaaaccttggaattgaccttccacctgagaaggtctttttgtttcaaaagtctgcgcttcacaagtgcaacatggctggaaagcctgctgttgttactcgtgtcgtggacagcatgactgacaacctcagacctactcgtgcagaggcaactgatgtggcaaatgcagttcttgatgggagtgacgccattctccttggtgctgagactctccgtggtttatatccggtggagactatttcaacagtgggcagaatttgtgccgaggctgagaaggtattcaaccaagatttatactacaagcggactgtgaagtatgtgggagaacctatgacccacttggagtctattgcttcttcagcggtgcgagctgcaatcaaagttaaggcatcagtcatcatttgcttcacctcttctggacgagctgcaaggctcattgctaagtacaggcccagcatgcctgttctatctgttgtcattcctcgtctaaagacaaaccaactgaagtggagtttcacaggtgcttttgaggcaagacaatcactcatagttagaggcctcttccctatgcttgctgatccacgacacccagctgaatctaccagtgctacaaatgagtctgtgttgaaggttgctcttgaccatggcaaagcctcgggcgtgatcaagtcccacgaccgcgtcgtcgtttgccagaaagtgggtgattcctctgtggtgaagatcattgagctggatgattag

SEQ ID NO: 845 - protein, 527 aa, Zea mays
MHSTNLLLEEPIRMASILEPSKTSFFPAMTKIVGTLGPKSRSVDTISSCLKAGMSVARFDFSWGDAAYHQETLENLKLAIKSTKKLCAVMLDTVGPELQVVNKSETPISLEENGTVVLTPHQGQEASSTLLPINFDGLAKALTPGATIFVGQYLFTGSETTSVWLEVSEVKGDDVVCIIKNTATLAGSLFTLHCSQIHIDLPTLSDEDKDVIKKWGAPNKIDFLSLSYTRHAEDVRQAREFLSKLGDLSQTQIFAKIENVEGLNHFDEILAEADGIILSRGNLGIDLPPEKVFLFQKSALHKCNMAGKPAVVTRVVDSMTDNLRPTRAEATDVANAVLDGSDAILLGAETLRGLYPVETISTVGRICAEAEKVFNQDLYYKRTVKYVGEPMTHLESIASSAVRAAIKVKASVIICFTSSGRAARLIAKYRPSMPVLSVVIPRLKTNQLKWSFTGAFEARQSLIVRGLFPMLADPRHPAESTSATNESVLKVALDHGKASGVIKSHDRVVVCQKVGDSSVVKIIELDD

SEQ ID NO: 846 - DNA, 1542 bp, Zea mays
  CDS (1)..(1542)
atggcgaacatcgacatggcgaagatcctggcggacctggaccgcggcgccggcgacgcgcggctgcccaagaccaagctcgtctgcacgcttggcccggcctcccgctccgtgcccatgctcgagaagctgctccgcgccggcatgaacgtcgcgcgcttcaacttctcccacggcacccaccagtaccaccaggagacgctcgacagcctccgccaggccatgcacaacaccggcatcctctgcgccgtcatgctcgacaccaagggtcctgagattcgtacagggtttttgaaggatggtaaaccaattaagctaaccaagggtcaagagatcactgttaccactgattatgatatcaagggtgacgaaaatatgatcgctatgagttacaagaaactgcctgttgacgtgaagcctggaaatgtcatactctgcgcagatggtactatctctctggccgttctgtcttgcgatcctgatgctggaactgtgcggtgtaggtgtgagaacactgcaatgcttggtgagagaaagaactgcaatttgccaggaattgttgtggatcttcctacattgactgagaaagataaagaagatattttgggctggggtgttccaaatgacattgacatgattgctctatcctttgtccgtaaaggatcagatttggtgactgtcagacaggttcttgggcagcatgccaagcgcattaagttgatgtcaaaggttgagaaccaagagggtgttgtaaactttgatgagatcttgagggagactgatgcttttatggttgctagaggtgatctgggaatggagattccagtcgagaagattttccttgcgcagaagatgatgatctacaagtgcaacattgctggcaaacctgttgttactgctacccagatgctcgagtcgatgatcaaatctcctcggccgacacgtgctgaggccactgacgttgcaaatgccgttcttgatggaactgactgtgtcatgctcagcggagagagtgccgctggagcctaccccgaggtggctgtgaagatcatggctcgtatctgcatcgaggcggaatcttccctggaccacgaggcagttttcaaggccatgatcaggtccgcgcctcttccaatgagccctctggagtcccttgcatcatctgctgtgaggactgccaacaaggccaaggccgcactgattgtcgtcctgactcgcggtggaaccacggctaaactggtcgccaagtaccgccccagggtccccatcctctccgttgtcgtacccgtgcttacgaccgactctttcgactggaccatcagctccgagggcccagctaggcacagcctgatctacagaggcctcattcccctcctcgccgagggctccgcgaaggctacggattcagagtcgacggaggtgatcctggaggccgcgttgaagtcggccgtgcagaagcagctctgcaagcctggtgatgccatcgtggctcttcatcgtattggcgtcgcctccgtcatcaagatctgcatcgtgaagtga

SEQ ID NO: 847 - protein, 513 aa, Zea mays
MANIDMAKILADLDRGAGDARLPKTKLVCTLGPASRSVPMLEKLLRAGMNVARFNFSHGTHQYHQETLDSLRQAMHNTGILCAVMLDTKGPEIRTGFLKDGKPIKLTKGQEITVTTDYDIKGDENMIAMSYKKLPVDVKPGNVILCADGTISLAVLSCDPDAGTVRCRCENTAMLGERKNCNLPGIVVDLPTLTEKDKEDILGWGVPNDIDMIALSFVRKGSDLVTVRQVLGQHAKRIKLMSKVENQEGVVNFDEILRETDAFMVARGDLGMEIPVEKIFLAQKMMIYKCNIAGKPVVTATQMLESMIKSPRPTRAEATDVANAVLDGTDCVMLSGESAAGAYPEVAVKIMARICIEAESSLDHEAVFKAMIRSAPLPMSPLESLASSAVRTANKAKAALIVVLTRGGTTAKLVAKYRPRVPILSVVVPVLTTDSFDWTISSEGPARHSLIYRGLIPLLAEGSAKATDSESTEVILEAALKSAVQKQLCKPGDAIVALHRIGVASVIKICIVK

SEQ ID NO: 848 - DNA, 1584 bp, Zea mays
  CDS (1)..(1584)
atgcagggcgccagccacatgctcctggaggagcccttccgcctcgcctccgtcctctcccccgccaagcctaaagtattcccatcactcaccaagatagttgggacgctcgggcccaattcacactcggttgagattattcaggaatgcctcactgctggaatgtcagttgcacgatttgatttctcatggatggatgctgcgtatcaccaggagacccttgataatttgaggaaagcggcacagaatgtgaagaagttgtgccctgtaatgttggatactcttggtccagaaattcaggttcacaattccactggtgagccaattgagttgaaagctgggaatcatgttatcataactccagatatttctaaagctctctctgctgagatcctaccaattaagtttggtgatctggcaaaagctgtgaagaagggtgatactctttttatgggccaatatctcttcacaggaagtgaaacaacatctgtctggctagaagttgtggaaacttctggggaaaatgtaaattgtctagtgaagaatgcagctacacttgccggccccatattcactctgcatgcttcacaagttcacatcaatttgcccactttgagtgaatatgataaacatgtcatttcaacttggggttcatgtaacagtgttgacattatatcactttcccatacccgctctgctgaagatgtcagggagctcagggcctttttacaagcacacgcccttcctgacacacaaatatacgcgaagattgaaaattctgagggtttggataattttgatgacattctcaacgcggcagatggtatcattatttctcgaggagacctgggtattgaccttcctccagaaaacgttttcatgttccaaaagacagctattcataaatgcaatctggagggtaaacctgtgatcatcactagagttgtggacagcatgattgacaatctacgccctacccgtgcagaggcaactgatgttgcaaatgctgtcctagatggcactgatggcattttgcttggtgcggagacacttcgagggctttatcctgttgatgcagtgagtactgtggggagaatatgtgcagaagctgagactgtgtataatcagccgcttcaattcaagaaagtaatgtggcatgtaggtgacccaatgccccacgaggaatctgtggcatcagcagcggttggttctgcaatcaaagtaaaagctgctgccattgttgtgttcacattctcagggagagctgcgaggttagttgccaagtataggccaacaatgccaattttagcagttatcttcccacgtcaaggatccgatccatcaaagtggcgttcttatggcacaacacaggcaagacaatgtttcgcagtgagaggcgtgtaccctttgatggggagtactgatgaggccgaaactggtgggctaacaaaggaagagtatgggataaaacttgcgatgagctatggtcggtcggtcggcatagtgaagcctttcgacagggtgataatctttgaaaagattggtgattcttctgttgtcaagatcattgagtgtgaaggttag

SEQ ID NO: 849 - protein, 527 aa, Zea mays
MQGASHMLLEEPFRLASVLSPAKPKVFPSLTKIVGTLGPNSHSVEIIQECLTAGMSVARFDFSWMDAAYHQETLDNLRKAAQNVKKLCPVMLDTLGPEIQVHNSTGEPIELKAGNHVIITPDISKALSAEILPIKFGDLAKAVKKGDTLFMGQYLFTGSETTSVWLEVVETSGENVNCLVKNAATLAGPIFTLHASQVHINLPTLSEYDKHVISTWGSCNSVDIISLSHTRSAEDVRELRAFLQAHALPDTQIYAKIENSEGLDNFDDILNAADGIIISRGDLGIDLPPENVFMFQKTAIHKCNLEGKPVIITRVVDSMIDNLRPTRAEATDVANAVLDGTDGILLGAETLRGLYPVDAVSTVGRICAEAETVYNQPLQFKKVMWHVGDPMPHEESVASAAVGSAIKVKAAAIVVFTFSGRAARLVAKYRPTMPILAVIFPRQGSDPSKWRSYGTTQARQCFAVRGVYPLMGSTDEAETGGLTKEEYGIKLAMSYGRSVGIVKPFDRVIIFEKIGDSSVVKIIECEG

SEQ ID NO: 850 - DNA, 1755 bp, Bacillus subtilis
  CDS (1)..(1755): transl_table=11
atgagaaaaactaaaattgtttgtaccatcggtccggcaagtgaaagtattgaaatgcttacgaaattaatggagtcaggaatgaacgtggctcgattaaacttttctcacggagattttcaggagcacggtgcaagaattaaaaatatccgcgaggcagctgaaaaacttggcaagaacgttggaattctgcttgatacaaagggtcctgaaatccgcacacatacaatggaaaacggttccatagagctgaacgcaggaagcaaactcgtaataagcatgacggaggtgataggaacaccagataaaatttcagtgacatatgaaggtttagtccatgacgttaacaaaggttcaacgattctgttagatgacggccttatcggtcttgaggtacttgatgtagatgccgtaaaacgcgaaatcaaaacaaaagtattaaacaacggaacactcaaaaataaaaaaggtgttaacgtacccgggcgtaagtgtcaatcttccgggattactgaaaaggatgcgcgagacatcgttttcggtattgagcaaggagtagacttcatcgcaccatctttcattcgacgttctacggatgtgctcgaaatccgtgagcttcttgaagagcacaacgctcaggatattcaaatcatccctaaaatcgaaaaccaagagggcgttgacaacatcgatgcgattctcgaagtgtctgacggcttaatggttgcacgcggagacttaggtgtggaaattccagctgaagaagtgccgcttgtgcaaaaagaactgatcaaaaaatgcaacgcgctgggcaaacctgttattacagcgacacaaatgcttgacagcatgcagcgcaacccgcgtccgactcgtgcggaagcaagtgacgttgcaaacgcgatcttcgacggaacagatgcgatcatgctatctggtgaaactgctgccggaagctatccggttgaagcagttcaaacaatgcataacatcgcgtcccgttctgaagaagctttaaattataaagaaattctctcaaaacgcagagatcaagtgggcatgacaattacagacgcaattggacaatctgtcgcgcatacggcgattaacctgaatgctgcgatcgtaacgccgacagaaagcggccatacagcacgtatgattgcaaaataccgtccgcaggctccgattgttgcggttactgtaaatgactctatttccagaaagcttgccctcgtatctggcgtattcgcggaaagcggccaaaatgcgagctcaacagatgagatgcttgaggatgctgtccaaaaatcattgaacagcggaattgtaaaacacggcgatcttatcgttattacagcaggcactgtcggtgagtccggcactacgaatttgatgaaggttcatactgtcggtgatatcatcgctaaaggccaaggcattggacgcaaatcagcttacggtccggtcgtcgttgcacaaaatgcaaaagaagctgagcaaaaaatgactgacggtgcggtacttgttaccaaaagcactgaccgtgatatgattacatcccttgaaaaagcgtctgctcttattacagaagaaggcggtttgactagccatgcggcggtagtcggattaagccttggcatcccggttatcgtgggtctggaaaatgcgacatctattttgacagatggccaggatattacagttgacgcttccagaggtgcagtctatcaaggccgtgcgagcgttctttaa

SEQ ID NO: 851 - protein, 584 aa, Bacillus subtilis
MRKTKIVCTIGPASESIEMLTKLMESGMNVARLNFSHGDFQEHGARIKNIREAAEKLGKNVGILLDTKGPEIRTHTMENGSIELNAGSKLVISMTEVIGTPDKISVTYEGLVHDVNKGSTILLDDGLIGLEVLDVDAVKREIKTKVLNNGTLKNKKGVNVPGRKCQSSGITEKDARDIVFGIEQGVDFIAPSFIRRSTDVLEIRELLEEHNAQDIQIIPKIENQEGVDNIDAILEVSDGLMVARGDLGVEIPAEEVPLVQKELIKKCNALGKPVITATQMLDSMQRNPRPTRAEASDVANAIFDGTDAIMLSGETAAGSYPVEAVQTMHNIASRSEEALNYKEILSKRRDQVGMTITDAIGQSVAHTAINLNAAIVTPTESGHTARMIAKYRPQAPIVAVTVNDSISRKLALVSGVFAESGQNASSTDEMLEDAVQKSLNSGIVKHGDLIVITAGTVGESGTTNLMKVHTVGDIIAKGQGIGRKSAYGPVVVAQNAKEAEQKMTDGAVLVTKSTDRDMITSLEKASALITEEGGLTSHAAVVGLSLGIPVIVGLENATSILTDGQDITVDASRGAVYQGRASVL

SEQ ID NO: 852 - DNA, 2100 bp, Ostreococcus tauri
  CDS (1)..(2100)
atgagcgggttgagctcgaacacggcgctgagcgcgttattaggctcgcgagggcacgggacggcgcaacacattctggagaatgggcacgtgcgggcgctgagtgagagcgcggaggggatgtttcgcgagcgggatagtcacaggattgggttcaagtcgaagatcatctgcacgctcggaccggtttcgaggacggtggagattttggagaagatgttgcgagccggaatgtccatcgcgcgattcaacttctctcacggctcgcacgagtaccaccaggagactttggataatctcagacttgcgtgcgcgaatactggagtggattgtgcgattttactcgacacgaagggaccggagattcgcaccggtatgctcgacggcggcggccccatcatgttggaagtcggcaacgagatcacgttgaccacggattacgacttcaagggtagcgcggagaagatcgcggtatcgtacccggatttggcgaaggatgtcaagcctggatcgaagattttgtgcgccgacggctcggtgacgttcaccgtgctcgagtgcgacgtcgccaagggcgaggtgcgatgtaagctcgaaaacagcgccaagctcggcgagcgcaagaacatgaacttaccgggcgtcgtcgtgaacttgccgacgatcaccgagaaggatcgccatgacttgatcgagtggggcgtgaagaaccaagtcgatttcatcgccgcctccttcgttcgcaagggcagcgacgtggagtacattcgcagcgtcttgggcgactttgcgagcaaggtgtccatcatctccaaggttgaaaacatggagggtctggacaactttgaagacatcgtggaagcctccgacggtgtcatggtcgctcgcggtgatttgggcatggagatccgcatggaacagattttcttggctcaaaagcgcatgattaagcgatgtaatctggcgggcaaacccgtcgtgacggctacgcaaatgttggagtccatgactggcgctccgcgaccgactcgcgctgaggcgacggacgtcgcgaacgccattctcgatggcaccgacgccgtgatgctttcgggcgaaaccgcagcgggctcgtaccctctggatgcggtgaagtgcatggcgtccatctgccgcgaagccgaggcgtacgtcaacgatgtcgccgactacttccaaatcctcgagcaacaaatggtcccgctcggggtgacggaggccatggcatcctcggcggtgcgtacggcgcaaaaggtcaacgcctcgctcatcattaccctctcacgcaccggtcacacggctcagatgatcgcaaagtaccgtcccgctatgcgcatcattaacgtgtgcatggacgacgctgggtttccgggtcgcgccctggaagtatctcgtcggtcgctcataacccgcggactcgttcctctgctagaacacccagcatggcgtggcgagagcggccacccgcaagaggtcatgcgcaatgccatcatatactgccgagacgtcctcggcttggtcaaagctggcgacgccgtaatcggagtccacagaatcatgggcgaggcagtcttaaaggtcgtcatccacagcagattagaaggccacaacagtcacagtcatccgcgcgcgaggtctccgcccgagcgtcccaagattcccaaaatctcaaaccgtcagggcaaaaccagactggcgaagtactacgtcccgctcgacgacgacgagaaacgccgagtcgagagcgacgtccatcgattggtcgtcaacagagaccccaagcacaccaacatctgcgagttccgtgggaactcgaagattgtctatcggagatacgccggactattcttctcgttgtgcgtcgacctgaacgataacgagctgacgcacctggagtcgattcacctattcgtggagatgctcgatcacttcttcgcaaacgtgtgcgagttggacttggtgtttaactttcagaaagtgtatctgttggtggatgagttcattctggggggagaagtgcaagatacgagtaagcgggcgatcatggagcgcttggcggagctcgagcggttgaaggattga

SEQ ID NO: 853 - protein, 699 aa, Ostreococcus tauri
MSGLSSNTALSALLGSRGHGTAQHILENGHVRALSESAEGMFRERDSHRIGFKSKIICTLGPVSRTVEILEKMLRAGMSIARFNFSHGSHEYHQETLDNLRLACANTGVDCAILLDTKGPEIRTGMLDGGGPIMLEVGNEITLTTDYDFKGSAEKIAVSYPDLAKDVKPGSKILCADGSVTFTVLECDVAKGEVRCKLENSAKLGERKNMNLPGVVVNLPTITEKDRHDLIEWGVKNQVDFIAASFVRKGSDVEYIRSVLGDFASKVSIISKVENMEGLDNFEDIVEASDGVMVARGDLGMEIRMEQIFLAQKRMIKRCNLAGKPVVTATQMLESMTGAPRPTRAEATDVANAILDGTDAVMLSGETAAGSYPLDAVKCMASICREAEAYVNDVADYFQILEQQMVPLGVTEAMASSAVRTAQKVNASLIITLSRTGHTAQMIAKYRPAMRIINVCMDDAGFPGRALEVSRRSLITRGLVPLLEHPAWRGESGHPQEVMRNAIIYCRDVLGLVKAGDAVIGVHRIMGEAVLKVVIHSRLEGHNSHSHPRARSPPERPKIPKISNRQGKTRLAKYYVPLDDDEKRRVESDVHRLVVNRDPKHTNICEFRGNSKIVYRRYAGLFFSLCVDLNDNELTHLESIHLFVEMLDHFFANVCELDLVFNFQKVYLLVDEFILGGEVQDTSKRAIMERLAELERLKD

SEQ ID NO: 854 - DNA, 1692 bp, Crassostrea gigas
  CDS (1)..(1692)
atggtgagtttaacatctaagaagattgaagcggcaggcgtggctactatcgacagctgtcagcttctggccgcagccgacgcaatgtctcatctgctgctcatgtgtaagctggacatcgactccaacccacgcgatgtctctatgacaggcatcatctgtactattgttccggcttgcagagaaattgacacgttacagaagatggtgattgaaggaatgaatgttgctcgccttaacttctcacacggaacccacgagtaccacgaggggaccatcaagaacatccgggaggcggtgaaggggttcagctccccccgccccctagcgatcgccctggacaccaaggggccagaaatcaggaccggactcctggaggggggagcctcagcggaattaacactgaacacaggggacaagatcaagatcacgacggacgacaagttcaaggagaagtgtagcaaggacacgctgtgggtcgactacaagaacatcaccaaggtcatgtccgtgggctccaggatgttcatcgacgacggactcatctccgtcatcgtcaaggaaatgggtgctgactatattaactgtgtggtggagaatgggggcgacctgggcagtaagaagggctgtaacctccccgggatagccgttgacctccccgccgtctcaaccaaggacaaggaggacctattgtttggtgtcgctcaaggggtggacatgattttcgcgtccttcatcagaagcggtcagcacatcaaagacatcaggtctatcctaggagagaaaggaaagaacatcaagatcatcgccaagatagagaaccatgaaggagtcaaacgatttgacgagatcctgcaggagtcggatggtatcatggtggccagaggtgaccttggcattgagattcccccagagaaggtgttcctggcccagaagatgatgattggtcgatgtaacagggcggggaaacccgtcatctgtgccacacagatgttggagtcgatggtgaagaagccccgccccacgagggcagagtccagcgatgtggccaatgccgtgctagacggggccgactgtgtcatgttgtcaggggaaactgccaagggagactacccactggagtgtgtcaaaatgatgcagaagatttgccgggaagctgagtccgcagtcttccaccaccagctgtttgaggaactccgtaaggagacccccacccccacagacgccacccataccgtcgccatagcagcagtggaggcctcgttcaagtgtatggccgccgccatcattgttatcactacctcaggaaggtcggcccatctgatctcagcgtacaggccccgctgtccaatcctggccatcacaaggatagaacagacagctcgtcagtgtcatctcttcaggggcatcttccctatccactatgtggactctgtcatgagcgaatggaccgtcgatgttgacaggaggatctacaaaggaatccagagtggtatggatcgtggatttatccagaagggagatccggtcatcatcattacaggctggaagcccggatccggatccacaaacaccatgcggatcatcaacgctgtggatgtggctaacaaagacctactggcccccatcacaggaataactagtgtgccgagtttcgacaagatagagagtgatttgtctataatcttctga

SEQ ID NO: 855 - protein, 563 aa, Crassostrea gigas
MVSLTSKKIEAAGVATIDSCQLLAAADAMSHLLLMCKLDIDSNPRDVSMTGIICTIVPACREIDTLQKMVIEGMNVARLNFSHGTHEYHEGTIKNIREAVKGFSSPRPLAIALDTKGPEIRTGLLEGGASAELTLNTGDKIKITTDDKFKEKCSKDTLWVDYKNITKVMSVGSRMFIDDGLISVIVKEMGADYINCVVENGGDLGSKKGCNLPGIAVDLPAVSTKDKEDLLFGVAQGVDMIFASFIRSGQHIKDIRSILGEKGKNIKIIAKIENHEGVKRFDEILQESDGIMVARGDLGIEIPPEKVFLAQKMMIGRCNRAGKPVICATQMLESMVKKPRPTRAESSDVANAVLDGADCVMLSGETAKGDYPLECVKMMQKICREAESAVFHHQLFEELRKETPTPTDATHTVAIAAVEASFKCMAAAIIVITTSGRSAHLISAYRPRCPILAITRIEQTARQCHLFRGIFPIHYVDSVMSEWTVDVDRRIYKGIQSGMDRGFIQKGDPVIIITGWKPGSGSTNTMRIINAVDVANKDLLAPITGITSVPSFDKIESDLSIIF

SEQ ID NO: 856 - DNA, 1533 bp, Arabidopsis thaliana
  CDS (1)..(1533)
atgtcgaacatagacatagaaggaatattgaaggagctacctaatgatgggaggactcctaagactaagatcgtttgtacattaggtcctgcgtctaggtctgtgacaatgattgagaagcttcttaaagcaggcatgaatgtagctcgattcaatttctctcacggaagccatgagtaccatcaggagactcttgacaatctccgcaccgctatgcagaataccggcattctcgctgctgttatgcttgatacaaaggggcctgagattcgtaccggtttcttgaaagatgggaaccctatacaactaaaggaaggccaagagatcacaattaccactgattatgacatcaagggcgatgagaaaacgatttccatgagctacaaaaagctcccagtggatgtgaagcccggaaataccatactatgtgcagatggaagcataagtcttgctgtcgtgtcatgtgatccaaacgctgggactgttatatgtcgatgtgaaaatacagccatgctaggtgaaagaaaaaatgtgaatctcccaggtgttgttgttgatctccccacattgactgacaaggatgtagaagatattcttaaatggggtgttccaaacaacatcgatatgattgctctttcatttgttcgcaaaggttcagatcttgttaatgtccggaaagtccttggatcacattccaagagtataatgttgatgtcgaaggttgagaaccaagaaggagtcctgaatttcgatgagattttgcgtgaaactgatgcattcatggttgctcgtggtgatcttgggatggagattccgatagagaagatcttcttggctcagaagattatgatctacaagtgtaaccttgcaggtaaaccggtggtcacagccactcaaatgctcgagtcgatgatcaaatcaccacggccaacacgagcagaagccacagatgtagcaaacgcagttctcgatggcactgactgtgtgatgcttagcggagaaagtgctgcaggagcttaccctgaaatagcagtgaaaacaatggctaaaatctgcatcgaggcggaatcatcgcttgactacaacacaatcttcaaggagatgattagagcaactccacttccaatgagcactcttgagagtcttgcatcatcagctgtacgaacggcaaacaaagccaaagccaaactcatcatcgtgttgaccagaggaggtacaacagctaaactggtggccaagtatagaccggctgttccaattctatcggtggttgttccggtcttcaccagcgatacgtttaactggagttgcagcgatgagtcaccggcgaggcatagtttgatatatagaggtctgataccggttttgggtgaaggatctgcaaaagcaactgatagtgaatccacagaggagattattgaatctgctttgaagtcagcgacagagaaaggactgtgtaaccatggtgatgctgtggtggctctgcaccgtattggagctgcttcggttatcaagatctgtgtggtgaagtga

SEQ ID NO: 857 - protein, 510 aa, Arabidopsis thaliana
MSNIDIEGILKELPNDGRTPKTKIVCTLGPASRSVTMIEKLLKAGMNVARFNFSHGSHEYHQETLDNLRTAMQNTGILAAVMLDTKGPEIRTGFLKDGNPIQLKEGQEITITTDYDIKGDEKTISMSYKKLPVDVKPGNTILCADGSISLAVVSCDPNAGTVICRCENTAMLGERKNVNLPGVVVDLPTLTDKDVEDILKWGVPNNIDMIALSFVRKGSDLVNVRKVLGSHSKSIMLMSKVENQEGVLNFDEILRETDAFMVARGDLGMEIPIEKIFLAQKIMIYKCNLAGKPVVTATQMLESMIKSPRPTRAEATDVANAVLDGTDCVMLSGESAAGAYPEIAVKTMAKICIEAESSLDYNTIFKEMIRATPLPMSTLESLASSAVRTANKAKAKLIIVLTRGGTTAKLVAKYRPAVPILSVVVPVFTSDTFNWSCSDESPARHSLIYRGLIPVLGEGSAKATDSESTEEIIESALKSATEKGLCNHGDAVVALHRIGAASVIKICVVK

SEQ ID NO: 858 - DNA, 1536 bp, Capsicum annuum
  CDS (1)..(1536)
atggccaacatagacatagctggaatcatgaaggatctccccaatgatggccgtgtcccaaagaccaagattgtttgcactttagggccatcttctagatcagtgccaatgttagagaagcttcttcgtgctggcatgaatgttgccaggtttaacttttcccatgggacccacgagtaccatcaggagacattgaacaatcttaagattgcaatgcagaatactcagattctatgtgctgtcatgcttgataccaaggggcctgagattcgaactggttttttaaaggatggaaaaccgattcagcttaaggaaggccaagaaatcactgtatccacagactataccataaaaggaaatgtagaaatgatctcaatgagctataagaagttggtagtggacttgaagcctggaaataccatcctgtgtgcagatggtacaattacccttactgttttgtcatgtgatccagcggcgggaacggtgagatgtcgctgcgagaacactgccaccttaggagagaggaagaatgtgaaccttccaggtgtggttgttgaccttccaacacttacggagaaggataaagaagatatactagagtggggtgttcctaacaacatcgatatgattgctctttcatttgtgcgcaagggttcagatcttgtcaatgttcgcaaggttcttggtccacatgccaagcgcattcaactaatgtcaaaggttgagaatcaggagggagttgtcaacttcgatgaaatccttcgtgagacagattctttcatggttgctcgaggtgatctcggaatggagattcctgttgagaagattttcttggcccagaagatgatgatatacaagtgtaatcttgctggtaagcctgtggtaactgctactcagatgcttgaatcaatgatcaagtctccacgacccacccgtgctgaggctactgatgtggctaatgccgtcttggatggcactgactgtgttatgttaagtggggagagtgcagctggagcttatcctgagttggcggtaaaaatcatggcacgaatctgccttgaggcagagtcttcacttgagtacgaggctatcttcaaggaaatgatcaggtgtactccattgccaatgagcccattggatgagtctagcatcatcagctgtccgcacgggctaacaaagctaaagcaaaactccattgttgtccttacacgtggcgggagcacagcaaaactggttgccaagtataggcctgctgttcctattctttcagtagttgtgcctgttttgactacagattctttcgattggtccatcagtgacgagaccccagctagacacagtttggtatataggggcttgattccaattcttggtgaaggttcagcaaaagctactgattctgaatcaactgaggtaatcttggaagcttccttgaaatcagccacagagaaagggctatgccaacccggtgatgctgtcgtggcacttcatcgtattggtgctgcatctgttatcaagatttgcatcgtgaagtaa

SEQ ID NO: 859 - protein, 511 aa, Capsicum annuum
MANIDIAGIMKDLPNDGRVPKTKIVCTLGPSSRSVPMLEKLLRAGMNVARFNFSHGTHEYHQETLNNLKIAMQNTQILCAVMLDTKGPEIRTGFLKDGKPIQLKEGQEITVSTDYTIKGNVEMISMSYKKLVVDLKPGNTILCADGTITLTVLSCDPAAGTVRCRCENTATLGERKNVNLPGVVVDLPTLTEKDKEDILEWGVPNNIDMIALSFVRKGSDLVNVRKVLGPHAKRIQLMSKVENQEGVVNFDEILRETDSFMVARGDLGMEIPVEKIFLAQKMMIYKCNLAGKPVVTATQMLESMIKSPRPTRAEATDVANAVLDGTDCVMLSGESAAGAYPELAVKIMARICLEAESSLEYEAIFKEMIRCTPLPMSPLDESSIISCPHGLTKLKQNSIVVLTRGGSTAKLVAKYRPAVPILSVVVPVLTTDSFDWSISDETPARHSLVYRGLIPILGEGSAKATDSESTEVILEASLKSATEKGLCQPGDAVVALHRIGAASVIKICIVK

SEQ ID NO: 860 - DNA, 1419 bp, Candidatus Kuenenia stuttgartiensis
  CDS (1)..(1419): transl_table=11
atgaataattacagaaaaacaaaaatagtatgtaccattgggccggcgagtaattctccggctatgattgaacagttaatatgtgccgggatgaatgtggcacgtcttaatttttcgcatggcgaactatcccaacacaaagagtgtatttcccatattcgcgccatttcggaaaaattaatgcaacccgttgccgtgctccaggatttgtcagggccaaagataagaatcgggatgctttccggcgatgcggttaccttgaagacaaacgatacatttacccttaccaccaggaatatagtggggaatgagcgtgttatatcaatcaattattcagatttacccatgaatgtatctataggcgatacccttctgttaagtgacggagaaatagaagtagaagtcatacaaaaggatgatagaaatattcattgcaaggtaattgtgggaggggtactgacctctcgaaagggaattaatattcctgcacgaagtttgccggtatcctcattaacggaaaaggataaaaaggatctggaatttggaatagagcaaggggttgattacgtagcgatgtcttttgtaaaaaccgctgaggatataacggaattgcgggaccttatacagaagaaaggcaaaactatcccaattatcgcgaaaattgaaaagcacgaggcagtagataatatagaaaaaattgtgaatactgcggatgcaattatggttgcacggggagatcttggggttgaaataccactggagagagttccttccgttcagaaaatgattatccggcttgcaaacagatacggcaaaccagtgattaccgcaacgcaaatgctggcttcaatggtaaataactatcgccccacacgggcagaggtgaccgatgtcgcaaatgcgattcttgacggaagcgatgcggtaatgctctcagaagagtcggcaatagggcgctatcctgccgatgcggtgctaatgctaacgaagattgcgaaacaaattgagcctgatttaacgcaaagcaatacattcgaaaaatttcgcataccggaaaaccgtaccactattcctgacgccataagcatagcaacgtgtcaggtcgcaaatgaattaaacatgaatacgattatcacctgtacccaatcgggaagtacggctcgttttatttcaaagtatcgcccgcggcagaagatccttgcggtaactccttcggtatgcacttacagaaggcttgcattggtgtggggtgttataccgatacttaccgaatcaatggaaaataccgatgatatgatgaaaaagggcatagaagcggcaaaacaagcaggatacattggcgaaaatgaaaccattgcgattaccggaggtgtaccggtagggatacctggttcaacgaatttgttgagggtgtattaa

SEQ ID NO: 861 - protein, 472 aa, Candidatus Kuenenia stuttgartiensis
MNNYRKTKIVCTIGPASNSPAMIEQLICAGMNVARLNFSHGELSQHKECISHIRAISEKLMQPVAVLQDLSGPKIRIGMLSGDAVTLKTNDTFTLTTRNIVGNERVISINYSDLPMNVSIGDTLLLSDGEIEVEVIQKDDRNIHCKVIVGGVLTSRKGINIPARSLPVSSLTEKDKKDLEFGIEQGVDYVAMSFVKTAEDITELRDLIQKKGKTIPIIAKIEKHEAVDNIEKIVNTADAIMVARGDLGVEIPLERVPSVQKMIIRLANRYGKPVITATQMLASMVNNYRPTRAEVTDVANAILDGSDAVMLSEESAIGRYPADAVLMLTKIAKQIEPDLTQSNTFEKFRIPENRTTIPDAISIATCQVANELNMNTIITCTQSGSTARFISKYRPRQKILAVTPSVCTYRRLALVWGVIPILTESMENTDDMMKKGIEAAKQAGYIGENETIAITGGVPVGIPGSTNLLRVY

SEQ ID NO: 862 - DNA, 1590 bp, Medicago truncatula
  CDS (1)..(1590)
atgccttccagtcacttgcttctcgaggaaccaattaggatggcttccatcctagaaccatcaaaagccagctttttttctgcaatgacaaagattgttggaacattgggtcctaaatctcgatctgttgagactatttctggatgtcttaaagctggcatgtctgtggctcgttttgatttttcatggtgtgatcctgagtatcatcaggaaactttggagaatttgaagactgctattaagggtactaagaagctatgtgctgttatgctggatacagtgggtgcagagatgcaggttgttaacaaaagtgagacaactatctcacttgagatagatgctcaggttgttctaacccccaaccagggacaagaagcttcttcagagatattgccaatcaactttgatggactggcccaggcagtgaagacgggagacactatttttattggtcaatacttgttcacaggaagtgaaactacttctgtatggcttgaggtatctgaagtcaaagggaacgatgttgtgtgtattataaagaattcagctacattgaccgggtcattgttcactttgcatgcctctcaaattcacattgatctacctacccttacggagaaagacaaggaggttataagcacctggggagttaaaaacaaaattgattttctgtcattgtcatatactaggcatgctaaagatgtccgcgaggctcgggacttcctttcaaagttaggcgatcttagccagacacaaatttttgcgaagattgaaaatgttgagggattgacccattttgatgagattctgcaagaagctgatggtattattctttctcgtggaaatttgggcattgatcttccaccagagaaggtttttctatttcaaaaatctgccctacacaagtgtaatatggctgggaaacctgctgtgcttacacgtgttgtggacagtatgactgataacttaagaccaactcgtgctgaagccactgatgttgccaatgctgttctagatggaagtgatgcaattcttctgggtgccgagactttacgtggattgtaccctgttgagactatttctactgttggtaggatttgttcagaggctgagaaagttttcaatcaagacctttattttaagaggacagtcaaatatgttggagaacccatgacccacttggaatctattgcatcctctgcggtacgggctgctattaaggtgaaggcttccattataatttgcttcacttcatctggaagggctgcaagattgattgcaaagtataggccgacaatgcctgttctctctgtggtgatcccccgacttaagacaaatcagctaaagtggagcttcagtggagcttttgaggcaaggcaatcacttattgtaagaggtctctttcccatgcttgctgatcctcgtcatcctgctgagtctgagacaacaactgcatcaaatgaatctattcttaaggttgcccttgatcatggaaaagcattgggagttataaagtcacacgaccgtgttgttgtttgtcagaaactcggcgatgcatcagtggttaagattattgagcttgaagattaa

SEQ ID NO: 863 - protein, 529 aa, Medicago truncatula
MPSSHLLLEEPIRMASILEPSKASFFSAMTKIVGTLGPKSRSVETISGCLKAGMSVARFDFSWCDPEYHQETLENLKTAIKGTKKLCAVMLDTVGAEMQVVNKSETTISLEIDAQVVLTPNQGQEASSEILPINFDGLAQAVKTGDTIFIGQYLFTGSETTSVWLEVSEVKGNDVVCIIKNSATLTGSLFTLHASQIHIDLPTLTEKDKEVISTWGVKNKIDFLSLSYTRHAKDVREARDFLSKLGDLSQTQIFAKIENVEGLTHFDEILQEADGIILSRGNLGIDLPPEKVFLFQKSALHKCNMAGKPAVLTRVVDSMTDNLRPTRAEATDVANAVLDGSDAILLGAETLRGLYPVETISTVGRICSEAEKVFNQDLYFKRTVKYVGEPMTHLESIASSAVRAAIKVKASIIICFTSSGRAARLIAKYRPTMPVLSVVIPRLKTNQLKWSFSGAFEARQSLIVRGLFPMLADPRHPAESETTTASNESILKVALDHGKALGVIKSHDRVVVCQKLGDASVVKIIELED

SEQ ID NO: 864 - DNA, 1413 bp, Vibrio alginolyticus 12G01
  CDS (1)..(1413): transl_table=11
atgaaaaagaccaaaatcgtatgtacgattggccctaaaacagaatctgtagagaagctaactgaactagttaacgcaggcatgaacgtaatgcgccttaacttctctcacggtgactacgaagaacacggcactcgtatcgcgaacttccgtaaagtaatggaagctactggcaaaccactagcaattcttctagatactaaaggtccagaaatccgcactatcaagctagaaggcggtaacgatgttgatctagtagcaggtcaagaattcactttcacaactgacacttcagttgtaggtaacaaagataaagttgcagtaacttacgctggtttcgcagccgacctaaacgtaggtaacactatcctagtagacgacggtctaatcgagatggaagttatctctaagactgaaactgaagttaaatgtaaagttcttaacaacggtgcactaggcgaaaacaaaggtgttaaccttcctggcgtttctgtaaacctacctgcactatctgaaaaagataagaacgaccttaagtttggttgtgagcaaggcgttgacttcgtagcagcttctttcatccgtaaagcgtctgacgttcaagaaatccgtgaagtacttgctgcaaacggcggcgagaacatccacatcatctctaagatcgaaaaccaagaaggtgttgataacttcgacgagatcctagatctttctgacggcatcatggttgcacgtggtgacctaggtgttgaaatcccagctgaagaagtaatcttcgctcagaaaatgatgatcgagaagtgtaaccgtgcacgtaagatggttatcacagcaactcaaatgcttgattctatgatcaacaacccacgtcctactcgtgcggaagcaggcgacgttgctaacgcggtaatggacggtactgacgcagtaatgctttctggtgaaacggcgaaaggtaaataccctgttgaagcggtaactatcatggctcaaatcgcgaaccgtactgactcagcgctaaaagctgaactaggttctcgtctagacagcccacgcctacgcatcactgaagcagtatgtaaaggtgcagtagacacagctgagaaactagctgctccacttatcgttgttgcaactgaaggcggtaagtctgcacgttcagtacgtaagtacttcccaactgcaaacattctagcgctaacaactaacaagaaaactgctgcacagctagttctaactaaaggtgttactcctgtagttgttgattcaatcgaaagcactgacgcattctacgtagcgggtaaagaacttgctctagaatcaggtctaggtaacaaaggcgatatcgttgttatggtttctggcgctctagttgcttcaggtactacgaacacagcttctgtacacgtgctataa

SEQ ID NO: 865 - protein, 470 aa, Vibrio alginolyticus 12G01
MKKTKIVCTIGPKTESVEKLTELVNAGMNVMRLNFSHGDYEEHGTRIANFRKVMEATGKPLAILLDTKGPEIRTIKLEGGNDVDLVAGQEFTFTTDTSVVGNKDKVAVTYAGFAADLNVGNTILVDDGLIEMEVISKTETEVKCKVLNNGALGENKGVNLPGVSVNLPALSEKDKNDLKFGCEQGVDFVAASFIRKASDVQEIREVLAANGGENIHIISKIENQEGVDNFDEILDLSDGIMVARGDLGVEIPAEEVIFAQKMMIEKCNRARKMVITATQMLDSMINNPRPTRAEAGDVANAVMDGTDAVMLSGETAKGKYPVEAVTIMAQIANRTDSALKAELGSRLDSPRLRITEAVCKGAVDTAEKLAAPLIVVATEGGKSARSVRKYFPTANILALTTNKKTAAQLVLTKGVTPVVVDSIESTDAFYVAGKELALESGLGNKGDIVVMVSGALVASGTTNTASVHVL

SEQ ID NO: 866 - DNA, 1413 bp, Photobacterium profundum 3TCK
  CDS (1)..(1413): transl_table=11
atgaaaaagaccaagatcgtatgtacgattggaccaaaaactgaatctgtagaaatgctgactaaactagctaacgctggtatgaacgtaatgcgtttaaacttctctcacggtaacttcgaagaacacggtcaacgtatcgaaaacctacgtgaagtaatggctgcatctgctcagcctctagcaattttgctagatactaaaggtcctgaaattcgtactatcaaactagaaaatggcgaagatttcgctctagttgctggtcaagaattcacattcacaactgatattacagttgttggtaaccaagaccgcgttgcagtaacttacccaggtttcgctaaagaccttactaaaggtaacatcatccttgttgatgatggtcttatcgaaatggaagtactagaaacaactgaaactgaagttaagtgtaaagtacttaacaacggtgaccttggtgaaaacaaaggtgttaacctaccaggcgtttctgtaaagcttcctgctctttctgaaaaagataaagcagacttagtattcggttgtgagcaaggcgttgatttcgttgctgcatctttcattcgtaaagaagaagatgttaaagaaatccgtgctctacttactgctaacggtggcgagaagattcaaatcatctctaaaatcgaaaaccaggaaggcgttgataactttgactctatcctagaagcttctgacggtatcatggttgctcgtggcgaccttggtgttgaaatcccagtagaagaagttatctttgctcagaagatgatgatcgagaaatgtaatcgcgcacgtaaagttgttatcactgcaactcaaatgcttgattcaatgattaagaacccacgtccaactcgcgcagaagcgggtgacgttgctaacgcaatcatggatggtactgatgcagtaatgctttcaggtgaatcagctaagggtaaatacccaattgaagctgtaactatcatggctcaaatctgtaaccgtacagattcagcgttaaaagcagaattaggttctcgtctagacagctctcgtctacgtattactgaagcggtatgtaaaggcgcagtagacacttcagagaagctaaatgctcctctaattgttgttgcgactgaagctggtaaatctgcacgctctgtacgtaagtacttcccaactgcaaaaatcattgcaattacaacaaaccagaaaacagctgctcagctttgtctaacgaaaggtgttacacctatcgttgttgatgctatcgacagcactgatgcattctacactcgcggtaaagaaatcgcgctagaaactggtcttggcgctaaaggcgatatcgttgttatggtatctggcgcactagttccttctggtacaactaacacagcttctgtacacgtactttaa

SEQ ID NO: 867 - protein, 470 aa, Photobacterium profundum 3TCK
MKKTKIVCTIGPKTESVEMLTKLANAGMNVMRLNFSHGNFEEHGQRIENLREVMAASAQPLAILLDTKGPEIRTIKLENGEDFALVAGQEFTFTTDITVVGNQDRVAVTYPGFAKDLTKGNIILVDDGLIEMEVLETTETEVKCKVLNNGDLGENKGVNLPGVSVKLPALSEKDKADLVFGCEQGVDFVAASFIRKEEDVKEIRALLTANGGEKIQIISKIENQEGVDNFDSILEASDGIMVARGDLGVEIPVEEVIFAQKMMIEKCNRARKVVITATQMLDSMIKNPRPTRAEAGDVANAIMDGTDAVMLSGESAKGKYPIEAVTIMAQICNRTDSALKAELGSRLDSSRLRITEAVCKGAVDTSEKLNAPLIVVATEAGKSARSVRKYFPTAKIIAITTNQKTAAQLCLTKGVTPIVVDAIDSTDAFYTRGKEIALETGLGAKGDIVVMVSGALVPSGTTNTASVHVL

SEQ ID NO: 868 - DNA, 1410 bp, Psychromonas sp. CNPT3
  CDS (1)..(1410): transl_table=11
atgagaaaaactaaaatagtatgtacgattggtcccaaatctgaatctaaagaaatgttaactaaactcgttaacaatggcatgaatgtaatgcgtctaaatttctctcatggtgacttcgctgagcatggtgctcgtattacaactatccgtgaaatttgccaagaaactggtaaaaatgtagctgttttattagatactaaaggacctgagatccgcactgtaaaacttgcaggcggtaatgatgttacattacaagcaggtcaagaatttacactttcaacaaatcaaagcattattggcgacaatactattgtagccgtcacttatgctgatttcgcaaatgatcttagtgttggcaataccattttacttgatgatggtcttattgaaatgacagtaataagcattgccaatggcgatgtgctttgccgcgttgaaaacaccggtgatcttggtgaaaataaaggtgttaatctacctggcgtaaaagtacaactacccgctctttctgtaaaagataaaggcgacttgatctttggttgtgagcaaaatgttgactttattgctgcatcatttattcgtaaaaaagaagatgtactcgaaatccgtgcattattaaaagcgaatggtggtgaaaacatccaaattatctctaaaattgaaaaccaagaaggtgttgataattttgatgagatcttagaagtttctgacgctatcatggttgctcgtggtgacttaggtgttgaaattgctgttgaagaagttatctttgcacaaaaaatgatgattgaaaaagcgaatgctgcacgtaagcctgttattacagcaacacaaatgcttgattctatgatcaaaaacccacgtccaacacgcgctgaagcgggtgatgttgccaatgctattttagatggtacagatgcagttatgctttctggcgaatcagcaaaaggtaaataccctgcagaagctgttgaaatcatggcaactatttgtacacgtactgatgccgttatgccttcacgcgcggccgttagtaatactaatcttcgtattacagaaacagtatgtaatggtgcagtaaataatgcagagcaacttaatgcaaaacttattattgttgctaccggtgcaggtaaatcagcacgctctttacgtaaatacttccctagtgctactattttagcattaacaagtaaccctaaaacagcgcagcaacttgctctttcaaaaggtgtgttagcacaaatcatcgagaaacaagactctgttgaagcgttttatactttaggtatgaacattgctaaagaacttggccttgttgaagctggcgataaagtggtaatggtttctggatcattagtgccttcaggtacaacaaatacagcatcagttcacgttattgcttaa

SEQ ID NO: 869 - protein, 469 aa, Psychromonas sp. CNPT3
MRKTKIVCTIGPKSESKEMLTKLVNNGMNVMRLNFSHGDFAEHGARITTIREICQETGKNVAVLLDTKGPEIRTVKLAGGNDVTLQAGQEFTLSTNQSIIGDNTIVAVTYADFANDLSVGNTILLDDGLIEMTVISIANGDVLCRVENTGDLGENKGVNLPGVKVQLPALSVKDKGDLIFGCEQNVDFIAASFIRKKEDVLEIRALLKANGGENIQIISKIENQEGVDNFDEILEVSDAIMVARGDLGVEIAVEEVIFAQKMMIEKANAARKPVITATQMLDSMIKNPRPTRAEAGDVANAILDGTDAVMLSGESAKGKYPAEAVEIMATICTRTDAVMPSRAAVSNTNLRITETVCNGAVNNAEQLNAKLIIVATGAGKSARSLRKYFPSATILALTSNPKTAQQLALSKGVLAQIIEKQDSVEAFYTLGMNIAKELGLVEAGDKVVMVSGSLVPSGTTNTASVHVIA

SEQ ID NO: 870 - DNA, 1413 bp, Vibrio angustum S14
  CDS (1)..(1413): transl_table=11
atgaaaaagaccaagatcgtatgtacgattggacctaaaactgaatctgtagaaatgcttactaaactagctaacgctggtatgaacgtaatgcgtcttaacttctcacacggtgacttcgaagagcacggtcaacgtattcgtaacctacgcgaagtaatggctaatacaggcaaagagctagcaatcctgttagatactaaaggccctgaaatccgtacaatcaaactagaaggcggtcaagacttctctctagtagctggtcaagattttacatttacaactgacacttcagttgtaggtaaccaaaactgcgttgcagtaacttacccaggttttgctaaagacctaacaaaaggtaacactatcctagtagacgacggtctaatcgaaatggaagtgttagaaacaactgatactgaagttaagtgtaaagtacttaacaacggtgacttaggcgaaaacaaaggtgttaacctacctggcgtttctgtaaaacttcctgcacttgctgaaaaagacaaagctgatcttaagtttggttgtgagcaaggcgttgatttcgttgctgcatctttcatccgtaaagctgaagacgtacaagaaatccgtgcgcttctaaccgccaacggtggtgaaaacatccaaatcatctctaagatcgaaaaccaagaaggtgttgataacttcgacgcgattcttgatgcatctgacggtatcatggttgctcgtggtgacctaggtgttgagatcccagtagaagaagtaatcttcgctcagaagatgatgatcgagaaatgtaaccgcgcacgtaaagttgtaatcactgcaactcaaatgcttgattctatgattaagaacccacgtccaactcgcgcagaagcgggcgacgttgctaacgcaatcatggatggtacagatgcagtaatgctttctggtgagtcagcgaagggtaaatacccaattgaagctgtaactatcatggcgcaaatctgtgcacgtacagattacgttgttaagccagagctaggttctcgtctagatagccctcgtctacgtatcacagaagcggtatgtaaaggtgcagtagatacagctgagaaactaaacgctccgctaattatcgttgcaactgaagctggtaagtcagctcgctctgtacgtaagtacttcccaacagcacgtattcttgctgtaacaacaaatactaagacagcagctcagctatgtctttctaaaggtgttacacctgttgttgttgattcaattgaaagcacagatgcattctacctacgtggtaaagagctagcgcttgaaacgggtcttggtgctaaaggcgacatcgttgttatggtttctggtgctctagtagcttcaggcactacaaacacagcatctgtacacgtactttaa

SEQ ID NO: 871 - protein, 470 aa, Vibrio angustum S14
MKKTKIVCTIGPKTESVEMLTKLANAGMNVMRLNFSHGDFEEHGQRIRNLREVMANTGKELAILLDTKGPEIRTIKLEGGQDFSLVAGQDFTFTTDTSVVGNQNCVAVTYPGFAKDLTKGNTILVDDGLIEMEVLETTDTEVKCKVLNNGDLGENKGVNLPGVSVKLPALAEKDKADLKFGCEQGVDFVAASFIRKAEDVQEIRALLTANGGENIQIISKIENQEGVDNFDAILDASDGIMVARGDLGVEIPVEEVIFAQKMMIEKCNRARKVVITATQMLDSMIKNPRPTRAEAGDVANAIMDGTDAVMLSGESAKGKYPIEAVTIMAQICARTDYVVKPELGSRLDSPRLRITEAVCKGAVDTAEKLNAPLIIVATEAGKSARSVRKYFPTARILAVTTNTKTAAQLCLSKGVTPVVVDSIESTDAFYLRGKELALETGLGAKGDIVVMVSGALVASGTTNTASVHVL

SEQ ID NO: 872 - DNA, 1761 bp, Bacillus sp. NRRL B-14911
  CDS (1)..(1761): transl_table=11
atgcgcaaaacgaaaatcgtttgtacgattggccctgccagtgaaagtattgagaaattgacacagctgattgaagctggaatgaacgtttcccgtctgaatttttcccacggagattttgaagaacatggagcaaggatcaaaaacatccgcgaggcttctaaaagcactggcaagacggtcgcaatcctgcttgatacaaaaggacctgaaatccgtacaaacaatatggaaaacggggcagtcgagctggaagccggaaacaatatcattgtttcaatgaatgaagttctggggaatgccgataaattttcagttacatacgccggactgattgacgatgtccatactggttcaaaaatcctgctggatgacggcctgatcggattagaagtaacaaagattgataaggccaacagtgaaattcatacaaagatcctcaacagcggaactttgaaaaataaaaaaggcgttaacgttccaggcgtttctgtaaaacttccaggaattacagagaaggatgcaaatgatatcctttttggaattgagcagggagtagacttcattgctgcatcattcgtgcgccgtgcttcggatgttcttgaaatcaggcagctgcttgaagataataatgcttcacatatccaaatcatccctaagatcgaaaaccaggaaggcgtcgacaacatcgatgaaatccttgaagtatctgacggtctgatggtagcccgcggcgaccttggtgttgaaatccctgcagaagaggttcctcttgtgcaaaaaagcctgatcaaaaagtgcaatattcaaggcaagcctgttattaccgctacacagatgcttgattctatgcagcgcaatccgcgcccgacgcgtgcagaagcaagcgatgtggccaatgcgatctttgacggcacagatgccatcatgctatccggcgaaacagcagcaggcacatacccggtagaagcagtgcagacgatgcataacatcgcttcccgtgcagaatcagcgcttgatcataaagaaatcctttctaaccgcagcaaggataacgaacataatatcacagatgcgatcggccagtctgtggcacatactgctttgaatctcgatgttaatgcaatcatcactccaacggaaagcggccatacagcaaggatgatttcaaaatatcgtccaaaggcaccgattgttgcggtaacttcccaagaatctgttacacgccgcctttcattggtttggggtgtatatcctcaggtcggacaggaagcttcaacgacggatgatatgctcgattcagctgtacaggaaagcatgaacagcggactagtcggttcaggcgacctggttgtcatcactgcaggcgtccctgttggcgaggcaggaacaacgaatctgatgaagattcacgtgattggcgatgcagcactgagagcacagggcatcggccgcaaatcagcgttcgggaaagtggttgtcgcaaaggatgcaaaggaagcgattgaaaaggtcacgcaaggttccattcttgtcacagtcggctctgaccgtgatatggttcctgccattgaaaaatgcagtgccttgattacggaagagggcggattgacaagccatgcagctgttgtcggccttaatcttggaattcctgttatcgtgggtgcggaaaacgctacttccattttcaaggatggccaggaaatcacagtcgattcgcgcagaggcatcatctataatggacatgccagcgtcctgtaa

SEQ ID NO: 873 - protein, 586 aa, Bacillus sp. NRRL B-14911
MRKTKIVCTIGPASESIEKLTQLIEAGMNVSRLNFSHGDFEEHGARIKNIREASKSTGKTVAILLDTKGPEIRTNNMENGAVELEAGNNIIVSMNEVLGNADKFSVTYAGLIDDVHTGSKILLDDGLIGLEVTKIDKANSEIHTKILNSGTLKNKKGVNVPGVSVKLPGITEKDANDILFGIEQGVDFIAASFVRRASDVLEIRQLLEDNNASHIQIIPKIENQEGVDNIDEILEVSDGLMVARGDLGVEIPAEEVPLVQKSLIKKCNIQGKPVITATQMLDSMQRNPRPTRAEASDVANAIFDGTDAIMLSGETAAGTYPVEAVQTMHNIASRAESALDHKEILSNRSKDNEHNITDAIGQSVAHTALNLDVNAIITPTESGHTARMISKYRPKAPIVAVTSQESVTRRLSLVWGVYPQVGQEASTTDDMLDSAVQESMNSGLVGSGDLVVITAGVPVGEAGTTNLMKIHVIGDAALRAQGIGRKSAFGKVVVAKDAKEAIEKVTQGSILVTVGSDRDMVPAIEKCSALITEEGGLTSHAAVVGLNLGIPVIVGAENATSIFKDGQEITVDSRRGIIYNGHASVL

SEQ ID NO: 874 - DNA, 1413 bp, Photobacterium sp. SKA34
  CDS (1)..(1413): transl_table=11
atgaaaaagaccaagatcgtatgtacgattggacctaaaactgaatctgtagaaatgcttactaaactagctaacgctggtatgaacgtaatgcgtctaaacttctcacacggtgacttcgaagaacacggtcaacgtattcgtaacctacgcgaagtaatggttaatacaggcaaagaactagcaatcctgttagatactaaaggccctgaaatccgtacaatcaaactagaaggcggtcaagacttctctctagtagctggtcaagattttacatttacaactgacacttcagttgtaggtaaccaaaactgcgttgcagtaacttacccaggttttgcaaaagacctaacaaaaggtaacactatcctagtagacgacggtctaatcgaaatggaagtgttagaaacaacagagactgaagttaagtgtaaagtacttaacaacggtgacttaggcgaaaacaaaggtgttaacctacctggcgtttctgtaaaacttcctgcacttgctgaaaaagacaaagctgatcttaagtttggttgcgagcaaggcgttgatttcgttgctgcatctttcatccgtaaagctgaagacgtacaggaaatccgtgcgcttctaacagctaatggtggcgaaaacatccaaatcatctctaagattgaaaaccaagaaggtgttgataacttcgacgctattcttgatgcctctgacggtatcatggttgctcgtggtgatcttggtgttgaaattccagttgaagaagttatcttcgctcagaagatgatgatcgagaaatgtaaccgtgcacgtaaagttgtaatcactgcgactcaaatgcttgattctatgattaagaacccacgtccaactcgcgcagaagcgggcgacgttgctaacgcaatcatggatggtacggatgcagtaatgctttctggtgaatcagcgaagggtaaatatccaattgaagctgtaactatcatggcgcaaatctgtgcacgtactgattacgttgttaagcctgagctaggttctcgtctagatagccctcgcctacgtatcacagaagcggtatgtaaaggtgctgtagatacagctgagaaactaaacgctccgctaattattgtagcaactgaagctggtaagtcagctcgctctgtacgtaagtacttcccaacagcacgcattcttgctgtaacaacaaatactaagacagctgctcagctatgtctttctaaaggtgttacacctgttgttgttgattcaattgaaagcactgatgcattctacctacgcggtaaagagctagcgcttgaaacgggtctaggtgctaaaggcgacatcgttgttatggtttctggcgctctagttacttcaggtactacaaacacagcatctgtacacgtactttaa

SEQ ID NO: 875 - protein, 470 aa, Photobacterium sp. SKA34
MKKTKIVCTIGPKTESVEMLTKLANAGMNVMRLNFSHGDFEEHGQRIRNLREVMVNTGKELAILLDTKGPEIRTIKLEGGQDFSLVAGQDFTFTTDTSVVGNQNCVAVTYPGFAKDLTKGNTILVDDGLIEMEVLETTETEVKCKVLNNGDLGENKGVNLPGVSVKLPALAEKDKADLKFGCEQGVDFVAASFIRKAEDVQEIRALLTANGGENIQIISKIENQEGVDNFDAILDASDGIMVARGDLGVEIPVEEVIFAQKMMIEKCNRARKVVITATQMLDSMIKNPRPTRAEAGDVANAIMDGTDAVMLSGESAKGKYPIEAVTIMAQICARTDYVVKPELGSRLDSPRLRITEAVCKGAVDTAEKLNAPLIIVATEAGKSARSVRKYFPTARILAVTTNTKTAAQLCLSKGVTPVVVDSIESTDAFYLRGKELALETGLGAKGDIVVMVSGALVTSGTTNTASVHVL

SEQ ID NO: 876 - DNA, 1437 bp, Nitrosovibrio sp. FJI82
  CDS (1)..(1437): transl_table=11
atgatccgaagaacaaaaatagttgccaccctcggtcctgcatccagcgaccccaagacgctcgagcgcatgatccatgccggagtggatgttgtccgcatcaacttctcccacggcagccgggaagagcatatcgcgctggcggagctgacgcgctcgctggcacgttccgccggccacacggtgggcgtgttggcggacctgcaggggccgaaaatccgcatcggcaggtttgagcacggaaaaatcacgctcaaggccggcgacaagttcgtgctggatgccgaatgcgaactcggcaatcaggagcgggtgggactggattacaaggagctgcctaacgacgtggaaaccggctcgacgctgatgctggacgatggtcgcatcgtgctgggcgttgccaacgtcaaggggcggcaggtgtactgcgtggtggaacagggcggggtcctgtccaacaacaagggcatcaaccgcaaaggcggcgggctgagcgcgcccgcgctcaccaaaaaagacatggacgatatccggacagccgccgtgctcaaggcggattatctggccgtgtcctttccgcgctcgggcgatgacatacgctgggcgcgcgacttgatgcgcgaagccggcggcaaaagcctgctgatggcgaaaattgagcgttccgaggcaatccccgcgctgaatgacatactgcaggcttctgacgcgatcatggtggcgcgcggcgacctggcggtggaagtgggcgatgctgtcgtgccggcgctgcaaaagcagatgatacgcgccgctcgcgccgccaacaaactggtggtgaccgccacgcagatgatggaatcaatgatcaccagcccgattccgacccgggcggaagtgtccgacgtcgccaatgccgtgctggacggaaccgatgcggtcatgctgtcggcggaatccgctgccggccaatacccggtcgagtcggtcgaggcgatggccagggtgtgcctcgaggcggaaaaggaatatctggtgacgcaggagttgcggcgcgtgccggacaccgtgccggaaacgatcgaggaagcgattgcccgggcgaccatgttcaccgccggtagcctgaagatccgcgcgattgccgcgctcactcatagcggcgtgaccgcactgctgatgtcgcgcaggagcaccaacgtgccgatcttcgcgttaagcccgcaggaggacacgcgccgcaagacgacgctgtttcgcggcgtctatccgatgaaattcggcggcggccagagtgatcccgagattatcctgaatcaggctgaagacgaactgctcaagcgcggcgcggtgcacaacggtgatctgatcgtgatgaccatcggcgaaccggtcggcaaggcaggcggcaccaataccatgaagatcgtcaaagtgggggaatacagaaaggcttga

SEQ ID NO: 877 - protein, 478 aa, Nitrosovibrio sp. FJI82
MIRRTKIVATLGPASSDPKTLERMIHAGVDVVRINFSHGSREEHIALAELTRSLARSAGHTVGVLADLQGPKIRIGRFEHGKITLKAGDKFVLDAECELGNQERVGLDYKELPNDVETGSTLMLDDGRIVLGVANVKGRQVYCVVEQGGVLSNNKGINRKGGGLSAPALTKKDMDDIRTAAVLKADYLAVSFPRSGDDIRWARDLMREAGGKSLLMAKIERSEAIPALNDILQASDAIMVARGDLAVEVGDAVVPALQKQMIRAARAANKLVVTATQMMESMITSPIPTRAEVSDVANAVLDGTDAVMLSAESAAGQYPVESVEAMARVCLEAEKEYLVTQELRRVPDTVPETIEEAIARATMFTAGSLKIRAIAALTHSGVTALLMSRRSTNVPIFALSPQEDTRRKTTLFRGVYPMKFGGGQSDPEIILNQAEDELLKRGAVHNGDLIVMTIGEPVGKAGGTNTMKIVKVGEYRKA

SEQ ID NO: 878 - DNA, 1455 bp, Nitrosospira sp. TYM9
  CDS (1)..(1455): transl_table=11
atgattcgaagaacaaaaattgtggcaacgctcggtccggcatccagagaccccaaggtactcgaacgaatgataaatgccggggtggatgtggtgcggatcaatttttcgcatggcacaagagaagaacatatagaaagcgccgaattggcccgttcgctggcacgtgccgcgggtcatgccgtgggcgttctggcggacttgcaagggccgaagattcgtgtcggcagatttgaaaagggcaataatctcctaaaaattggcgataaattcatacttgacgccgaatgtgaactgggtaaccaggaacgggtgggtctggattacaaagaactgccaaatgacgtggaaacgggctcgacgcttatcctcgacgatggccgcatcgtactgggcgtttccgaggtcaagggaagcaaggtgtactgcgtggttgagcagggcggaatactgtccaataacaaggggatcaaccgcaagggtggcggactcagtgcacccgccttgaccgcaaaggacgtggaagacatcaagactgcggcagcgcttaaagcagactaccttgccgtatccttcccgcgctccggtgatgatatgcgctgggcacgagacgtgatgcgcgatgccggcggcaaaagcctgctaatggcaaagatcgagcgctccgaagcaattctggcgttggatgatattttggaagcctccgatgccatcatggttgcgcgaggtgatcttgcggtagaagtgggcgacgcagtggtgccggctttgcagaaacgaatgatccgcacggcacgcgccaacaacaagctcgtggtgaccgccacgcagatgatggaatccatggtcaacagccctattccaacccgtgcggaagtgtccgatgtcgctaatgcggtgctggatggtaccgatgcggtaatgctgtcggcggaatccgccgcaggacagtatcccgtcgaatcggtcgcagccatggcaagagtctgcctcgaggcagaaaaagagtatctggtgagcagcgaactccgccggcttcagggcggccttccggaaacgatagaggaagcgattgcacgtgcgaccatgttcactgcgggggggttgaaaattcgggccattgccgcgctcacgcagagcggcagaacggtattgttgatgtcgcgcagaagctccaacgtacctatcttcgcgctgagcccccaggaggatacccgccgtaaaatgacgttgtttcgtggcgtctatcccgttaggttcggcggcggatcgaacgatcccgagattatcctgaatcatgccgaaaacgaattgctcaagcgcggcgtcgtgcgcaacggcgatctgattatcatgactattggcgaaccggtaggcaaagccggcgggaccaacacgatgaaaatcgtcaaggtaggcgaacacagaaaacttgaacgaaaaccggggtcctga

SEQ ID NO: 879 - protein, 484 aa, Nitrosospira sp. TYM9
MIRRTKIVATLGPASRDPKVLERMINAGVDVVRINFSHGTREEHIESAELARSLARAAGHAVGVLADLQGPKIRVGRFEKGNNLLKIGDKFILDAECELGNQERVGLDYKELPNDVETGSTLILDDGRIVLGVSEVKGSKVYCVVEQGGILSNNKGINRKGGGLSAPALTAKDVEDIKTAAALKADYLAVSFPRSGDDMRWARDVMRDAGGKSLLMAKIERSEAILALDDILEASDAIMVARGDLAVEVGDAVVPALQKRMIRTARANNKLVVTATQMMESMVNSPIPTRAEVSDVANAVLDGTDAVMLSAESAAGQYPVESVAAMARVCLEAEKEYLVSSELRRLQGGLPETIEEAIARATMFTAGGLKIRAIAALTQSGRTVLLMSRRSSNVPIFALSPQEDTRRKMTLFRGVYPVRFGGGSNDPEIILNHAENELLKRGVVRNGDLIIMTIGEPVGKAGGTNTMKIVKVGEHRKLERKPGS

SEQ ID NO: 880 - DNA, 1455 bp, Nitrosospira sp. HBN8222A
  CDS (1)..(1455): transl_table=11
atgattcgaagaacaaagatcgtagcaacacttggtcccgcatcccgagatgcaaaggtgctggagcggatgataaacgccggcgttgatgtagtccgtatcaacttttcccatgggaccagggaagagcatatcgaaggtgccgagttggcgcgctccctggcacacgccgccggtcacgcggtgggtgtgctggcggacctgcaggggcccaagattcgaatcggcaaatttgaaaataataaaattctgctgaaaacgggcgatcaattcatactcgacgccgaatgcgagcttggaaaccaggaacgggtgggtctggattacaaggaattgcccagcgatgtcgagaccggtgcaacgctgatcctggatgatggccgcatcgtgctcggcgtttccgaagtcaagggaagccaggtttattgcgtggttgaacagggcggaatactgtccaacaacaagggaatcaaccggaaaggcgggggtctgagtgcgcctgccctcaccggcaaggatgtggaagatatccggacggccgcagcgcttaaagccgattatctggcggtatcgtttccccgttctggggaggatatgcgctgggcgcgcgatgtaatgcgcgaggcgggcgggaaaagtttattgatggcgaagatcgaacgatcggaagccattctggcgctggacgacattctggaggcctccgatgcgatcatggttgcgcgtggagaccttgcggtagaggtaggcgatgcagtggtgccggcgttgcaaaaacggatgatccgcactgcccgaaccaggaacaagctggtggtaaccgccacccagatgatggagtccatggtcagcagtcccatccccacccgcgcggaggtatcggatgtagcaaatgcggtactggatggcactgatgcggtgatgctgtcagcggaatccgccaccgggcaatatcccgttgaagcagttgcggcaatggcaagggtatgcctggaggcggaaaaggaatacctggtaagcagtgaaaatcgacggctgcagggcggcctgcccgataatatcgaagaagcgattgcccgtgcgaccatgttcaccgcagggggattgaagatcagagctattgcggcgcttacgcaaagcggcaggaccgtgttgctgatgtcgcgcaggagttccaccgtgcccatattcgcgttgagtccgcaggaggatacacggcgcaagatgacgttatttcgcggcgtgtatccggtcaagttcggcggaggtttgaacgaccccgaaatcatcctgaatcacgccgaaaacgagttgctcaggcgtggcgcggtgcgcaacggcgacctgatcatcatgaccatcggtgaaccggtgggcaaggcaggtggcaccaataccatgaaaatagtgaaggtcggcgagcacaggaagcaggaacggaaggtggaatcctga

SEQ ID NO: 881 - protein, 484 aa, Nitrosospira sp. HBN8222A
MIRRTKIVATLGPASRDAKVLERMINAGVDVVRINFSHGTREEHIEGAELARSLAHAAGHAVGVLADLQGPKIRIGKFENNKILLKTGDQFILDAECELGNQERVGLDYKELPSDVETGATLILDDGRIVLGVSEVKGSQVYCVVEQGGILSNNKGINRKGGGLSAPALTGKDVEDIRTAAALKADYLAVSFPRSGEDMRWARDVMREAGGKSLLMAKIERSEAILALDDILEASDAIMVARGDLAVEVGDAVVPALQKRMIRTARTRNKLVVTATQMMESMVSSPIPTRAEVSDVANAVLDGTDAVMLSAESATGQYPVEAVAAMARVCLEAEKEYLVSSENRRLQGGLPDNIEEAIARATMFTAGGLKIRAIAALTQSGRTVLLMSRRSSTVPIFALSPQEDTRRKMTLFRGVYPVKFGGGLNDPEIILNHAENELLRRGAVRNGDLIIMTIGEPVGKAGGTNTMKIVKVGEHRKQERKVES

SEQ ID NO: 882 - DNA, 1632 bp, Phaeodactylum tricornutum
  CDS (1)..(1632)
atgtccttgtcccagagctccgacgtcccaatcctcgcgggaggttttattaccttggataccgtcaagcatcctacaaatactattaaccgtcgtaccaagattgtttgtaccattggacccgcctgctggaatgtcgatcagttggaaatactgattgaatcgggcatgaatgtggcgcgctttaacttttcgcacggtgatcatgcaggccatggcgctgttctcgaacgagtacgtcaggctgcacaaaacaagggccgaaacattgctattctattggataccaagggaccggagattcgtaccggtttttttgccaatggcgcttccaagattgaactggtcaagggcgaaacaatcgtattgacgtcggactataagttcaagggcgaccagcataagctggcttgttcctaccccgccttggcacagtctgtaacacaaggacagcaaattctagtggccgatggatcgctcgtgttaacggttctccaaacggacgaggcagccggtgaagtgtcctgccggatcgacaacaatgcatcgatgggcgaacgcaagaacatgaatttacccggggtcaaggtggacctgcccaccttcaccgaaaaggatgtggacgatatcgtcaatttcggaattaagcacaaggttgactttattgcggcctcgtttgttcgcaagcagtccgatgtggctaacttgcgccagctgctggccgaaaacggtggtcagcaaattaaaatctgttgtaaaattgagaaccaagaaggtctggaaaactacgatgcaattctgcaggcaaccgattccatcatggttgctcgcggtgatttgggtatggaaattcctccagctaaggtcttcttggcccaaaagatgatgattcgtgaagcgaacattgcgggcaagcccgtcattactgccactcaaatgttggaatcaatgattaacaaccctcgtccgactcgtgccgagtgtagtgatgtcgccaacgcagtcttggacggcactgactgtgtaatgctttccggagaaaccgccaacggcccatactttgaagaggctgttaaagtcatggcgcgaacctgctgcgaggccgaaaactcacgcaactacaattcgttgtattctgccgtgcgttcttctgtcatggccaagtacggcagtgtaccacccgaagaatctttggctagttctgccgtcaagacggcgattgatgtcaacgctcgcttgattctagttctctccgaaagcggaatgacggctgggtatgtgagtaaattccgtccgggaagggctattgtttgcttgacaccaagtgatgccgttgctcgtcaaacgggtggaattctgaagggtgtgcactcctatgtcgtggacaacttggataacacggaagagctcatcgcggagactggcgttgaggcggtgaaggcgggcatcgctagcgtgggtgatttgatggttgtagtcagtggaactctttacggcatcggaaagaataatcaggttcgcgttagcgttatcgaggctccggaaggtaccgtgaaggagacgccagctgcaatgaaacgccttgtatcttttgtatacgccgcggacgaaattccaggaaatgccgactag

SEQ ID NO: 883 - protein, 543 aa, Phaeodactylum tricornutum
MSLSQSSDVPILAGGFITLDTVKHPTNTINRRTKIVCTIGPACWNVDQLEILIESGMNVARFNFSHGDHAGHGAVLERVRQAAQNKGRNIAILLDTKGPEIRTGFFANGASKIELVKGETIVLTSDYKFKGDQHKLACSYPALAQSVTQGQQILVADGSLVLTVLQTDEAAGEVSCRIDNNASMGERKNMNLPGVKVDLPTFTEKDVDDIVNFGIKHKVDFIAASFVRKQSDVANLRQLLAENGGQQIKICCKIENQEGLENYDAILQATDSIMVARGDLGMEIPPAKVFLAQKMMIREANIAGKPVITATQMLESMINNPRPTRAECSDVANAVLDGTDCVMLSGETANGPYFEEAVKVMARTCCEAENSRNYNSLYSAVRSSVMAKYGSVPPEESLASSAVKTAIDVNARLILVLSESGMTAGYVSKFRPGRAIVCLTPSDAVARQTGGILKGVHSYVVDNLDNTEELIAETGVEAVKAGIASVGDLMVVVSGTLYGIGKNNQVRVSVIEAPEGTVKETPAAMKRLVSFVYAADEIPGNAD

SEQ ID NO: 884 - DNA, 1500 bp, Propionibacterium freudenreichii subsp. shermanii
  CDS (1)..(1500): transl_table=11
atgcgtagagccaagattgtgtgcacgctcgggccggcaacgtcgacccaggagcgtatggaagagatgattcacgcgggtttggatgtggcccggttcaatatgagccacggggaccattccgaacacctgcgtcgccttgaggagacgcgtgccgcggccgaggcggtcggtaagaccgtgggcctgctggcagaccttcagggccccaagatcaggttgggtgtcttcgccgacgggaaggccgagctcgcgctcggccaggagttcatcatcaccaccgatgacgtccccggcgacgcccaccgcgcgtcaaccacctacaagggactgcccgccgacgtgaaggccggcgaccgcatcctcatcgacgatggcaacatccagctggaggccaccggcgtcaccgacaccgatgtgatcaccaaggtcaccgttgccggccccgtgagcaaccacaagggcatcaacctgcccggcgttgccgtcaacgtgcccgcgctgtccgagaaggacgagaacgacctgcgctgggccttgcgcaacgacttcgacatgatcgcgctgtccttcgtgcgccatgccgccgacatcgaccgcgtccacgagatcatggacgaggaggacatgcacctgccggtgatcgccaagctcgagaagccgcaggccatcgagaacctcgacgagatcatcgacgcctttgacggcttcatggttgcccgcggcgacctgggtgtcgagatgcccctcgagcaggtgccgctggtgcagaagaccatcatccgcaaggcccgcaagtgggccaagccggtgatcgtggccacccagatgctggattcgatgatcagcaatccgcgcccgacccgcgccgaggcctccgatgtggccaatgccgtgctcgacggtgccgatgccgtgatgctgtccggcgagacctcggtgggtgccttcccggtgaccaccgtggagacgatggccaatatcgtctccaccaccgagggcgagggcctcaccgacatctcgaagatcaagtgggatccccacaccaccggcggcgtcattgccatggctgccgccacctcgggtgtgcagctgggagccaagttcctggtggccttcacccagtcgggtgataccgcacgccgcatgtcgcggctgcgcaatgacattccgctgctggtcttcacccccgaggcgaagaccgcccagtggctgacgctgtgttggggcgcccaggtgttccacacccccagttactccagcaacgaggaaatggtcaccgccgtcaaccgcaccctgcaggacctcggtctggcggcacccgacgacgtcgtggtgatcatcttcggttccccgatcggcatggtcggcaagaccaacaccatgcgcatccaccggctgaagccgatcgactgggtcgagaaggtcaagctgccgagctatatgcgcggcgaggatggtcccgtcgatggcaccgtggtggccaacgacaggcgctga

SEQ ID NO: 885 - protein, 499 aa, Propionibacterium freudenreichii subsp. shermanii
MRRAKIVCTLGPATSTQERMEEMIHAGLDVARFNMSHGDHSEHLRRLEETRAAAEAVGKTVGLLADLQGPKIRLGVFADGKAELALGQEFIITTDDVPGDAHRASTTYKGLPADVKAGDRILIDDGNIQLEATGVTDTDVITKVTVAGPVSNHKGINLPGVAVNVPALSEKDENDLRWALRNDFDMIALSFVRHAADIDRVHEIMDEEDMHLPVIAKLEKPQAIENLDEIIDAFDGFMVARGDLGVEMPLEQVPLVQKTIIRKARKWAKPVIVATQMLDSMISNPRPTRAEASDVANAVLDGADAVMLSGETSVGAFPVTTVETMANIVSTTEGEGLTDISKIKWDPHTTGGVIAMAAATSGVQLGAKFLVAFTQSGDTARRMSRLRNDIPLLVFTPEAKTAQWLTLCWGAQVFHTPSYSSNEEMVTAVNRTLQDLGLAAPDDVVVIIFGSPIGMVGKTNTMRIHRLKPIDWVEKVKLPSYMRGEDGPVDGTVVANDRR

SEQ ID NO: 886 - DNA, 1533 bp, Solanum tuberosum
  CDS (1)..(1533)
atggccaacatagacatagctgggatcatgaaggatctcccaaatgatggccgtattccaaagaccaagattgtttgcacgctagggccatcttctagaacagtaccaatgctggagaagcttctccgtgctggcatgaacgttgccaggtttaacttttctcatgggacccatgagtaccatcaggagacattggacaatcttaagattgctatgcagaatactcagatcctgtgtgctgtcatgcttgacaccaaggggcctgagattcgtactggtttcttaacagatggaaaaccgattcagcttaaggaaggtcaagaaatcactgtatccacagactataccataaaaggaaatgaagaaatgatctcaatgagctataagaagttggtagtggacttgaagcccggcaataccatcttgtgtgcagatggtaccataacccttactgttttgtcatgtgatccaccgtctggaacggtgagatgtcgctgcgagaattctgccaccttaggagagaggaagaatgtaaaccttccaggtgtggttgtggaccttccaacacttacagagaaggataaagaagatatactagagtggggtgttcctaacaacattgatatgatagcgctttcgtttgtgcgtaagggttcagatcttgtcaatgttcgcaaggctcttggtccacatgccaagcgcattcaactaatgtcaaaggttgaaaaccaagaaggggtaatcaactttgacgaaatccttcgtgagacagattcttttatggttgctcgaggtgatctcggaatggaaattccagttgagaagattttcttggctcagaaaatgatgatatacaagtgtaatcttgctggcaaagctgtggtaactgccactcagatgcttgaatcaatgatcaagtctccacgacccacccgtgctgaggctactgatgtggctaatgctgtcttggatggcactgattgtgttatgttaagtggggagagtgcagctggtgcttatcctgagctggcagtaaaaatcatgtcacgaatttgcattgaggcagagtcttcacttgacaatgaggctatcttcaaggaaatgatcaggtgtaccccgctgccaatgagcccattggagagtcttgcatcatctgctgtccgtacagctaacaaagctagagcaaaactcattgttgtcctgacacgtggtgggagtacagcaaagctggttgccaagtataggcctgcagttcctattctgtcagtagtcgtgcctgttttgactacagactcttttgattggtccatcagcgacgagaccccagctagacacagtttagtatataggggcttgattcctcttcttggtgaaggttctgcaaaggccactgattctgaatcaactgaggtaatccttgaagcggccctgaagtctgccgtaacgagagggctatgcaaacctggtgatgctgtcgtggcacttcatcgtattggttctgcatccgttatcaagatttgcgtcttgaagtaa

SEQ ID NO: 887 - protein, 510 aa, Solanum tuberosum
MANIDIAGIMKDLPNDGRIPKTKIVCTLGPSSRTVPMLEKLLRAGMNVARFNFSHGTHEYHQETLDNLKIAMQNTQILCAVMLDTKGPEIRTGFLTDGKPIQLKEGQEITVSTDYTIKGNEEMISMSYKKLVVDLKPGNTILCADGTITLTVLSCDPPSGTVRCRCENSATLGERKNVNLPGVVVDLPTLTEKDKEDILEWGVPNNIDMIALSFVRKGSDLVNVRKALGPHAKRIQLMSKVENQEGVINFDEILRETDSFMVARGDLGMEIPVEKIFLAQKMMIYKCNLAGKAVVTATQMLESMIKSPRPTRAEATDVANAVLDGTDCVMLSGESAAGAYPELAVKIMSRICIEAESSLDNEAIFKEMIRCTPLPMSPLESLASSAVRTANKARAKLIVVLTRGGSTAKLVAKYRPAVPILSVVVPVLTTDSFDWSISDETPARHSLVYRGLIPLLGEGSAKATDSESTEVILEAALKSAVTRGLCKPGDAVVALHRIGSASVIKICVLK

SEQ ID NO: 888 - DNA, 1533 bp, Citrus sinensis
  CDS (1)..(1533)
atggcgaacatagatatagagggactcttgagagatgtgccaaatgataagcggttgccgaagacgaagattgtgtgtactttaggtcctgcttcccgttctgtgccgatgcttgagaagcttctgagggctggaatgaatgttgctcgtttcaatttctctcacggtacgcacgagtatcagcaggagactttgaacaatctcagagctgccatgcacaacacccagatcctctgtgctgtcatgctcgataccaagggacccgagattcgaactggtttccttaaggatggaaaacccatacaacttaaagaaggtcaggaaattactgtatctactgattatgacttcaagggaaatgaagaaatgatcaccatgagttacaagaagctgcctgtggatgtgaagcctggaaataccatcttgtgtgcagatggcaccataaccctgactgtcttgtcttgtgatccaaaatctggaactgtcaggtgccgttgtgagaacactgcaatgctaggcgagagaaagaatgtcaatcttcctggtgttgtggtggatctgcccacactgactgaaaaggataaagaggatatcctccgatggggtgttcctaataatatagatatgattgctctttcatttgtgcgcaagggttcagatcttgtcactgtacgtaaggtccttgggcctcatgccaaaaacatacagttaatgtctaaggttgagaaccaggagggagttgtcaacttcgatgatattttgcgtgaaactgattcatttatggttgcccgaggtgaccttggaatggagattccagttgagaagattttccttgcacaaaagatgatgatatacaagtgcaatcttgtgggcaagcctgtggtcaccgcgactcagatgcttgaatcaatgatcaagtctcctcggccaactcgtgctgaagctactgatgttgccaatgctgttcttgacggcactgattgtgtaatgcttagtggtgagagtgcagctggggcctacccggagattgctgttaagatcatgcgacgaatttgcatcgaagctgaatcctcccttgattatagggctgtgtttaaggagatgattagatcaactcctcttcctatgagcccactggagagccttgcttcatcggctgttaggacagctaacaaagctagagctaaactaattgttgttctgacacgtggtgggactacagccaagttggttgccaagtatagaccagctgttccaatcctatctgtagttgtcccagtcctaacgactgattcatttgattggacctgcagtgatgaaaccccagctaggcatagtctgatatacaggggcctgattcctatcctggcagaaggatctgctaaggccacagatgctgaatctacagaggtgatactggagggtgctctgaagtcggcaatagagaagggattgtgcagccccggtgatgctgtggtggcacttcatcgcattggagttgcttctgttatcaagatctgcatagtgaaatga

SEQ ID NO: 889 - protein, 510 aa, Citrus sinensis
MANIDIEGLLRDVPNDKRLPKTKIVCTLGPASRSVPMLEKLLRAGMNVARFNFSHGTHEYQQETLNNLRAAMHNTQILCAVMLDTKGPEIRTGFLKDGKPIQLKEGQEITVSTDYDFKGNEEMITMSYKKLPVDVKPGNTILCADGTITLTVLSCDPKSGTVRCRCENTAMLGERKNVNLPGVVVDLPTLTEKDKEDILRWGVPNNIDMIALSFVRKGSDLVTVRKVLGPHAKNIQLMSKVENQEGVVNFDDILRETDSFMVARGDLGMEIPVEKIFLAQKMMIYKCNLVGKPVVTATQMLESMIKSPRPTRAEATDVANAVLDGTDCVMLSGESAAGAYPEIAVKIMRRICIEAESSLDYRAVFKEMIRSTPLPMSPLESLASSAVRTANKARAKLIVVLTRGGTTAKLVAKYRPAVPILSVVVPVLTTDSFDWTCSDETPARHSLIYRGLIPILAEGSAKATDAESTEVILEGALKSAIEKGLCSPGDAVVALHRIGVASVIKICIVK

SEQ ID NO: 890 - DNA, 1686 bp, Schistosoma japonicum
  CDS (1)..(1686)
atgctgggcagtggattatcttttggaggccagtcgtttcacggcgttagttctgtttcaaggtttggtgaggcttctccatataacccaaatgcaccaatttccgtatatccacgttcattgttggaacatgttgttagcctcgatattgaccatcaaccaacatttgtcaggaataccggcataatatgcactatcggtcctgcttgtcgtactgttgagatgcttcaaaatatgatgacagctggaatgaatattgcccgtctcaacttctctcatggcagtcacgaatatcatgctgaaaccataaagttagttcgagaagctgccgcaactttaaaaccatttcctcgaccaatcggcattgctttagatactaagggacccgaaatccgtactggccttataaacgggagtggaactgctgaagtcagccttgaagtcggtcataagatccgcgtaaccacagattccgcatacatggaggcatgtaatgagtccactctgtatgtcgattacccaaatattgtacatgttctgtccaatggatcaaagattttcgttgatgatggtttaataagtttagtggtcttgagtaaaggtcccaactacctcgaatgcgaagttgaaaacggtggaaaacttgggtctcgtaaaggagttaatctcccaggagctcatgtagatttacctgcagtatcagaaaaagacaaacaagatcttcgttttgcagttgagcataatgttgatatggtatttgcttctttcattcggaatgctggtgctgtacatgaaatccgtcaacttctcggtgaaaatggtgcctacattaaaatcattgcgaaaattgaaaatcatgaaggtgttcaacgattcaatgaaatccttgaggttgttgatgggattatggtggctcgaggtgatttagggatagaaatccctgctgaaaaggtcttcatagcacaaaagatgatgatcggtcgttgtaatcaggttggtaaacctgtaatatgtgccacacaaatgttggagtcgatgaccactaaacctcgtccaacgcgcgctgaatctagtgatgtcgccaacgcagtactcgatggtgcagattgtgttatgctttctggtgagacggccaaaggattgtacccgttagaaactgtacaaactatgcatcgtatatgtgtacaggcagaagcggcaatgtttcatggacagttgtttgaagatttgaaatcttctttatgtggtccaacggaaatggcccatactacagcaattgctgcagtagaggctgctagtcgttgtaacgctgctgctatcattgtgattacgacttctggtcggtcgtgccaactgatctcacgtcacagacctcgttgcccgattctcactgtgacacgtcatgaagtcattgctcgtcaaattcatctttatcgtggtgtccatcctctgttctatggtgaatcacgagctggcgaatggtatgaagatatggatcgcaggattcgttacgctattgattatggtaaaaagcgttcatttcttacacctggttgctttgtaataattgtgactggttggaaagctggttctggttcaactaacacacttcgcgttgtcaagcttgaagatgcagaaactaaaccaatagttatggtgccaagcattactcactttgatgactaa

SEQ ID NO: 891 - protein, 561 aa, Schistosoma japonicum
MLGSGLSFGGQSFHGVSSVSRFGEASPYNPNAPISVYPRSLLEHVVSLDIDHQPTFVRNTGIICTIGPACRTVEMLQNMMTAGMNIARLNFSHGSHEYHAETIKLVREAAATLKPFPRPIGIALDTKGPEIRTGLINGSGTAEVSLEVGHKIRVTTDSAYMEACNESTLYVDYPNIVHVLSNGSKIFVDDGLISLVVLSKGPNYLECEVENGGKLGSRKGVNLPGAHVDLPAVSEKDKQDLRFAVEHNVDMVFASFIRNAGAVHEIRQLLGENGAYIKIIAKIENHEGVQRFNEILEVVDGIMVARGDLGIEIPAEKVFIAQKMMIGRCNQVGKPVICATQMLESMTTKPRPTRAESSDVANAVLDGADCVMLSGETAKGLYPLETVQTMHRICVQAEAAMFHGQLFEDLKSSLCGPTEMAHTTAIAAVEAASRCNAAAIIVITTSGRSCQLISRHRPRCPILTVTRHEVIARQIHLYRGVHPLFYGESRAGEWYEDMDRRIRYAIDYGKKRSFLTPGCFVIIVTGWKAGSGSTNTLRVVKLEDAETKPIVMVPSITHFDD

SEQ ID NO: 892 - DNA, 1425 bp, Microbispora rosea subsp. aerata
  CDS (1)..(1425): transl_table=11
atgagtcgtcgagcaaagatcgtctgtaccctcgggcccgccacctcctccccggagcgcctacgcgagctcatcaaggcgggaatgaacgtcgcccgcttcaacctctcgcacggcagccacgagctgcacaaggaggtgttcgaccgggtcagggccgccgccgacgagctgggctgcgccgtcggcgtcctcgccgacctgcagggccccaagatccgtgtcggacgcttcgcctccggtcccgtacggctcggctacggcgacgtcttcacgatcactaccgaggacgtccccggtgaccgggacatcgtctccaccacgtacgagggcctgccgggcgatgtgaagcccggcgacacgatcctcgtggacgacggccggctgaacctcgaagtgaccgcagtggacgggccgcgcgtcgtcaccaaggtcgtcatcggaggcatgatctccgacaacaagggcctcaacctccccggcgtcgccgtcagcgccccggcgctcacggagaaggacgaggaggacctgcgctgggcgctgcgcaccggcttcgacatgatcgccctgtcgttcgtccggtgcccggacgcgctcgtccgcgcgatcatggaggaggagggcgtccggctcccgcttctcgcgaagatcgaaaagccgcaggccgtcgaacgcctcgaggagatcgtggacaccttcgacggcgtcatggtcgcccgcggcgacctcggcgtcgagctgccgctggagcaggtgccgatcgtccagcgccgcatcatcgacctgtgccgggagaaggcccaccccgtcatcgtggccacccagatgctcgactcgatgatgagctcaccccgccccacccgcgccgaggcctccgacgtcgcgtacgccgtcatggacggcgcggacgcggtcatgctgtccggcgagacctcggtcggcaactaccccgtcgaggcggtctccacgatggcccgcatcgcgtcgccgcggagagcaacacgctgcaggccacccacaccctggaccgcctgcccgagaccaccggcggcgcatcgcccgcgcggcgccgaggtcggcgcgatcgtcggggccaaggccctggtggcgtacacgatgtccggcgagaccgcccggcgcctggcccgctaccgctcgcccatcccgctgctggccttcacctccaacccgctggtgcgcggccagctcgcgctgacctggggcgtggagacgttcgaggtgccgttcgtgcaccacaccgacgacatggtccgccaggtcgaggcctcgctgctgtcgctcggcatctgcgagaagggcgacaaggtcgtcgtcgtcgccggctccccgcccggcaaccacggctccaccaactcgctgcgcgtccacaccatcggctcggcggtcgcccacccggcggtctga

SEQ ID NO: 893 - protein, 474 aa, Microbispora rosea subsp. aerata
MSRRAKIVCTLGPATSSPERLRELIKAGMNVARFNLSHGSHELHKEVFDRVRAAADELGCAVGVLADLQGPKIRVGRFASGPVRLGYGDVFTITTEDVPGDRDIVSTTYEGLPGDVKPGDTILVDDGRLNLEVTAVDGPRVVTKVVIGGMISDNKGLNLPGVAVSAPALTEKDEEDLRWALRTGFDMIALSFVRCPDALVRAIMEEEGVRLPLLAKIEKPQAVERLEEIVDTFDGVMVARGDLGVELPLEQVPIVQRRIIDLCREKAHPVIVATQMLDSMMSSPRPTRAEASDVAYAVMDGADAVMLSGETSVGNYPVEAVSTMARIASPRRATRCRPPTPWTACPRPPAAHRPRGAEVGAIVGAKALVAYTMSGETARRLARYRSPIPLLAFTSNPLVRGQLALTWGVETFEVPFVHHTDDMVRQVEASLLSLGICEKGDKVVVVAGSPPGNHGSTNSLRVHTIGSAVAHPAV

SEQ ID NO: 894 - DNA, 1521 bp, Saccharomyces bayanus
  CDS (1)..(1521)
atgccagaatcaagactgcagagactagccaacttgaaaataggcactccgcaagagcttagacggacctccattataggcaccatcgggcccaagactaatagctgcgaggcaatcaccgctttgaggaaggctgggctgaacatcatccgaatgaacttctcccacggctcttatgaattccaccaatcggtgatagacaatgccttgaagtcggaacagcaattccccggaagaccgcttgccattgctctggacaccaagggccctgagattaggacaggccgcaccccgaacgaccaggacttccacatcctcgttgaccaccagatgatcttcaccaccgacgcgaagttcgaacactcctctaatgacaaaatcatgtatatagactatgccaatttgacaaaggtaattgtgcccgggaaactcatctacgtcgatgacgggattctgtcttttaaagtgctccagatcatggacgatgccaacataagggtccaagctctcaattcgggctatatctcatcccgtaaaggtgtcaacttacccaataccgacgtggatttgccccctctttccgcaaaggatattcaggacttgcaattcggcatgcggaatggaatccacatggtgtttgcctctttcattagggcccccgaagacgtcttgaccattaggaaagtcctgggcaccgaaggcgaggacatcaaaatcatctccaagatcgaaaatcaacaaggcctggataatttcgacgaaatcctgcaagtcacagatggtgtcatgatagccaggggtgatctgggcattgagatcctggcaccagaagtgctggccattcagaaaaaactcattgccaaatgtaacgtggcgggcaaacctgtcatttgcgcgacccaaatgctggagtcaatgacctacaacccaagacccacaagggctgaagtctctgatgtcggaaacgccgttttggatggtgccgattgtgttatgttgtctggcgaaacggcaaagggcgattatccagttaatgcagtcaagataatggcggccacagctctaattgcagagagtactattgcgcatttggctctatacgatgatcttagagacgccacttctaagcccacctccactacagaaaccgttgcagccgcagccactgcagcgatcttggagcaaaatggtaaagccatcgttgtattatccactacgggaaacacagcaaggctgttgtctaagtacagaccaagttgtcctatcatactagtgacgaggcacgcaagaacggcaagaatcgcacatttatacagaggtgtttttccatttgtctttgagccaaaacggctgtacgattggggtgaagacgttcacagacgcttaaagtttggcgtggaaatggcaagatcttttggaatggttgaaagtggtgataccgttgtatccatccaaggcttcagaggcggtattggtcattcaaacaccttgcgtgtttctaccgttggtgaagagttttag

SEQ ID NO: 895 - protein, 506 aa, Saccharomyces bayanus
MPESRLQRLANLKIGTPQELRRTSIIGTIGPKTNSCEAITALRKAGLNIIRMNFSHGSYEFHQSVIDNALKSEQQFPGRPLAIALDTKGPEIRTGRTPNDQDFHILVDHQMIFTTDAKFEHSSNDKIMYIDYANLTKVIVPGKLIYVDDGILSFKVLQIMDDANIRVQALNSGYISSRKGVNLPNTDVDLPPLSAKDIQDLQFGMRNGIHMVFASFIRAPEDVLTIRKVLGTEGEDIKIISKIENQQGLDNFDEILQVTDGVMIARGDLGIEILAPEVLAIQKKLIAKCNVAGKPVICATQMLESMTYNPRPTRAEVSDVGNAVLDGADCVMLSGETAKGDYPVNAVKIMAATALIAESTIAHLALYDDLRDATSKPTSTTETVAAAATAAILEQNGKAIVVLSTTGNTARLLSKYRPSCPIILVTRHARTARIAHLYRGVFPFVFEPKRLYDWGEDVHRRLKFGVEMARSFGMVESGDTVVSIQGFRGGIGHSNTLRVSTVGEEF

SEQ ID NO: 896 - DNA, 1770 bp, Lactobacillus delbrueckii subsp. lactis
  CDS (1)..(1770): transl_table=11
atgaaaaaaacaaagattgttagtactttaggaccagcttcaaacgatattgaaactattaccaagttagccgaagcaggcgcaaacgtattccgtttcaacttctcacacggcgaccacgaagaacacttggcaagaatgaacatggttcgtgaagttgaaaagaagactggcaagcttttgggcatcgctttggacaccaagggtgctgaaatcagaaccactgaccaagaaggcggcaagttcactatcaacactggtgacgaaatccgcgtgtcaatggacgcaactaaggccggcaacaaggacatgatccacgttacctacccaggtctgttcgacgacactcacgtaggcggcactgtattgatcgacgacggtgctgttggtttgactatcaaggccaaggacgaagaaaagcgcgaattgatttgtgaagctcaaaacactggtgtcatcggctcaaagaagggtgttaacgctccaggtgttgaaatccgcctcccagggattactgaaaaggacactgacgacatccgctttggtttgaagcacggtattaacttcatctttgcttcttttgtacgtaaggctcaagacgttcttgacattcgcgcactttgcgaagaagctaacgcaccatacgttaagatcttcccaaagattgaatcacaagaaggtattgacaacatcgacgaaatcttgcaagtttcagatggtttgatggttgcccgtggtgacatgggtgttgaaatcccattcatcaacgtgccatttgttcaaaagactttgatcaagaagtgcaacgctttgggcaagccagttatcactgctactcaaatgctggactcaatgcaagaaaacccacgtccaacccgtgccgaagtaactgacgttgctaacgccgttcttgacggtactgacgcaactatgctgtcaggcgaatcagcaaacggtttgtacccagtagaatcagttcaagctatgcacgacatcaatgttcggactgaaaaggaaatggacacccggaacactctggctctgcaacgctttgaagaatacaagggctcaaacgttactgaagctatcggcgaatcagttgtccgcactgctcaagaactgggcgttaagactatcatcactgctactagctccggctacacagctcgtatgatctccaagtaccgtccagacgcaaccatcgttgccttgactttcgacgaaaagatccaacactcattgggtatcgtttggggcgttgaaccagttttggcaaagcaaccttcaaacactgacgaaatgttcgaagaagctgcccgcgtagctaaggaacacggtttcgttaaggatggcgacctggtaatcatcgttgccggcgtaccattcggccaatcaggtactactaacttgatgaagctgcaaatcatcggcaaccaacttgctcaaggtttgggcgtaggcactggctcagttatcggcaaggctgttgttgcgaacagcgctgaagaagccaacaataaggttcacgaaggcgacatcctggtagctaagactactgacaaggactacatgccagctatcaagaaggccagcggtatgatcgttgaagcttccggcttgaccagccacgcagctgttgtcggcgtatcactcggcattccagttgttgtcggtgctgctgacgcaacttcaaagatcgctgacggctcaactttgactgttgacgcacgtcgcggcgcaatttaccaaggtgaagtttcaaacctgtaa

SEQ ID NO: 897 - protein, 589 aa, Lactobacillus delbrueckii subsp. lactis
MKKTKIVSTLGPASNDIETITKLAEAGANVFRFNFSHGDHEEHLARMNMVREVEKKTGKLLGIALDTKGAEIRTTDQEGGKFTINTGDEIRVSMDATKAGNKDMIHVTYPGLFDDTHVGGTVLIDDGAVGLTIKAKDEEKRELICEAQNTGVIGSKKGVNAPGVEIRLPGITEKDTDDIRFGLKHGINFIFASFVRKAQDVLDIRALCEEANAPYVKIFPKIESQEGIDNIDEILQVSDGLMVARGDMGVEIPFINVPFVQKTLIKKCNALGKPVITATQMLDSMQENPRPTRAEVTDVANAVLDGTDATMLSGESANGLYPVESVQAMHDINVRTEKEMDTRNTLALQRFEEYKGSNVTEAIGESVVRTAQELGVKTIITATSSGYTARMISKYRPDATIVALTFDEKIQHSLGIVWGVEPVLAKQPSNTDEMFEEAARVAKEHGFVKDGDLVIIVAGVPFGQSGTTNLMKLQIIGNQLAQGLGVGTGSVIGKAVVANSAEEANNKVHEGDILVAKTTDKDYMPAIKKASGMIVEASGLTSHAAVVGVSLGIPVVVGAADATSKIADGSTLTVDARRGAIYQGEVSNL

SEQ ID NO: 898 - DNA, 1434 bp, Stigmatella aurantiaca
  CDS (1)..(1434): transl_table=11
atgcgacgagcaaagattgtctgcacccttggtcccgccagccagagccaggacatgttagaggccctcatcgaggccggcatggacgtggcccggttgaacttctcccacggcagtcacgagcagcacgcggagaacatcgccaaactccgcgcggcttcgctgaagcttcgcaaggcggtgggcatcctcggagacctgcaaggaccgaagatccgcacgggccgcttcatcaccggcagcacggtgctgaaggaaggcgccatcttttccatcaccaccgacgagagcgtgaagggcaacgacgacatcgtgtccaccacgtacgcgcacctggcggcggacgtgaatcccggggaccgcatcctcttggatgacggcctgctggagctcaaggtcctcgagacggacaagaagcagctcctgcgcacgcaggtcgtcatcggcggcacgctgaagaacaacaagggcatcaacctgccgggcgtggcggtgcgcgccgacgcgctgacgccgaaggaccgcgaggacctcgtcttcggcatcaaggaaggcgtggacttcctggcgctgtccttcgttcgccagccggcggacatcgagctggcgcgccaggccatggcggaggcgggccggcaggtgcccatcgtcgccaagctggagaagccggaggccatcgcgcggctggacgccatcctggacaagacggacggggtgatggtggcgcgcggcgacctgggcgtggagattccccccgaggaggtgccggccgtccagaaggacatcatccggcgctccaaccagcgcggcctgccggtcatcgtggccacgcagatgctcaactcgatgatcgagaacccccgccccacgcgcgcggaggccagcgacgtggccaacgccgtgttcgacggggcggacgcggtcatgctctcgggcgagacggccagcggccgctaccccatcgagtcggtgcagatgatggaccgcatcgtcctggcggccgagtcggcgggtcgggcgcagtcgtcgctgggccggatcccggatgggcccatcggcgtgccctcgcacttcccggacgtgattgcccgggtggcgtgccaggcggcgcaggcgagcggcgcttcgctcatcgcggcgttcacgctgtcgggcgtgacggcgcggctgctggcgcactaccggccggcggtccccatcgtggcgttcagcccgaaccaggaagtgcgccgccgcctggcgctgctctggggcgtggtgccgcgggtgctggagcccatccaggagaccgaggcgatggtgaagcgcgtggaggaggaactgctggcgcgcggactggcgcgcaagggcgagcgcatcgtcatcgtctttggcgcgcccgtgggacagccagggaagatcaacagcctgcgcctgcacaccatccagggctga

SEQ ID NO: 899 - protein, 477 aa, Stigmatella aurantiaca
MRRAKIVCTLGPASQSQDMLEALIEAGMDVARLNFSHGSHEQHAENIAKLRAASLKLRKAVGILGDLQGPKIRTGRFITGSTVLKEGAIFSITTDESVKGNDDIVSTTYAHLAADVNPGDRILLDDGLLELKVLETDKKQLLRTQVVIGGTLKNNKGINLPGVAVRADALTPKDREDLVFGIKEGVDFLALSFVRQPADIELARQAMAEAGRQVPIVAKLEKPEAIARLDAILDKTDGVMVARGDLGVEIPPEEVPAVQKDIIRRSNQRGLPVIVATQMLNSMIENPRPTRAEASDVANAVFDGADAVMLSGETASGRYPIESVQMMDRIVLAAESAGRAQSSLGRIPDGPIGVPSHFPDVIARVACQAAQASGASLIAAFTLSGVTARLLAHYRPAVPIVAFSPNQEVRRRLALLWGVVPRVLEPIQETEAMVKRVEEELLARGLARKGERIVIVFGAPVGQPGKINSLRLHTIQG

SEQ ID NO: 900 - DNA, 1536 bp, Glycine max
  CDS (1)..(1536)
atggcgaacatagacatcgaagggatcttgaagcagcagcagccttatgatgggcgcgttccgaagacgaagatagtgtgtactttgggccctgcttctcgatccgtagaaatgaccgagaagcttctgagggcagggatgaacgttgctcgtttcaatttctctcatggcacccacgactatcaccaggaaaccctcaacaatctcaagactgccatgcacaacactggcatactctgtgccgtcatgcttgacactaagggacctgagattcggactggttttctgaaagatggaaaacctattcaacttaaagaaggccaagaagtcaccataactactgattatgacattaagggggatccggagatgatatccatgagttacaagaagctgcctgtccacttgaagcctggaaataccatactgtgctctgacgggacgattactctcactgtcttgtcttgtgaccctgatgctggtactgttagatgtcgttgtgaaaacactgcaacgttgggtgagagaaaaaatgttaaccttcctggtgttgtggtggatctacccacacttactgagaaggataaggaagacattcttggatggggtgtacccaacaagattgacatgattgctctttcatttgttcgtaaaggctcggatcttgttaatgtccgcaaggttctggggccacatgcaaagaatattcagttgatgtcaaaggttgagaatcaggagggagtcctgaattttgacgaaatcctgcgggagactgatgcattcatggtggcacgtggtgatcttggaatggagatcccagtagaaaagattttcctggcacagaagatgatgatatacaagtgtaatcttgttgggaagccagtggtgactgctacccaaatgcttgaatcaatgataaagtctcccaggccaacccgagctgaagcaactgatgtagctaatgcagttcttgatggaacagattgtgtgatgcttagtggtgaaagtgctgctggggcatacccagaacttgctgtgaaaatcatggctcgcatttgcattgaagcagaatcatcccttgactatggtgccatcttcaaagagatgataaggtctaccccattgcctatgagtccattggagagccttgcatcatctgctgtccgcacagcaaacaaggccaaagcaaaactcattgttgtactgacacgtggcgggtctacagctaagttggttgctaagtataggccagcggttccaatattatcggtggtggttccagtgttgagcacagactcatttgattggacatgcagtgatgagacgccagcaaggcacagcttgatatataggggcttgattccaatattgggggagggatccgccaaggctactgatgcagaatctacagaggtcattctcgaagctgctcttaagtccgcaacacaaaggggcctttgtaagcctggtgatgcagttgttgccctgcatcgtattggcactgcctctgtcataaagatctgcatagtcaaataa

SEQ ID NO: 901 - protein, 511 aa, Glycine max
MANIDIEGILKQQQPYDGRVPKTKIVCTLGPASRSVEMTEKLLRAGMNVARFNFSHGTHDYHQETLNNLKTAMHNTGILCAVMLDTKGPEIRTGFLKDGKPIQLKEGQEVTITTDYDIKGDPEMISMSYKKLPVHLKPGNTILCSDGTITLTVLSCDPDAGTVRCRCENTATLGERKNVNLPGVVVDLPTLTEKDKEDILGWGVPNKIDMIALSFVRKGSDLVNVRKVLGPHAKNIQLMSKVENQEGVLNFDEILRETDAFMVARGDLGMEIPVEKIFLAQKMMIYKCNLVGKPVVTATQMLESMIKSPRPTRAEATDVANAVLDGTDCVMLSGESAAGAYPELAVKIMARICIEAESSLDYGAIFKEMIRSTPLPMSPLESLASSAVRTANKAKAKLIVVLTRGGSTAKLVAKYRPAVPILSVVVPVLSTDSFDWTCSDETPARHSLIYRGLIPILGEGSAKATDAESTEVILEAALKSATQRGLCKPGDAVVALHRIGTASVIKICIVK

SEQ ID NO: 902 - DNA, 1584 bp, Arabidopsis thaliana
  CDS (1)..(1584)
atgcattcaagtcatctccttctcgaggaaccgatcaggatgacttcaatcctcgaaccttctaaatcaagtttcttcccggctttgactaagattgttgggactctaggtccgaaatctcgatccgtcgaggtgattgctggttgtctcaaagctggaatgtccgtggctcgattcgatttctcttggtgcgatgctgattatcaccaggagacgctggagaatctgaagatagctgtgaagagcactaagaagctttgtgctgttatgctagacactgtaggacctgagttgcaagttattaacaagactgagaaagctatttctcttaaagctgatggccttgtaactttgactccgagtcaagatcaagaagcctcctctgaagtccttcccattaattttgatgggttagcgaaggcggttaagaaaggagacactatctttgttggacaatacctcttcactggtagtgaaacaacttcagtttggcttgaggttgaagaagttaaaggagatgatgtcatttgtatttcaaggaatgctgctactctgggtggtccgttattcacattgcacgtctctcaagttcacattgatatgccaaccctaactgagaaggataaggaggttataagtacatggggagttcagaataagatcgactttctctcattatcttattgtcgacatgcagaagatgttcgccaggcccgtgagttgcttaacagttgtggtgacctctctcaaacacaaatatttgcgaagattgagaatgaagagggactaacccactttgacgaaattctacaagaagcagatggcattattctttctcgtgggaatttgggtatcgatctacctccggaaaaggtgtttttgttccaaaaggctgctctttacaagtgtaacatggctggaaagcctgccgttcttactcgtgttgtagacagtatgacagacaatctgcggccaactcgtgcagaggcaactgatgttgctaatgctgttttagatggaagtgatgcaattcttcttggtgctgagactcttcgtggattgtaccctgttgaaaccatatcaactgttggtagaatctgttgtgaggcagagaaagttttcaaccaagatttgttctttaagaagactgtcaagtatgttggagaaccaatgactcacttggaatctattgcttcttctgctgtacgggcagcaatcaaggttaaggcatccgtaattatatgcttcacctcgtctggcagagcagcaaggttgattgccaaataccgtccaactatgcccgttctctctgttgtcattccccgacttacgacaaatcagctgaagtggagctttagcggagcctttgaggcaaggcagtcacttattgtcagaggtcttttccccatgcttgctgatcctcgtcaccctgcggaatcaacaagtgcaacaaatgagtcggttcttaaagtggctctagaccatggggagcaagccggagtgatcaagtcacatgacagagttgtggtctgtcagaaagtgggagatgcgtccgtggtcaaaatcatcgagctagaggattag

SEQ ID NO: 903 - protein, 527 aa, Arabidopsis thaliana
MHSSHLLLEEPIRMTSILEPSKSSFFPALTKIVGTLGPKSRSVEVIAGCLKAGMSVARFDFSWCDADYHQETLENLKIAVKSTKKLCAVMLDTVGPELQVINKTEKAISLKADGLVTLTPSQDQEASSEVLPINFDGLAKAVKKGDTIFVGQYLFTGSETTSVWLEVEEVKGDDVICISRNAATLGGPLFTLHVSQVHIDMPTLTEKDKEVISTWGVQNKIDFLSLSYCRHAEDVRQARELLNSCGDLSQTQIFAKIENEEGLTHFDEILQEADGIILSRGNLGIDLPPEKVFLFQKAALYKCNMAGKPAVLTRVVDSMTDNLRPTRAEATDVANAVLDGSDAILLGAETLRGLYPVETISTVGRICCEAEKVFNQDLFFKKTVKYVGEPMTHLESIASSAVRAAIKVKASVIICFTSSGRAARLIAKYRPTMPVLSVVIPRLTTNQLKWSFSGAFEARQSLIVRGLFPMLADPRHPAESTSATNESVLKVALDHGEQAGVIKSHDRVVVCQKVGDASVVKIIELED

SEQ ID NO: 904 - DNA, 1665 bp, Drosophila melanogaster
  CDS (1)..(1665)
atgtcgttgtccgcgaaatccgtgctaaaggagggctccacacagctgagccacatctgcgagctggatcttgcccagcaggcgtcccatcagcgcctggtgtccctgatcgcgaccatatcggtcagttcccggaacgcggacaccatatacaccatgataatgcgcggagtgaacatattccgtctgaacttctcccacgaatcgcacgagatgcactcgaaaacgatagagctgatcaacgaggcgctggagaggattcataaggagacgggccaaatccgaacggtcgccattgcggcggacacgcgtggaccccagatccgtactggcctactggatggagatgtgttcctgcgcagcggcgacaatctgcggctctcgatcaatcgggatctttacgacaagggcaacaaggaggcggtctacgtggactacccgaacatcatcaatctgaccaagaccggcgatcgcctgttcatcgacgacggcaggctgctgctccacatcttggaagtgggagtggatggtctgctgtgcgaggtcatccatggcggccagctgaacaacaactgcaacgtgatcctgccggagatcgagatcgatttgcccgccgtctccgagaaggatatgtttgacatccagttcagcataaaggccaacgtggacttcctcttcgcctccgccgtgcgcagtgccaagaacgtcaaggagctgcgaacggtgctcggcgagaagggcaagcacatcaagatcatcgccaagatggacagcaagatagctctgagcaggttctcggagattctgcgtgcggcggatggattgctgctttcgcgagcggatctgggcacccagatacccattgaaaagctcttcatcacccagaagagcatactgggccaatgcaacaaggtgggcaagccggtcatagtggcctcccacatcctcgagtccatgcgcaccctgccccatcccacacgggccgagtgcttcgatttggccaacgccatcatcgatggagcagactgcatcatgctgtcgtcggaagtggccattgggtcgtttcccaaggagacggtggccacctgcgacacattgtgccgggaggccgagaaggtgctctggtttcgagacctcttctccgacctggtcagcgaggtgcgtggcgagctggacgcggcccactcgctggccattgcagccgtggagacggccaagcgcaccaatgccaccctgatcatcgtgctgaccacctcgggccgctcggccactctggtcagcaagttccgaccccgctgtcccatcatggctatcacgcgctgcgaacggaccgcccgctgggtctatctgcatcgcggagtcctgccgatactgtacacctcggagcccagcacggactacgccaccgatgtggacgctcgggtgcagttcgccatgacctctgccaagaagtggggcatcatcgacgacggcgatcccattgtgatagtgagtgcctggaaggatggcggcgggttcaccaacaatgtccgtgtggtctacgccttcttcgaggcggatcgcgtggactgcctgttccggtcggacaggcggcattctcgaaagaacaccaacctgcagatggcaaatcgggagcctgatgataagaaaagtgctaatgcgtag

SEQ ID NO: 905 - protein, 554 aa, Drosophila melanogaster
MSLSAKSVLKEGSTQLSHICELDLAQQASHQRLVSLIATISVSSRNADTIYTMIMRGVNIFRLNFSHESHEMHSKTIELINEALERIHKETGQIRTVAIAADTRGPQIRTGLLDGDVFLRSGDNLRLSINRDLYDKGNKEAVYVDYPNIINLTKTGDRLFIDDGRLLLHILEVGVDGLLCEVIHGGQLNNNCNVILPEIEIDLPAVSEKDMFDIQFSIKANVDFLFASAVRSAKNVKELRTVLGEKGKHIKIIAKMDSKIALSRFSEILRAADGLLLSRADLGTQIPIEKLFITQKSILGQCNKVGKPVIVASHILESMRTLPHPTRAECFDLANAIIDGADCIMLSSEVAIGSFPKETVATCDTLCREAEKVLWFRDLFSDLVSEVRGELDAAHSLAIAAVETAKRTNATLIIVLTTSGRSATLVSKFRPRCPIMAITRCERTARWVYLHRGVLPILYTSEPSTDYATDVDARVQFAMTSAKKWGIIDDGDPIVIVSAWKDGGGFTNNVRVVYAFFEADRVDCLFRSDRRHSRKNTNLQMANREPDDKKSANA

SEQ ID NO: 906 - DNA, 1740 bp, Arabidopsis thaliana
  CDS (1)..(1740)
atggctcaagtggttgctaccaggtcaattcaaggctcgatgttatctcccaacggtggatctgtgtctacaagatccgagaagctattgaaaccagcgagttttgcagtgaaggttcttggcaacgaagcaaagagaagtggaagagtctctgtaagaagcagaagagtggttgatactactgtgagatccgctcgtgttgagactgaagtcattcctgtttctcctgaagatgtgcctaacagagaggagcagcttgagaggttgttggaaatgcagcagtttggtgatacatcggtagggatgtggtcgaagccgacagtgaggaggaagacaaagattgtttgcaccgttggtccgtcgaccaacacacgagaaatgatatggaaattggctgaagctgggatgaatgttgctaggatgaatatgtctcatggagatcatgcttcacataagaaggttattgatttggttaaagaatacaatgcacaaactaaagacaacactattgctatcatgcttgacaccaagggtccggaagttaggagtggagatttacctcagccaattatgttagatcctggtcaagagtttacctttacaattgagagaggagtcagcacaccaagttgtgtcagtgttaactatgatgatttcgttaatgacgtggaagcgggtgacatgcttcttgttgatggtggtatgatgtcgtttatggtgaagtcaaagaccaaagactctgtcaaatgtgaagttgttgatggtggagaacttaagtcaaggagacacctgaatgtccgaggaaagagtgcaactttaccttcaatcactgagaaggactgggaggatattaaatttggagtggagaacaaagttgacttttatgcagtttcctttgtcaaagatgctcaagttgtacacgagttgaagaaataccttcaaaatagtggtgctgatatacacgtgatagtgaaaattgagagtgcagactccatacctaacttgcactccattatcacagcaccagatggggcaatggttgcaagaggtgatcttggtgcagagcttccaattgaagaagtccccattcttcaggaggagatcattaacctgtgccgtagtatgggaaaagctgttattgttgcgactaacatgcttgagagtatgatagttcatccaactccaacccgggcagaggtctcagacattgctatcgctgttagagaaggtgctgatgcggtaatgctttcaggagaaactgctcacggaaagttcccattgaaagctgctggagtgatgcacactgttgcattgcgaacagaagcaaccattactagcggtgaaatgccacctaatcttggtcaagccttcaagaaccatatgagtgagatgtttgcataccatgcaaccatgatgtcaaacacacttggaacttcaactgttgtcttcaccagaaccggtttcatggccatattgttaagtcactatcgtccttccggcacaatctatgccttcacaaatgagaaaaaaatacaacaaagattagctttgtatcaaggtgtatgccccatatatatggagttcacagatgatgcagaagaaacttttgctaatgctttggctacattactgaaacaaggaatggtgaagaagggagaggaaatagcaatcgtacagagcggtacacagccaatctggcgatctcaatcgacacataacatccaagtccgcaaggtttaa

SEQ ID NO: 907 - protein, 579 aa, Arabidopsis thaliana
MAQVVATRSIQGSMLSPNGGSVSTRSEKLLKPASFAVKVLGNEAKRSGRVSVRSRRVVDTTVRSARVETEVIPVSPEDVPNREEQLERLLEMQQFGDTSVGMWSKPTVRRKTKIVCTVGPSTNTREMIWKLAEAGMNVARMNMSHGDHASHKKVIDLVKEYNAQTKDNTIAIMLDTKGPEVRSGDLPQPIMLDPGQEFTFTIERGVSTPSCVSVNYDDFVNDVEAGDMLLVDGGMMSFMVKSKTKDSVKCEVVDGGELKSRRHLNVRGKSATLPSITEKDWEDIKFGVENKVDFYAVSFVKDAQVVHELKKYLQNSGADIHVIVKIESADSIPNLHSIITAPDGAMVARGDLGAELPIEEVPILQEEIINLCRSMGKAVIVATNMLESMIVHPTPTRAEVSDIAIAVREGADAVMLSGETAHGKFPLKAAGVMHTVALRTEATITSGEMPPNLGQAFKNHMSEMFAYHATMMSNTLGTSTVVFTRTGFMAILLSHYRPSGTIYAFTNEKKIQQRLALYQGVCPIYMEFTDDAEETFANALATLLKQGMVKKGEEIAIVQSGTQPIWRSQSTHNIQVRKV

SEQ ID NO: 908 - DNA, 1503 bp, Streptococcus thermophilus
  CDS (1)..(1503): transl_table=11
atgaataaacgcgtaaaaatagttgctacacttggtcctgcggttgaaatccgtggtggcaagaaatttggtgaagatggttactggagtgaaaaacttgaccctgatgcatctgctaaaaacattgctcaattgatcgaggaaggtgctaacgttttccgtttcaacttctcacatggtaaccacgctgagcaaggtgaacgtatggatgtcgtacgtatggctgaatctattgctggtcaaaaagtaggtttccttcttgacactaagggacctgaaatccgtactgaattgtttgaaggtgatgctaaagagtatgcatacaaaactggtgaacaaatccgtattgctactaaacaaggtctcaaatcaactcgcgacgttattgctttgaacgttgctggtgcacttgacattttcgacgatgtagaagttggtaaacaagttcttgtggatgatggtaaacttggtcttcgtgttgtagacaaggatgctgaaaaacgtgaattcatcgttgaagttgaaaatgatggtattattgctaaacaaaaaggtgtaaacatcccttacactaaaattcctttcccagcacttgctgaacgtgataatgctgatattcgttttggtctcgaacaaggtattaactttatcgcaatctcatttgtacgtactgcgaaagacgtacaagaagtacgtgctatctgtgaagaaactggaaacggccacgttaaattgttggctaaaatcgaaaaccaacaaggtatcgataatatcgatgaaatcattgaagctgctgatggtatcatgatcgctcgtggtgacatgggtatcgaagtaccattcgaaatggttccagtttaccaaaaaatgattatcactaaagtaaatgctgctggtaaaattgttgttacagctacaaacatgcttgaaacaatgacagaaaaaccacgtgcaactcgttctgaagtatctgacgtgtttaacgcagttatcgacggtactgatgcgacaatgctttctggtgagtctgcaaatggtccatatcccgttgaatcagttcgtacaatggccacaattcataaaaacgctcaaactcttcttaaagagtacggtcgtcttaattcatcaacatttgatcgctcaagtaacactgaagtcgttgcatctgcagttaaagatgctactaactcaatgcatatccaacttattgttgcacttactgaatctggtaacacagctagcttgatcgatacataccgtccagaagctgacatctgggcaataacattcgatgaacttactcaaaaatcattgatgcttaactggggtgttattccagttgttactgaaacaccttcatctactgatgatatgtttgaagttgctgagcgtgttgctcttgaatcaggtcttgtagaatcaggtgataacattgttattgttgctggtgttccagttggttctggtaatacaaatactatgcgtatccgcacagttaaataa

SEQ ID NO: 909 - protein, 500 aa, Streptococcus thermophilus
MNKRVKIVATLGPAVEIRGGKKFGEDGYWSEKLDPDASAKNIAQLIEEGANVFRFNFSHGNHAEQGERMDVVRMAESIAGQKVGFLLDTKGPEIRTELFEGDAKEYAYKTGEQIRIATKQGLKSTRDVIALNVAGALDIFDDVEVGKQVLVDDGKLGLRVVDKDAEKREFIVEVENDGIIAKQKGVNIPYTKIPFPALAERDNADIRFGLEQGINFIAISFVRTAKDVQEVRAICEETGNGHVKLLAKIENQQGIDNIDEIIEAADGIMIARGDMGIEVPFEMVPVYQKMIITKVNAAGKIVVTATNMLETMTEKPRATRSEVSDVFNAVIDGTDATMLSGESANGPYPVESVRTMATIHKNAQTLLKEYGRLNSSTFDRSSNTEVVASAVKDATNSMHIQLIVALTESGNTASLIDTYRPEADIWAITFDELTQKSLMLNWGVIPVVTETPSSTDDMFEVAERVALESGLVESGDNIVIVAGVPVGSGNTNTMRIRTVK

SEQ ID NO: 910 - DNA, 1413 bp, Selenomonas ruminantium
  CDS (1)..(1413): transl_table=11
atgttaaaaaagacgaaaatcgtttgcacgcagggtccgtccacagagaaaccgggcgtaattgatgcactgattgccaatggcatgaactgcgcacgcttcaatttctcccatggtgaccacgaagaacatcttggccgtatcaatatggttcgtgaagctgccaagaaggctggcaaggttatctctttaatcctcgataccaaaggtccggaaatgcgtctgggcgagttcaaagatggcaaagttatgctcgaaaagggcaacaagttcactttgacctatgacgatgaaccgggtgatgaaactcatgtttccgtaaaccacaaaggtctttacacggaagttaagccgggcgacaccctgctcctctccgatggcctcgtagctctcaaagttgatgaaatcaagggcaaggatatcgttacgacgattcagaacagcggtaagatgagcacgcgcaagcgcgtagctgctccgggcgtaccccttggtctgcctcctatctccgaacaggatgctaaggacatcatctttggctgcgaacaggatatggatttcgtagctgcttccttcatccagcgtccggatgatgttatcgccatccgcaagctcatcgaagagcacaatggccacatggaaattctgccgaagatcgaaaacctcgaaggtgttaagaacttcgatgcaatcctggaagtttccgacggcatcatggttgcccgtggtgacctgggcgtagaagttccggcagaagatgtgccccttattcagaaggaaatcatccgcaagtgcaacgctgctggcaagccggttatcgttgctacgcagatgctcgactccatggaacgcaacccgcgtccgacccgtgcagaagtttctgacgttggtaacgccatcctcgatggtacggatgccatcatgctgtccggcgaaacggcttccggtgactatccggtagaagcagttgccacgatgaaccgcattgcacagcgcatggaaagctcccttgaatacaaggaactctatgtagaacgtggtctgcagcacatggaatcccgtacgcgtgctatcgctcatgctacggttcagatggcttatgagctcgatgctccggctattatcacgccgaccgaatccggttacacgacgaaggtcgtttccaagtatcgtccgaaggctgctatcgtagcttacacgccgagcgaaaaagttctgcgtcagctgaacctgcgttggggcgtatatccggtactcggcacccagtggagcgatgtggatgaaatgatcagcaatgcaacggctgctgctgttaaggaagacctcgtacagcgcggcgacctcaccatcatcacctccggtgtgaagatggaatcccgtacgcgtgctatcgctcatgctacggacatctaa

SEQ ID NO: 911 - protein, 470 aa, Selenomonas ruminantium
MLKKTKIVCTQGPSTEKPGVIDALIANGMNCARFNFSHGDHEEHLGRINMVREAAKKAGKVISLILDTKGPEMRLGEFKDGKVMLEKGNKFTLTYDDEPGDETHVSVNHKGLYTEVKPGDTLLLSDGLVALKVDEIKGKDIVTTIQNSGKMSTRKRVAAPGVPLGLPPISEQDAKDIIFGCEQDMDFVAASFIQRPDDVIAIRKLIEEHNGHMEILPKIENLEGVKNFDAILEVSDGIMVARGDLGVEVPAEDVPLIQKEIIRKCNAAGKPVIVATQMLDSMERNPRPTRAEVSDVGNAILDGTDAIMLSGETASGDYPVEAVATMNRIAQRMESSLEYKELYVERGLQHMESRTRAIAHATVQMAYELDAPAIITPTESGYTTKVVSKYRPKAAIVAYTPSEKVLRQLNLRWGVYPVLGTQWSDVDEMISNATAAAVKEDLVQRGDLTIITSGVKMESRTRAIAHATDI

SEQ ID NO: 912 - DNA, 1533 bp, Lilium longiflorum
  CDS (1)..(1533)
atggcgaacatcgacatcgagggcatcctgaaggagctcccggccgacggccgcgtcccgaagacgaaattggtctgcaccctcgggccgtcgtccagatccgtgccgatgctcgagaagctgctgcgcgccggcatgaacacggccagattcaacttctcccacggcacgcacgagtatcaccaggagacgctcgataacctccggatcgcaatgcagaacacgcagattctctgcgccgtcgtgctcgataccaagggtcctgagattcgcactgggtttctgaaggatggaaaggccgtccaaccaaaggagggtcaagaaatcatagtgagcactgattacgatctcaaaggcggcgggaatacaattactatgagttacaagaaacttcctgtggatatgaaacctggaggcacaatcctgtgtgcagatggcagcattagcttaactgtcctatcatgtgacccagatgccggaactgtgagatgccgctgtgagaatactgcacttttaggtgagagaaagaatgtcaatctgccaggtgttgttgtggatctccccacactgacagagaaggacaaggaagacattttggaatggggtgttcccaacaacattgatatgattgctctgtccttcgtgcgcaagggctccgatcttgtcaatgtccgacaggttcttggatctcatgcaaaaaacataaagttgatgtcaaaggttgagaaccaagagggtgtcgtaaacttcgatgaaatcttaaaagagacagatgccttcatggttgcccgtggtgatctgggcatggaaattcccgttgagaagatcttccttgctcagaagctgatgatatacatatgcaaccttgcgggcaagcctgttgtcactgccacccagatgcttgagtctatgataaaatcccctcgcccgacacgtgctgaagccactgatgtcgccaatgccgtcctcgatggcaccgactgcgtcatgcttagtggcgaaagtgcggcgggagcctatctagagatagccgtgaaggtcatggccaagatatgtatcgaggcagagtcatcccttgattatgatgccatcttcaaggagatgataaggtctgcgcctctccccatgagcccactggagagtcttgcgtcctcggctgtccgtactgcgaacaaggccaaggcggctctgattgttgtattgacccgtggtgggactacagccaagctggtagcgaagtaccgcccggcagtgccaatcctgtctgtggtggtgccagtgctgacaagcgattcgttcgactggaatgttagtgacgagtcaccagcaaggcatagcctcatctacagaggcctcatcccgctgctagcggagggttctgcgaaggcgactgatgccgagtcgacagaggtgatcctggaggctgcactcaagtcagcgacggcaaggaggctgtgcaaacctggtgactctattgttgcgctgcatcgcattggtgttgcttctgtcattaaaatttgcatagtgaaatga

SEQ ID NO: 913 - protein, 510 aa, Lilium longiflorum
MANIDIEGILKELPADGRVPKTKLVCTLGPSSRSVPMLEKLLRAGMNTARFNFSHGTHEYHQETLDNLRIAMQNTQILCAVVLDTKGPEIRTGFLKDGKAVQPKEGQEIIVSTDYDLKGGGNTITMSYKKLPVDMKPGGTILCADGSISLTVLSCDPDAGTVRCRCENTALLGERKNVNLPGVVVDLPTLTEKDKEDILEWGVPNNIDMIALSFVRKGSDLVNVRQVLGSHAKNIKLMSKVENQEGVVNFDEILKETDAFMVARGDLGMEIPVEKIFLAQKLMIYICNLAGKPVVTATQMLESMIKSPRPTRAEATDVANAVLDGTDCVMLSGESAAGAYLEIAVKVMAKICIEAESSLDYDAIFKEMIRSAPLPMSPLESLASSAVRTANKAKAALIVVLTRGGTTAKLVAKYRPAVPILSVVVPVLTSDSFDWNVSDESPARHSLIYRGLIPLLAEGSAKATDAESTEVILEAALKSATARRLCKPGDSIVALHRIGVASVIKICIVK

SEQ ID NO: 914 - DNA, 1413 bp, Vibrio marinus
  CDS (1)..(1413): transl_table=11
atgaaaaagactaaaattgtttgtacaattggtccaaaaactgaatcagtagagaaactaacagagcttgttaatgcaggcatgaacgttatgcgtttaaatttctctcatggtaactttgctgaacattcagtgcgtattcaaaatatccgtcaagtaagtgaaaacctgaataagaaaattgctgttttactggatactaaaggtccagaaatccgtacgattaaactagaaaacggtgacgatgtaatgttgaccgctggtcagtcattcacgtttacaacagacattaacgtggtaggtaataaagactgtgttgctgtaacatatgctggttttgctaaagaccttaatcctggtgcaatcatccttgttgatgatggtttaattgaaatggaagttgttgcaacaactgacactgaagttaaatgtacagtattaaatactggtgcacttggtgaaaataaaggcgttaacttacctaacatcagtgtaggtctacctgcattgtcagaaaaagataaagctgatttagcgtttggttgtgagcaagaagttgattttgttgctgcatcatttattcgtaaggctgatgatgtaagagaaattcgtgaaatcctatttaataatggtggcgaaaacattcagattatctcgaaaattgaaaaccaagaaggtgtagacaatttcgatgaaatcttagctgaatcagacggtatcatggttgctcgtggcgatctcggtgttgagatcccagttgaagaagtgatcatggcacagaagatgatgatcaaaaaatgtaataaagcaggtaaagttgtaattactgcaacacaaatgcttgattcaatgatcagtaacccacgtccaacacgtgcagaagcgggcgatgttgccaatgctgtgcttgacggtaccgacgcggtaatgctttctggtgaaactgcgaaaggtaaatacccagttgaagctgtgtctatcatggcaaacatctgtgaacgtactgataactcaatgtcttcggatttaggtgcgaacattgttgctaaaagcatgcgcattacagaagctgtgtgtaaaggtgcggtagaaacaacagaaaaattgtgtgctccacttattgttgttgcaactcgtggcggtaaatcagcaaaatctgttcgtaaatacttcccgaaagcaaatattcttgctatcacaacaaatgaaaaagcagcgcaacagttatgcctaactaaaggcgtaagcagctgcatcgttgagcagattgatagcactgatgagttctaccgtaaaggtaaagagcttgcattagcaactggtttagctaaagaaggcgatatcgttgttatggtatcaggtgcgttagtaccatcaggtacaacgaatacggcatctgttcaccaactttaa

SEQ ID NO: 915 - protein, 470 aa, Vibrio marinus
MKKTKIVCTIGPKTESVEKLTELVNAGMNVMRLNFSHGNFAEHSVRIQNIRQVSENLNKKIAVLLDTKGPEIRTIKLENGDDVMLTAGQSFTFTTDINVVGNKDCVAVTYAGFAKDLNPGAIILVDDGLIEMEVVATTDTEVKCTVLNTGALGENKGVNLPNISVGLPALSEKDKADLAFGCEQEVDFVAASFIRKADDVREIREILFNNGGENIQIISKIENQEGVDNFDEILAESDGIMVARGDLGVEIPVEEVIMAQKMMIKKCNKAGKVVITATQMLDSMISNPRPTRAEAGDVANAVLDGTDAVMLSGETAKGKYPVEAVSIMANICERTDNSMSSDLGANIVAKSMRITEAVCKGAVETTEKLCAPLIVVATRGGKSAKSVRKYFPKANILAITTNEKAAQQLCLTKGVSSCIVEQIDSTDEFYRKGKELALATGLAKEGDIVVMVSGALVPSGTTNTASVHQL

SEQ ID NO: 916 - DNA, 1752 bp, Ricinus communis
  CDS (1)..(1752)
atgtcacagtctctccatttctcaccgaacctcactttcgccaaacaacctttccctaagctccctctcccattcccaacctccaattcccggtatccagtcaataattataaatcactctcaatcaaagcgtccacgtcgccgtcatcatcatcagatcctcaagttttagttgcggataacggaacagggaacagcggcgttttgtataataataacaacaaatcagttacagtttctgatccgagctcaattgaagttgacgccgtgacggagacggagttaaaagagaatggattcaggagtacacgtaggacaaagctagtgtgtacgataggaccagcgacttgtggatttgaagagctggaagcgttagcagtaggaggaatgaatgtagcgagaattaatatgtgtcatggaacacgtgagtggcacaagagtgtaattgaacgtgttaggagattgaatgaagagaaaggttttgctgttgctattatgatggatactgaaggtagtgaaattcatatgggtgatttaggtggtgcttcttctgctaaagctgaggatggtgaaatctggacttttagtgtcagagcctatgattctcctcgcccagagcgcaccatcaatgttaactatgacggttttgctgaggatgtgaaagttggggatgagctacttgtggatggtggaatggttaggtttgaggtgattgagaaaattggcccagatgtcaagtgccgatgtactgatcctggactgttattaccacgagctaatttgactttctggagggatgggagtcttgttagagaacgtaatgcaatgcttccaacaatttcctctaaggattggttagatattgactttggtatcgcagagggtgttgattttattgcaatatcttttgtcaagtctgctgaagtgattaatcatcttaaaagctacattgctgcaaggtctcgtgacagtgatatagctgtcattgctaagatagagagtattgactcattgaagaacttagaagagatcattcgagcatcagatggagctatggtagcaagaggagatctgggtgctcagataccattggaacaggttccatcagcccagcaaaacattgttcaggtctgcaggcagctaaataagccagtcattgttgcttctcagttacttgaatcaatgattgaataccctacacccaccagagcagaagtggctgatgtttctgaagctgttaggcaacgggctgatgctttgatgctctctggtgagtcagccatgggccagtaccccgagaaggcattggctgttctcagaagtgtcagtgtgagaattgagaagtggtggagagaagagaagcaccatgaagcaatggaactcccagcaattggatccacttattccgactctatttcagaggagatttgcaactctgctgccaagatggcgaacaacttgggggtggatgcactttttgtgtatacaaaagatggtcacatggcatctctcttgtctcgttgccggcctgactgcccaatctttgcttttacaactaccacatctgtacggagacgcctgaatttacagtggggcctgatacccttccgcctgagctttgctgatgatatggaaagcaaccttaacaaaaccttctctttgctcaaggctagaggaatgatcaaatcgggtgatcttgttatagctgtttcagacatgttacagtccatccaagttatgaatgttccttag

SEQ ID NO: 917 - protein, 583 aa, Ricinus communis
MSQSLHFSPNLTFAKQPFPKLPLPFPTSNSRYPVNNYKSLSIKASTSPSSSSDPQVLVADNGTGNSGVLYNNNNKSVTVSDPSSIEVDAVTETELKENGFRSTRRTKLVCTIGPATCGFEELEALAVGGMNVARINMCHGTREWHKSVIERVRRLNEEKGFAVAIMMDTEGSEIHMGDLGGASSAKAEDGEIWTFSVRAYDSPRPERTINVNYDGFAEDVKVGDELLVDGGMVRFEVIEKIGPDVKCRCTDPGLLLPRANLTFWRDGSLVRERNAMLPTISSKDWLDIDFGIAEGVDFIAISFVKSAEVINHLKSYIAARSRDSDIAVIAKIESIDSLKNLEEIIRASDGAMVARGDLGAQIPLEQVPSAQQNIVQVCRQLNKPVIVASQLLESMIEYPTPTRAEVADVSEAVRQRADALMLSGESAMGQYPEKALAVLRSVSVRIEKWWREEKHHEAMELPAIGSTYSDSISEEICNSAAKMANNLGVDALFVYTKDGHMASLLSRCRPDCPIFAFTTTTSVRRRLNLQWGLIPFRLSFADDMESNLNKTFSLLKARGMIKSGDLVIAVSDMLQSIQVMNVP

SEQ ID NO: 918 - DNA, 1533 bp, Solanum tuberosum
  CDS (1)..(1533)
atggccaacatagacatagctggaatcatgaaggatctcccaaatgatggccgtattccaaagaccaagattgtttgcacgttagggccatcttctagaacagtgccaatgctggagaagcttctccgtgctggcatgaacgttgccaggtttaacttttctcatgggacccatgagtaccatcaggagacattggacaatcttaagattgctatgcagaatactcagatcctgtgtgctgtcatgcttgacaccaaggggcctgagattcgtactggtttcttaacagatggaaaaccgattcagcttaaggaaggtcaagaaatcactgtatccacagactataccataaaaggaaatgaagaaatgatctcaatgagctataagaagttggtaatggacttgaagcccggcaataccattttgtgtgcagatggtaccataacccttactgttttgtcatgtgatccaccgtctggaacggtgagatgtcgctgcgagaatactgccaccttaggagagaggaagaatgtaaaccttccaggtgtggttgtggaccttccaacacttacagagaaggataaagaagatatactagagtggggtgttcctaacaacattgatatgatagcgctttcgtttgtgcgtaagggttcagatcttgtcaatgttcgcaaggttcttggtccacatgccaagcgcattcaactaatgtcaaaggttgaaaaccaagaaggggtaatcaactttgatgaaatccttcgtgagacagattcttttatggttgctcgaggtgatctcggaatggaaattccagttgagaagattttcttggctcagaaaatgatgatatacaagtgtaatcttgctggcaaagctgtggtaactgccactcagatgcttgaatcaatgatcaagtctccagcacccacccgtgctgaggctactgatgtggctaatgctgtcttggatggcactgattgtgttatgttaagtggggagagtgcagctggtgcttatcctgagctggcagtaaaaatcatgtcacgaatctgcattgaggcagagtcttcacttgacaacgaggctatcttcaaggaaatgatcaggtgtaccccactgccaatgagcccattggagagtcttgcatcatcagctgtccgtacggctaacaaagctagagcaaaactcattgttgtcctgacacgtggcgggagtacagcaaagctggttgccaagtataggcctgcagttcctattctgtcagtagtcgtgcctgttttgaccacagactctttcgattggtccatcagcgacgagaccccagctagacacagtttggtatataggggcttgattccacttcttggtgaaggttctgcaaaggccactgattctgaatcaactgaggtaatccttgaagcggccctgaagtctgccgtaacgagagggctatgcaaacctggtgatgctgtcgtggcacttcatcgtattggttctgcatccgttatcaagatttgcgtcgtgaagtaa

SEQ ID NO: 919 - protein, 510 aa, Solanum tuberosum
MANIDIAGIMKDLPNDGRIPKTKIVCTLGPSSRTVPMLEKLLRAGMNVARFNFSHGTHEYHQETLDNLKIAMQNTQILCAVMLDTKGPEIRTGFLTDGKPIQLKEGQEITVSTDYTIKGNEEMISMSYKKLVMDLKPGNTILCADGTITLTVLSCDPPSGTVRCRCENTATLGERKNVNLPGVVVDLPTLTEKDKEDILEWGVPNNIDMIALSFVRKGSDLVNVRKVLGPHAKRIQLMSKVENQEGVINFDEILRETDSFMVARGDLGMEIPVEKIFLAQKMMIYKCNLAGKAVVTATQMLESMIKSPAPTRAEATDVANAVLDGTDCVMLSGESAAGAYPELAVKIMSRICIEAESSLDNEAIFKEMIRCTPLPMSPLESLASSAVRTANKARAKLIVVLTRGGSTAKLVAKYRPAVPILSVVVPVLTTDSFDWSISDETPARHSLVYRGLIPLLGEGSAKATDSESTEVILEAALKSAVTRGLCKPGDAVVALHRIGSASVIKICVVK

SEQ ID NO: 920 - DNA, 1527 bp, Nicotiana tabacum
  CDS (1)..(1527)
atggcgattgagaataacaacaatggagtgaatttttgtacggtgaagaggccgaagacgaagatagtatgtactttggggccagcatctcgatcggtgccgatgatcgagaagcttctacgggcaggcatgaacgtggcccgattcaacttttctcatggatctcacgactatcatcaggagactattgacaatctccgtcaagctatggagagtaccggtattctctgtgccgttatgcttgacaccaagggtccagaaattcgaacagggtttttaaaagatgctaagcctgttcaacttaaacagggtcaggagatcacaatctcaactgattacagcattaaaggtgatgagagtatgatatgcatgagctacaaaaagttagcagaggacgtaaagccacaaagtgtgatcctctgtgcagatggccaaatcacctttacagttttgtcttgtgacaaagagaacggtttggatcgatgccgctgtgagaacactgctgttcttggtgaaagaaagaatgtcaatctcccgggagtaattgtggatctgccaacattgacagataaagacaaggatgacattttaaactggggagttccgaatcatattgacatgattgcgttatcttttgttcgtaagggttcagatctcgtggaggttcggaagctgctaggtgaacatgcaaagaacattcttctgatgtctaaggttgaaaaccaggaaggtgtagcgaattttgatgacattcttctcaactctgatgcatttatggtggcaagaggtgacctgggaatggaaattccaattgagaagatatttttggctcaaaaggtaatgatttacaagtgcaacatccaagggaagcctgttgtcacagcaacacagatgttggagtccatgatcaaatctccaaggccaactcgtgcagaagcaacagatgttgccaatgctgttcttgatggcacagactgtgtcatgcttagtggtgaaacagctgctggagcttaccctgatcttgcagtgggtaccatggctaagatttgtattgaagcagaaagcacaattgattatccagatgttttcaaaagaattatgtcaaatgccccagttcccatgagcccattggagagccttgcatcttctgctgttcgaaccgctaactctgcaaaagctgctcttatcctagtgttaaccaggggaggaagtactgcaaaattggtggccaagtacagacctggaatgcctatattgtcggtggttgtccccgagatcaaaactgattcttttgattggacttgcagtgacgagtctccagcaaggcatagccttatattcaggggattggttcccgttctccatgcaggatctgctagggcttctcatgaagagtctacagaagaagcactggactttgctcttcaacatgccaaaacaaaagggttatgcaagcaaggagactccgttgtagccctacaccgtgttggaactgcatctgtgatcaagattgttacagtcaagtga

SEQ ID NO: 921 - protein, 508 aa, Nicotiana tabacum
MAIENNNNGVNFCTVKRPKTKIVCTLGPASRSVPMIEKLLRAGMNVARFNFSHGSHDYHQETIDNLRQAMESTGILCAVMLDTKGPEIRTGFLKDAKPVQLKQGQEITISTDYSIKGDESMICMSYKKLAEDVKPQSVILCADGQITFTVLSCDKENGLDRCRCENTAVLGERKNVNLPGVIVDLPTLTDKDKDDILNWGVPNHIDMIALSFVRKGSDLVEVRKLLGEHAKNILLMSKVENQEGVANFDDILLNSDAFMVARGDLGMEIPIEKIFLAQKVMIYKCNIQGKPVVTATQMLESMIKSPRPTRAEATDVANAVLDGTDCVMLSGETAAGAYPDLAVGTMAKICIEAESTIDYPDVFKRIMSNAPVPMSPLESLASSAVRTANSAKAALILVLTRGGSTAKLVAKYRPGMPILSVVVPEIKTDSFDWTCSDESPARHSLIFRGLVPVLHAGSARASHEESTEEALDFALQHAKTKGLCKQGDSVVALHRVGTASVIKIVTVK

SEQ ID NO: 922 - DNA, 1689 bp, Nicotiana tabacum
  CDS (1)..(1689)
atggccacaatgaatctacctacaggactacatgtcgcggctaaaccggcgtcattggatcggctttcctcggccaagaacgtcggtgatttgttcttctccgattctcgtcacaggaaacgagtgaatacttcgaatcaaatcatggccgttcaatcacttgagcatattcatggcgttaataacaatgtttatgccaattatgttaatttcaatgtaccctcttccggttacagtctggggcaagaaagtgtgtatctgaattctccaagaaaaaccaagatagtttgcaccattggtccctccacaagctcacgggagatgatctggaaattggcagaggctggaatgaacgtggcccgtctgaatatgtcacatggggaccacgcatcgcatcagagaacgattgaccttgttaaagaatacaatgctcaatttgaggacaaggttattgcaataatgttggacactaagggacctgaggtaataagtggagatgtgcccaaaccaattctccttaaggagggtcaagaattcaactttagcattaaaagaggagtcagcacagaagacaccgttagtgtaaattatgatgatttcataaatgatgtggaggccggagacatactactcgttgatggtgggatgatgtcattagctgtgaaatcgaaaaccagcgatatagtgaaatgtgaagttattgatggaggagaactgaaatcgagacggcatctaaatgtaagaggaaaaagtgccaccctgccttcaataacagaaaaagactgggatgatattaagtttggtgtgaacaatcaagtcgacttctatgccgtttcttttgtgaaggatgctaaggtggtccatgaattgaaagattacctgaaaagctgtaatgcagatattcatgttattgtaaagattgaaagtgcagactccattccaaatctccactcgatcatttccgcttccgatggggcaatggtggcccgtggtgatcttggagctgaacttccaattgaggaagtgccgttgcttcaggaagacattattagaaggtgtcagagcatgcaaaaacctgtaatagtagcaacgaacatgctcgaaagcatgattgatcacccaaccccaacaagggcagaagtttcagacatttccattgcagtacgtgaaggcgctgatgctgtaatgctttcaggcgaaaccgctcatgggaagtatccactgaaggcagttaaggtgatgcatattgtggcattaaggaccgagtctagcctacaaaaaagcactagttctcctagtcaatctgccgcctataagagccatatgggtgaaatgtttgccttccactcttcctcaatggctaatacccttagcactcccatcattgtcttcacaagaactgggtccatggcaataattttaagtcataatcggccttcatcaacagtttttgccttcacaaacaatgaaagggtgaagcagcgtctggctctgtatcatggtgtcgtgcctatatatatggagttttcaagtgacgcagaggagaccttttctcgagctatcaagcttttgttgagcaaaagcttggtgaaggatgggcaatatgtaactctcgtccaaagtggagcccaaccaatctggcgtagacattctactcaccacatacaagtccgtaaggtccaaagttga

SEQ ID NO: 923 - protein, 562 aa, Nicotiana tabacum
MATMNLPTGLHVAAKPASLDRLSSAKNVGDLFFSDSRHRKRVNTSNQIMAVQSLEHIHGVNNNVYANYVNFNVPSSGYSLGQESVYLNSPRKTKIVCTIGPSTSSREMIWKLAEAGMNVARLNMSHGDHASHQRTIDLVKEYNAQFEDKVIAIMLDTKGPEVISGDVPKPILLKEGQEFNFSIKRGVSTEDTVSVNYDDFINDVEAGDILLVDGGMMSLAVKSKTSDIVKCEVIDGGELKSRRHLNVRGKSATLPSITEKDWDDIKFGVNNQVDFYAVSFVKDAKVVHELKDYLKSCNADIHVIVKIESADSIPNLHSIISASDGAMVARGDLGAELPIEEVPLLQEDIIRRCQSMQKPVIVATNMLESMIDHPTPTRAEVSDISIAVREGADAVMLSGETAHGKYPLKAVKVMHIVALRTESSLQKSTSSPSQSAAYKSHMGEMFAFHSSSMANTLSTPIIVFTRTGSMAIILSHNRPSSTVFAFTNNERVKQRLALYHGVVPIYMEFSSDAEETFSRAIKLLLSKSLVKDGQYVTLVQSGAQPIWRRHSTHHIQVRKVQS

SEQ ID NO: 924 - DNA, 1599 bp, Agaricus bisporus
  CDS (1)..(1599)
atgtatcccgtcgatggcatccgttctcagatcgagtggaacaccactcttaacgtctctgatgctcctgtcccgactgagaccactaaatatcatcgcaagacagctatcattgcgaccattgggcctaaaatcaataccgtcgaaaagctcactgacgttcgcctagctggtgtaaacatcgttcgcatgaatttctcgcacggcacccatgagtaccatcagagtgttattgataacaccaggcaaatgatcaaaaacgacccacatgggcgccccgtagctattgctttggataccaaaggtcccgaaattcggaccggtcagacgagggatggcaatgactatcccattaaggctggggatgaatttatcgtcaccacagatcccaagtatagtgatatatgcgacaataaagttttgttcgttgactacgccaatcttgcaagcgtcactgcccctggcaaactgatctatattgatgatggtatcatctctcttctcattctctctattgatggtatgaacctccatgttcgtgctctcaataatgggaccctctcctctcgcaagggtgtaaatttgcccaaaacggacgtcgaccttccaccactttccgagaaagacaaagatgatctgcgtttcgggattcgtaatggagtcgatatgatcttcgcgtcttttatccgccgtggtgaggacgtaagacagatccgtgaagttctcggccccgatggtgccagcatcaaaattatcgtcaagattgaaaatgagcaaggtgtcgctaactttgatgagattttaaaggaggccgacggtgtcatggttgctcgcggcgatttgggaattgaaattcctgcaagtcaagtattccttgctcagaagatgatgatcgccaagtgcaacattgttgggaagccagtgatcgtcgcaactcaaatgcttgagtccatgacgtacaacccccggcctactcgtgcggaagttagtgacgtcgcaaatgctgtccttgatggctctgattgtgtcatgttgtcgggagagactgctaagggatcttatcccgttcaatctgtcctgatgatggcggagacttgcttgcttgcggaaactgctatttgctacccgcctctatatgacgacctccgcgctgtccaggctcggccaacagaaactgcggagactgttgctatcgccgctgttgctgctgcagccgaacaggatgccaaagcactacttgtcctatcaacaagtggggagactgcccgtctcgtttccaagtatcgccccaagatcccgatcatcactgtcacccgtaatgagcaaaccgcaagacaaatccacttgcatcgcggttgctatcctttctggtaccctgaacctcgaggtgtccaaaaccatcaatggcagactgatgtggacaaccgcatccggtttggtcttcgcaacgctttggcactcaatgtcatccaacctggcgccagtattatcgcagtgcagggttggaagggcggtcttggtcacaccaatacgcttcgcattctgacagtgcccactgaccctgccgaccttgagcttcagcctctgggttctctataa

SEQ ID NO: 925 - protein, 532 aa, Agaricus bisporus
MYPVDGIRSQIEWNTTLNVSDAPVPTETTKYHRKTAIIATIGPKINTVEKLTDVRLAGVNIVRMNFSHGTHEYHQSVIDNTRQMIKNDPHGRPVAIALDTKGPEIRTGQTRDGNDYPIKAGDEFIVTTDPKYSDICDNKVLFVDYANLASVTAPGKLIYIDDGIISLLILSIDGMNLHVRALNNGTLSSRKGVNLPKTDVDLPPLSEKDKDDLRFGIRNGVDMIFASFIRRGEDVRQIREVLGPDGASIKIIVKIENEQGVANFDEILKEADGVMVARGDLGIEIPASQVFLAQKMMIAKCNIVGKPVIVATQMLESMTYNPRPTRAEVSDVANAVLDGSDCVMLSGETAKGSYPVQSVLMMAETCLLAETAICYPPLYDDLRAVQARPTETAETVAIAAVAAAAEQDAKALLVLSTSGETARLVSKYRPKIPIITVTRNEQTARQIHLHRGCYPFWYPEPRGVQNHQWQTDVDNRIRFGLRNALALNVIQPGASIIAVQGWKGGLGHTNTLRILTVPTDPADLELQPLGSL

SEQ ID NO: 926 - DNA, 1581 bp, Aspergillus niger
  CDS (1)..(1581)
atggccgccagctcttccctcgaccacctgagcaaccgcatgaagttggagtggcactccaagctcaacactgagatggtgccctccaagaacttccgccgcacctccatcatcggaaccatcggccccaagaccaactccgtggagaagatcaactctctccgcactgccggtcttaacgttgttcgcatgaacttctcccacggttcttatcagtaccaccaatctgttatcgacaacgcccgcgaggccgccaagacccaggtcggacgtcctctcgccattgctcttgataccaaaggacccgagatccgtaccggaaacacccccgatgataaggatatccctatcaagcagggccacgagctcaacatcaccaccgacgagcaatatgccaccgcctccgacgacaagaacatgtacctcgactacaagaacatcaccaaggtgatctctcctggcaagctcatctatgttgatgacggtatcctttccttcgaggtcctcgaagtcgtagatgacaagaccatccgcgtccggtgcttgaacaacggcaacatctcttcccgcaagggtgttaacttgcccggcactgacgttgacctccccgccctttccgagaaggacattgccgatctcaagttcggtgttaggaacaaggtcgacatggtcttcgcttctttcatccgccgcggtagcgacattcgccacatccgtgaggttctgggtgaggagggcaaggagatccagatcattgccaagattgagaaccagcagggtgtcaacaacttcgacgagatcctcgaagagactgacggtgtcatggttgcccgtggtgaccttggtatcgagatccccgcccccaaggtcttcatcgcccagaagatgatgatcgccaagtgtaacatcaagggtaagcccgtcatctgtgccactcagatgctcgagtccatgacatacaaccctcgtcctactcgtgccgaggtgtccgatgttgccaacgccgtccttgacggtgccgactgtgtcatgctgtcgggagagaccgccaagggtaactaccccaacgaggccgtcaagatgatgtccgagacctgcctgctcgccgaggttgccatcccccacttcaatgtgttcgatgagctccgcaaccttgctcctcgccccaccgacactgtcgagtccatcgccatggctgccgttagcgccagtctggaactcaacgctggtgccattgtcgtcttgactaccagcggtaaaactgctcgctacctttccaagtaccgccccgtctgccccattgtcatggttacccgtaaccccgctgcctcccggtactctcacctgtaccgtggtgtctggcccttcctcttccccgagaagaagcccgacttcaacgtcaaggtctggcaggaggatgttgaccgccgtctcaagtggggtatcaaccacgctcttaagctcggcatcatcaacaagggtgacaacatcgtctgtgtccagggatggcgcggcggtatgggccacaccaacaccgtccgtgtggtccctgctgaggagaaccttggcctggctgagtaa

SEQ ID NO: 927 - protein, 526 aa, Aspergillus niger
MAASSSLDHLSNRMKLEWHSKLNTEMVPSKNFRRTSIIGTIGPKTNSVEKINSLRTAGLNVVRMNFSHGSYQYHQSVIDNAREAAKTQVGRPLAIALDTKGPEIRTGNTPDDKDIPIKQGHELNITTDEQYATASDDKNMYLDYKNITKVISPGKLIYVDDGILSFEVLEVVDDKTIRVRCLNNGNISSRKGVNLPGTDVDLPALSEKDIADLKFGVRNKVDMVFASFIRRGSDIRHIREVLGEEGKEIQIIAKIENQQGVNNFDEILEETDGVMVARGDLGIEIPAPKVFIAQKMMIAKCNIKGKPVICATQMLESMTYNPRPTRAEVSDVANAVLDGADCVMLSGETAKGNYPNEAVKMMSETCLLAEVAIPHFNVFDELRNLAPRPTDTVESIAMAAVSASLELNAGAIVVLTTSGKTARYLSKYRPVCPIVMVTRNPAASRYSHLYRGVWPFLFPEKKPDFNVKVWQEDVDRRLKWGINHALKLGIINKGDNIVCVQGWRGGMGHTNTVRVVPAEENLGLAE

SEQ ID NO: 928 - DNA, 1761 bp, Bacillus psychrophilus
  CDS (1)..(1761): transl_table=11
atgagaaaaacgaaaatagtatgtacgattggccctgcaagtgaatcaccggaattattggaacaacttattgaggctggtatgaatgtagcgaggctgaatttttcccatggtaatcatgcggaacataaagcccgtatcgattccattagaaaagtcgcacgtgaaaaaggcaaagttgttgggattctattagatacgaaaggaccagaaattcggacgcattctatgatgaatggaaagttggaacttgtaacaggacaaaaaattgatatttccatgacgcaagtcgaaggaaacaatgatgtattttcagtaagttacgataaacttattgaagatgtaaacgagggttctgttattcttttagacgatggtctaatccaattagaagttactggtaaagacgtagcacgagggttaattcatacactaattattaattcggggtcattaagcaataataagggcgttaacataccgggtgtttcagtacaacttcctggaatgacggaaaaagatgcagaagatatcctgtttggtattagggaaggtgtcgacttcatagctgcctcattcgtaagacgggcttccgatgttatggaaatccgtgcccttcttgagaacaacaacggctcgaacctgcaaattattccgaagatagaaaaccaagaaggcgtcgacaatatcgatgaaattttgaatgtttcagatggtcttatggtagcacgtggtgatctgggtgtagaaataccaccagaagaagtaccacttgtccagaaaaatttgattgagaagtgtaaccaggcgggtaaaccggttatcacggcaacacaaatgcttgattcgatgcagcgtaacccgcgtcctacacgtgcagaagcgagcgatgtagcgaatgcgatttttgacggtaccgatgcaattatgctgtcaggagagacggcagcaggaatttatccagtcgaatcagtccaaacgatggatcgaattgcgcttactacggaagctgccatcgattatcgctctgtagtgtcgacacgtcgacgagaaaaacatggtaatatgactgaagcgattggacaagctgcagcatacacggctatcaacttgaaagtgaaggctgtccttgccccaacagaaagtggtcacacagctaaaatgattgccaaatatcgtccaggttgcccagttattgcggtaacgtcatctgaaatgtgttcaagaaaactatcacttatctggggcgtctacccgatagttggaaaaaaagcttcttcgattgatgaaatcttgcaagagtctgtagaagagagtgttaaacatcaatatgtcggacatggtgatgtggttatcattacagcaggtgttccagttggtgaagcgggaacgacgaacttgatgaaaatacatgtcataggtgatttgcttgcacgaggacaaggaattggcaaagatgtagcttatggtcgaactgttgtagccaaaaatgcagctgaagcattggcgtatgatacagaaggagctattcttgtaacgaacgcatctgatcgtgatatgatgcctgccatcgagaaatgcgcaggactcattacggaagaaggcggattgacgagtcatggtgcaattgtcggactcagtttaggtataccgataattgtcggagttgaaaatgctaccgagcttatccaacatggcaaggaaattacgatggatgctgaatctggcgttatctataatggacacgcgagcgttctataa

SEQ ID NO: 929 - protein, 586 aa, Bacillus psychrophilus
MRKTKIVCTIGPASESPELLEQLIEAGMNVARLNFSHGNHAEHKARIDSIRKVAREKGKVVGILLDTKGPEIRTHSMMNGKLELVTGQKIDISMTQVEGNNDVFSVSYDKLIEDVNEGSVILLDDGLIQLEVTGKDVARGLIHTLIINSGSLSNNKGVNIPGVSVQLPGMTEKDAEDILFGIREGVDFIAASFVRRASDVMEIRALLENNNGSNLQIIPKIENQEGVDNIDEILNVSDGLMVARGDLGVEIPPEEVPLVQKNLIEKCNQAGKPVITATQMLDSMQRNPRPTRAEASDVANAIFDGTDAIMLSGETAAGIYPVESVQTMDRIALTTEAAIDYRSVVSTRRREKHGNMTEAIGQAAAYTAINLKVKAVLAPTESGHTAKMIAKYRPGCPVIAVTSSEMCSRKLSLIWGVYPIVGKKASSIDEILQESVEESVKHQYVGHGDVVIITAGVPVGEAGTTNLMKIHVIGDLLARGQGIGKDVAYGRTVVAKNAAEALAYDTEGAILVTNASDRDMMPAIEKCAGLITEEGGLTSHGAIVGLSLGIPIIVGVENATELIQHGKEITMDAESGVIYNGHASVL

SEQ ID NO: 930 - DNA, 1764 bp, Bacillus stearothermophilus
  CDS (1)..(1764): transl_table=11
atgaagcggaaaacgaaaatcgtctgcacgatcgggccggcaagcgagagcgtagacaagctcgtgcaactgatggaagcgggaatgaacgtggcgcgcctaaacttttcgcacggcgatcatgaagagcacgggcggcgcatcgccaatattcgcgaagcggcgaagcgaacgggccgaacggtcgccattttgcttgacacgaaagggccggaaatccggacgcacaatatggaaaacggcgccattgagctgaaggaagggtcaaagctcgtcatttcgatgagcgaagtgctcggcacgccggaaaaaatttcggtcacctatcccagcttaatcgatgatgtgtccgtcggcgcgaaaattttgcttgatgacgggctcatcagcctggaagtcaacgcggtcgacaagcaagcgggagaaatcgtcacgaccgtgttaaacggcggcgtgctgaaaaacaaaaaaggagtcaatgtgccgggtgtcaaagtcaacttgccaggcatcaccgagaaagatcgggctgacattttgtttggcattcgccaagggatcgatttcatcgccgcctcgtttgtgcgccgggcgtccgatgtgctggagatccgcgagctgcttgaggcgcatgacgccctccatatccaaattatcgccaaaattgaaaatgaagaaggcgtcgccaacattgacgaaattttagaagccgccgacggcctgatggtggcgcgcggcgatttgggcgtggaaattccggctgaggaagtgccgctcattcaaaaactgctcattaaaaagtgcaacatgctcggcaagccggtcattacggcgacgcaaatgctcgattcgatgcagcgcaatccgcgtccgacgcgggcggaggcgagcgacgtcgccaacgccatttttgacggcaccgacgccgtcatgctttccggggaaacggcggccggccagtatccggtcgaagcggtgaaaacgatgcaccaaatcgcgctccgcaccgaacaggcgcttgagcaccgcgacattttgtcccaacgcacaaaagaaagccaaacgacgatcaccgacgccatcgggcagtcggtcgcccacaccgcgctcaacttggatgtggcggcgatcgtgacgccgaccgtgagcggaaaaacgccgcaaatggtggcgaagtatcgcccgaaagcgccgattattgccgtgacgtcaaatgaagcggtatcgcgccggctggcgcttgtgtggggcgtgtatacgaaagaagcgccgcatgtgaacacgacggacgaaatgctcgatgtcgccgtcgatgcggcggtgcgctccgggttggtgaagcacggtgacttggtcgtcatcacggctggcgtgccggtcggcgaaacgggttcgacgaacttaatgaaggtgcacgttatcagcgatcttctcgccaaagggcaaggcatcggccgcaagtcggcgttcggcaaggccgttgtagcgaaaacagcggaagaagcgcggcaaaaaatggtcgacggcggcattttagtcactgtcagcaccgatgccgacatgatgccggcgatcgaaaaagcggcagccatcattactgaagagggcgggttgaccagccatgcggcggtcgtcggtttgagccttgggattccagtgattgtcggagtggaaaacgcaacaaccttgtttaaagatgggcaggagattacggtggacggcgggttcggtgccgtctatcgcggccatgccagcgtgttgtaa

SEQ ID NO: 931 - protein, 587 aa, Bacillus stearothermophilus
MKRKTKIVCTIGPASESVDKLVQLMEAGMNVARLNFSHGDHEEHGRRIANIREAAKRTGRTVAILLDTKGPEIRTHNMENGAIELKEGSKLVISMSEVLGTPEKISVTYPSLIDDVSVGAKILLDDGLISLEVNAVDKQAGEIVTTVLNGGVLKNKKGVNVPGVKVNLPGITEKDRADILFGIRQGIDFIAASFVRRASDVLEIRELLEAHDALHIQIIAKIENEEGVANIDEILEAADGLMVARGDLGVEIPAEEVPLIQKLLIKKCNMLGKPVITATQMLDSMQRNPRPTRAEASDVANAIFDGTDAVMLSGETAAGQYPVEAVKTMHQIALRTEQALEHRDILSQRTKESQTTITDAIGQSVAHTALNLDVAAIVTPTVSGKTPQMVAKYRPKAPIIAVTSNEAVSRRLALVWGVYTKEAPHVNTTDEMLDVAVDAAVRSGLVKHGDLVVITAGVPVGETGSTNLMKVHVISDLLAKGQGIGRKSAFGKAVVAKTAEEARQKMVDGGILVTVSTDADMMPAIEKAAAIITEEGGLTSHAAVVGLSLGIPVIVGVENATTLFKDGQEITVDGGFGAVYRGHASVL

SEQ ID NO: 932 - DNA, 1506 bp, Saccharomyces castellii
  CDS (1)..(1506)
atggaatccagattagccagattaaccactttacaagttaccgccggtgacaacttaagaagaacctctattattggtactattggtccaaagaccaacaacccagaagtcttggttgctctaagaaaggctggtttgaacattgtccgtatgaacttctctcacggttcttacgaataccatcaatccgttattgaaaacgccagaaagtctgaagaactttacccaggtagaccattagctattgctttggacaccaagggtccagaaatcagaactggtaccaccaccggtgaagttgactacccaattccaccaaaccacgaaatgatcttctctactgatgaaaagtacgctaaggcttgtgatgacaaggttatgttcgtcgactacgctaacatcaccaaggttatctccaagggtaagatcatctacgtcgatgacggtgtgttgtctttcgaagttttggaagtcgttgatggtaagactttgaaggttaagtccttgaacgccggtaagatctgttctcacaagggtgttaacttaccaggtaccgatgtcgatttgccagctttgtccgaaaaggataaggctgatttgagattcggtgttaagaacggtgtccacatggtcttcgcttctttcattagaaccgctcaagatgttttgaccatcagagaagtcttaggtgaagatggtaaggacatcaagattgttgtcaagattgaaaaccaacaaggtgttaacaacttcgacgaaatcttgaaggtcactgatgccgttatggttgccagaggtgatttaggtattgaaattccagccccagaagtcttagctgtccaaaagaaattgattgctaagtctaacttggccggtaagccagttatctgtgctacccaaatgttggagtctatgacttacaacccaagaccaaccagagctgaagtttccgatgtcggtaacgctatcttggatggtgctgactgtgttatgttgtctggtgaaaccgccaagggtaactacccaatcaatgctgtcaccaccatggctgacactgctttgattgctgaacaagccattgcttaccaaccattgtacgatgacttgagaaacttgactccaaagccaacttctaccactgaaaccgttgctgcttccgctgttgccgctgtctacgaacaaaaggccaaggctatcattgtcttgtctacttccggtaccactccaagattggtctccaagtacagaccagactgtccaattatcttggttaccagaaacccaagagctgctagattctctcacttgtctagaggtgttttcccattcgtctacgaagctgactccgttgctgactggactgaagatgtcgaattgagattgaagttcggtattgaaaaggccatcgaaatgggtgtcatgaagaagggtgacacttacgtctccattcaaggtttcaaggctggtgaaggtcactccaacactttgcaagtctctaacgcttaa

SEQ ID NO: 933 - protein, 501 aa, Saccharomyces castellii
MESRLARLTTLQVTAGDNLRRTSIIGTIGPKTNNPEVLVALRKAGLNIVRMNFSHGSYEYHQSVIENARKSEELYPGRPLAIALDTKGPEIRTGTTTGEVDYPIPPNHEMIFSTDEKYAKACDDKVMFVDYANITKVISKGKIIYVDDGVLSFEVLEVVDGKTLKVKSLNAGKICSHKGVNLPGTDVDLPALSEKDKADLRFGVKNGVHMVFASFIRTAQDVLTIREVLGEDGKDIKIVVKIENQQGVNNFDEILKVTDAVMVARGDLGIEIPAPEVLAVQKKLIAKSNLAGKPVICATQMLESMTYNPRPTRAEVSDVGNAILDGADCVMLSGETAKGNYPINAVTTMADTALIAEQAIAYQPLYDDLRNLTPKPTSTTETVAASAVAAVYEQKAKAIIVLSTSGTTPRLVSKYRPDCPIILVTRNPRAARFSHLSRGVFPFVYEADSVADWTEDVELRLKFGIEKAIEMGVMKKGDTYVSIQGFKAGEGHSNTLQVSNA

SEQ ID NO: 934 - DNA, 1506 bp, Saccharomyces kluyveri
  CDS (1)..(1506)
atggaatctagactaggttggttaactgaattgcaaactgaaaccggtgctaacttgagaagaacctctatcatcggtaccattggtccaaagaccaacaacccagaaaccttggttgccttgagaaaggctggtttgaacattgttcgtatgaacttctctcacggttcttacgaataccaccaatctgtcattgacaacgctagaaagtctgaagagctatatccaggtagaccattggctattgctttggacaccaagggtccagaaatcagaactggtaccaccactaacgaagtcgactacccaatcccaccaaaccacgaaatgatcttctccattgacgacaaatacgccaaggcttgtgatgacaaggttatgtacattgactacaagaacatcaccaaggttatcgaaaagggtaagatcatctacgttgatgacggtgtcttgtctttcgaagttttggaagtcgttgacgaacaaactttgaaggttaagtccttgaacgctggtaagatctgctcccacaagggtgttaacttgccaggtaccgatgtcgacttgccagctttgtccgaaaaggacaagtctgacttgagattcggtgtcaagaacggtgtccacatggtcttcgcttctttcatcagaaccgctcaagatgttttgaccatcagagaagttttgggtgaagacggtaaggacgtcaagatcattgtcaagattgaaaaccaacaaggtgttaacaactttgacgaaatcttgaaggttactgacggtgtcatggttgccagaggtgacttgggtatcgaaatcccagctccacaagttttcgctgtccaaaagaagttgattgctaagtgtaacttggccggtaagccagttatctgtgccacccaaatgttggaatctatgacttacaacccaagaccaaccagagctgaagtttccgatgtcggtaacgctgttttggacggtgctgactgtgtcatgttgtctggtgaaaccgctaagggtaactacccaattaacgccgttaccatcatggctgaaaccgctttgattgctgaacaagctatcccatacgtcgccacttacgacgacttgagaaacttcactccaaagccaacttctaccactgaaaccatcgctgccgccgctgtctcttctgttttcgaacaaaaggccaaggctatcattgtcttgtctaccaccggtgacaccccaagattggtctccaaatacaagccaaacgttccaattgttatggttaccagaaacccaagagctgctagattctctcacttgtacagaggtgtcttcccattcgtctacgaatctgacactgaatccgaatggaccaaggatgttgaaagccgtttgaacttcggtattgccaaggccaaggaattcggtatgttgaaggaaggtgacaccattgtcactatccaaggtttcgctgctggtgttggtcactctaacactttgcgtgtcttgaccgtctaa

SEQ ID NO: 935 - protein, 501 aa, Saccharomyces kluyveri
MESRLGWLTELQTETGANLRRTSIIGTIGPKTNNPETLVALRKAGLNIVRMNFSHGSYEYHQSVIDNARKSEELYPGRPLAIALDTKGPEIRTGTTTNEVDYPIPPNHEMIFSIDDKYAKACDDKVMYIDYKNITKVIEKGKIIYVDDGVLSFEVLEVVDEQTLKVKSLNAGKICSHKGVNLPGTDVDLPALSEKDKSDLRFGVKNGVHMVFASFIRTAQDVLTIREVLGEDGKDVKIIVKIENQQGVNNFDEILKVTDGVMVARGDLGIEIPAPQVFAVQKKLIAKCNLAGKPVICATQMLESMTYNPRPTRAEVSDVGNAVLDGADCVMLSGETAKGNYPINAVTIMAETALIAEQAIPYVATYDDLRNFTPKPTSTTETIAAAAVSSVFEQKAKAIIVLSTTGDTPRLVSKYKPNVPIVMVTRNPRAARFSHLYRGVFPFVYESDTESEWTKDVESRLNFGIAKAKEFGMLKEGDTIVTIQGFAAGVGHSNTLRVLTV

SEQ ID NO: 936 - DNA, 1617 bp, Trichoderma reesei
  CDS (1)..(1617)
atgtcccagatctcccgcacgcagagcatcatggctaccacggcccaggagcacctggaaaccggcggccgcatcaattggctggcctcgctcaacacggcctttacgcctgcccgcaactttcgccgcacctccatcatctgcaccatcggccccaagaccaactcggtcgaggccctcaacaagctgcgtgatgccggcctcaacgtcgcccgcatgaacttctcccacggcagctacgagtaccaccagtccgtcatcgacaatgtgcgcgcctctgtcgccgcccaccctggccggcccgtcgccattgccctcgacaccaagggccccgagattcgaactggcaacacggccggcgacgtggacattcccatcagcgccggcaccgtcatgaacttcaccaccgacgagaagtacgcgacggcctgcgacactcagaacatgtacgtcgactacaagaacatcaccaaggtgatccagcctggccgtgtcatctacgtcgacgacggtgtcctcgcctttgacgtcctcagcatcaaggacgaccagaccgtcgaggtccgcgcccgcaacaacggcttcatctcctcccggaagggtgtcaacctgcccaacaccgatgtcgacctgcctgctctctccgagaaggacaaggccgatctccggtttggtgtcaagaacaatgtcgacatggtctttgcctcatttatccgccgtgcgcaggatatcaaggatatccgcgacgtgctgggccccgagggcaagcagatccagatcattgccaagatcgagaaccgacagggtctcaacaactttgccgagatccttgaggagaccgacggtgtcatggtcgcccgtggtgacctgggtattgagatccccgccgccgaggtgttcgccgcccagaagaagatgattgccatgtgcaacattgccggcaagcccgtcatctgcgctacccagatgctcgagtccatgatcaagaaccctcgacctacgcgtgccgagatcagcgatgtcggcaacgccgtcactgatggcgccgactgtgttatgctatctggcgagactgccaagggtaactaccctgccgagtccattcatgagatgcacgaggccagtctcaaggctgaaaacaccatcccctacgtctcccactttgaggagatgtgcactctggtcaagcgccccgtctcgaccgtcgagtcttgcgccatggctgccgtccgcgcctctctcgacctcggcgccggtggcatcattgtcctgtccacctctggcgactctgcccgcctgctgtccaagtaccgccccgtctgccccatcttcatggtgacccgaaaccccaccacctctcgattcagccacctgtaccgcggtgtctaccccttcctgtatcccgagcagaagcccgactttgatactgtcaactggcaggaggacgtcgacaagcgcatcaagtgggccgtcacccgcgccattgagctcaagacgctcactgccggcgacaccgttgtcgtcgtccagggctggaagggcggcatgggcaacacaaacaccctgcgcattgtccgcgctgaccccgaccacctgggcattggacagatggagtag

SEQ ID NO: 937 - protein, 538 aa, Trichoderma reesei
MSQISRTQSIMATTAQEHLETGGRINWLASLNTAFTPARNFRRTSIICTIGPKTNSVEALNKLRDAGLNVARMNFSHGSYEYHQSVIDNVRASVAAHPGRPVAIALDTKGPEIRTGNTAGDVDIPISAGTVMNFTTDEKYATACDTQNMYVDYKNITKVIQPGRVIYVDDGVLAFDVLSIKDDQTVEVRARNNGFISSRKGVNLPNTDVDLPALSEKDKADLRFGVKNNVDMVFASFIRRAQDIKDIRDVLGPEGKQIQIIAKIENRQGLNNFAEILEETDGVMVARGDLGIEIPAAEVFAAQKKMIAMCNIAGKPVICATQMLESMIKNPRPTRAEISDVGNAVTDGADCVMLSGETAKGNYPAESIHEMHEASLKAENTIPYVSHFEEMCTLVKRPVSTVESCAMAAVRASLDLGAGGIIVLSTSGDSARLLSKYRPVCPIFMVTRNPTTSRFSHLYRGVYPFLYPEQKPDFDTVNWQEDVDKRIKWAVTRAIELKTLTAGDTVVVVQGWKGGMGNTNTLRIVRADPDHLGIGQME

SEQ ID NO: 938 - DNA, 1434 bp, Rubrobacter xylanophilus
  CDS (1)..(1434): transl_table=11
atgagggtgcggcggaccaagatagtggccaccctggggccggccacctcctccgaggagagcatcggggcgctggtccgggcgggggtggacgtgatgcggctgaacttcagccacggcacccacgacatgcacctggacaacgcccgcaccgtccgcgaggccgccgccgaggccgggcgcaacgtggcgatcatgcaggatctgcaggggccgaagatccggaccggcgaggtggagggcgggaccgagctcgtggagggcagccgggtcgtgatagcccccggcgacttcgtgggggacgccagccgactctccacctcctacgaccggctggcgcaggacgtgaagcccggccaccggctgctcatagacgacgggctcatcgggctgcgggtggagagcatcaaggagaacggagagatcgtctgcgaggttttggagggcgggcccgtctcctcccacaaggggctcaacttcccggactcctcgctctccataagcgggctgacggagaaggatctggaggatctgcgcttcggccttgaggagctgcgccccgactgggtagccatctccttcgtgcgcaccggcgaggaggtgctcgacgtcaaggagcgcatccgggagctcggcggggacgtgccggtgatctccaagatcgagaagcacgaggcgatagacaacatagaggaggtcatagaagcctccgacggggtgatggtggcccgcggggacctggcggtggagctctcggcggagcgggtgcccatagagcagaagcggatcgtcgcgcgctgccgccggcggggccggccggtgatcgtggccacccagatgctggactcgatgatgcgcaacccccgccccacccgggccgaggtctccgacgtggcgaacgccatcttcgaccggaccgacgcggtgatgctgagcggggagacggccgtcggccgctacccgacccagagcgtgatggagatggaccgcatctgccgggcggcggagggggccatagactacggccgggacatcgccgcctccaccgcctgggggcggggcgaccgctacgacgccgtcacccacgccgcctgcgagctcgccgaggtgctcgaggcgcaggcgatcctcacctccacccagaccggcctctcctgcataagggtcgcccgcttccggccgccgaacaggatcctggcggtgagccccatcgaggccacggtccgccgcctcgccctggtgtggggggtgacggcggtgcggggcgagcaggcgggctcgatagaggagcgcttcagggagtccgtggaggccgccgaggccagggggcacctgaagaagggcgaccggctggtcttcaccggggggacggcgggctccctgccgggctccaccaacctgctgcaggtgcacacggtgggggagaacgggtga

SEQ ID NO: 939 - protein, 477 aa, Rubrobacter xylanophilus
MRVRRTKIVATLGPATSSEESIGALVRAGVDVMRLNFSHGTHDMHLDNARTVREAAAEAGRNVAIMQDLQGPKIRTGEVEGGTELVEGSRVVIAPGDFVGDASRLSTSYDRLAQDVKPGHRLLIDDGLIGLRVESIKENGEIVCEVLEGGPVSSHKGLNFPDSSLSISGLTEKDLEDLRFGLEELRPDWVAISFVRTGEEVLDVKERIRELGGDVPVISKIEKHEAIDNIEEVIEASDGVMVARGDLAVELSAERVPIEQKRIVARCRRRGRPVIVATQMLDSMMRNPRPTRAEVSDVANAIFDRTDAVMLSGETAVGRYPTQSVMEMDRICRAAEGAIDYGRDIAASTAWGRGDRYDAVTHAACELAEVLEAQAILTSTQTGLSCIRVARFRPPNRILAVSPIEATVRRLALVWGVTAVRGEQAGSIEERFRESVEAAEARGHLKKGDRLVFTGGTAGSLPGSTNLLQVHTVGENG

SEQ ID NO: 940 - DNA, 1764 bp, Trichodesmium erythraeum
  CDS (1)..(1764): transl_table=11
atggaactacaaaattatctgcgtcgcactaaaatagtagccactattggcccagccacaattaagcctgatgtacttcgggagctaattaaagctggtgctacaaccctgcgactcaacttttctcatggaactcatgaagatcatcagaatagtattcgccttatccggcaaacctcttttgagctgaatcaaacggtggctattctacaggatcttcaaggaccaaaaattagattaggaaaatttgaaacaggctcaatatctttagaggatggagacccttttattttgacgagtcacttgaaattaggaactcaaaaaatttcttctgtaacttatgaacctttggcagatgaagtgccggaaggggcaaaaattctccttgatgatggcaaagtagaaatgttagtggagaaagtagataaaacagagaaagaactacattgtcgtgttgtagtcggtggtactctttctaataataaaggtgttaactttccgggagtttatctgtcaattaaagcactgacagacaaagacagaaaagatttaatgtttggtcttgaccaaggagtagactgggtagcgcttagttttgttcgtaacccccaggatgttatagagattaaacaattaattgctaatgcggggaaaaaggttcctgtaattgctaaaatagaaaagcacgaagctatcgaacaaatggaagaaattttggctttgtgtaatggggtgatggttgcccgtggtgacttgggggtggagttacctgcagaggaggtacctctgttacaaaaacgactaatttctacttctaacaggatgggaatacctgtaattactgctacccaaatgttagatagtatggtgaataacccccgcgctactcgtgccgaaatttctgatgtggcaaatgcaattattgatggtactgatgctgtcatgttatcaaatgagacagcagtgggtaagtatcctgtggaagctgtaacaacaatggcaactatcgccaaacgcattgagcaagaagttattacttgcaacgtttcgagtatgaatgatacaggtcattctattcccaatgctattagtcatgcagttagtcagattgcacaagagttagatgcagcagctattatgagtctgacaaaaaccggtgcaacagcacgcaatgtatctaagtttcgaccaaaaactcctattttagcagtgactccccatgtggatgtggcgcgacagttacaacttgtatggggagtgaaaccactattagtattggatttaccttctgcaggtcagactttccaatcagccattaatgtagctcaggaaaacgagttattggttgatggagatttagtagttatgactgcgggtactttacaaggcatagcaggttcaacagatttaattaaagttgaggttgtaactgcagttttgggtcaaggtactggagttggtcaaggttctgtgagcggtcgtgctcgggttgctcgtaattcgacggaggttcgggattttaaccatggagaaattttggtggttaatcagacaaatgctgagtttgtggaggcaatgcaaaaagcttctggagtggtgacggaagaggatagtgttaccagtcatgctgcagttattggtttacgtttggggttgccagtgatcgtgggagtgaagaatgcgactaatgtagttcgggatggaacaattttgacgttggatgctcaaagaggtatggtttactctggaactaatcgaaggtaa

SEQ ID NO: 941 - protein, 587 aa, Trichodesmium erythraeum
MELQNYLRRTKIVATIGPATIKPDVLRELIKAGATTLRLNFSHGTHEDHQNSIRLIRQTSFELNQTVAILQDLQGPKIRLGKFETGSISLEDGDPFILTSHLKLGTQKISSVTYEPLADEVPEGAKILLDDGKVEMLVEKVDKTEKELHCRVVVGGTLSNNKGVNFPGVYLSIKALTDKDRKDLMFGLDQGVDWVALSFVRNPQDVIEIKQLIANAGKKVPVIAKIEKHEAIEQMEEILALCNGVMVARGDLGVELPAEEVPLLQKRLISTSNRMGIPVITATQMLDSMVNNPRATRAEISDVANAIIDGTDAVMLSNETAVGKYPVEAVTTMATIAKRIEQEVITCNVSSMNDTGHSIPNAISHAVSQIAQELDAAAIMSLTKTGATARNVSKFRPKTPILAVTPHVDVARQLQLVWGVKPLLVLDLPSAGQTFQSAINVAQENELLVDGDLVVMTAGTLQGIAGSTDLIKVEVVTAVLGQGTGVGQGSVSGRARVARNSTEVRDFNHGEILVVNQTNAEFVEAMQKASGVVTEEDSVTSHAAVIGLRLGLPVIVGVKNATNVVRDGTILTLDAQRGMVYSGTNRR

SEQ ID NO: 942 - DNA, 1584 bp, Oryza sativa
  CDS (1)..(1584)
atgcagtcgagtcctttgcttctggaggaacccataaggatggcctccatcctcgagccatccaagcctagtttctttccagcgatgacaaagattgttggcacacttggcccaaagtcacgatcggttgacgtgatttcccaatgtcttgaggcaggaatgtctgtggcaaggtttgatttttcatggggtgatcctgaataccaccaagagacgttggaaaatttaagggctgctatcaaaagtaccaagaaactttgtgcggttatgctagataccgtgggtccagaactacaagttgtcaacaaaactgagcacccaatttcccttcaggctgacacattggttgtcttaactcctgatcagaacaaagaagctacttcaaatcttttacctgtaaattttagtggactttcaaaggctgtgaagaatggtgatactatttttattggtcaatacctgtttactggaagtgaaacaacctcagtgtggctagaggtcagcgaagtgaatggtgatgatgtcacttgtgtcataaaaaattctgctactcttgctgggtcactgtatactttacatgtctctcaaattcatatcgaccttcccactcttgacaataaggataaggaggtaataagcacttggggtgctcaaaacaatatagacttcctttcattatcatacaccaggcacgctgaagatgttcgccatgctcgtgagtttctctctaaactaggtaacctcaaacagacccagatatttgcaaagattgaaaacatagaggggttgacacattttgatgagatattgcgagaagcggatggtatcatcctctcacgtggaaatttggggatagatcttccacccgagaaggtgtttttatttcaaaaagcagctatttacaaatgtaacatggctgggaaacctgctgttgtcacacgtgttgtggatactatgaccgataacctaagacctactcgtgctgaagcaactgatgttgccaatgcagtgttggatggcagtgatgcaattgttcttggggcagaaactttgcgggggttataccctgtagagactatttccactgttggaaaaatttgtgctgaggcagagaaagtttataatcaagatttgtatttcaagaaggctgtcaaatttgttggagagccgatgactcatttggaatcaatagcttcctctgcggtacgggcagccatcaaggttaaggcttctgttattatttgctttacttcatctggcagggctgcaaggttgattgctaagtaccgtccaaccatgcctgtgatatccgttgtcattcctcaactaaagacaaatcaacttcgatggactttcactggagcttttgaggcaaggcaatcacttattgtgagaggtcttttccctatgcttgcagatccacgacatccagctgagtctaaaagtgcaacaaatgaatcaattttgaaggttgctttagaccatggcaaggcttttggtatcataaaggcacatgatcgagttgttgtatgccagaaagttggtgactcctcagttgtgaagattattgagcttgacgaatag

SEQ ID NO: 943 - protein, 527 aa, Oryza sativa
MQSSPLLLEEPIRMASILEPSKPSFFPAMTKIVGTLGPKSRSVDVISQCLEAGMSVARFDFSWGDPEYHQETLENLRAAIKSTKKLCAVMLDTVGPELQVVNKTEHPISLQADTLVVLTPDQNKEATSNLLPVNFSGLSKAVKNGDTIFIGQYLFTGSETTSVWLEVSEVNGDDVTCVIKNSATLAGSLYTLHVSQIHIDLPTLDNKDKEVISTWGAQNNIDFLSLSYTRHAEDVRHAREFLSKLGNLKQTQIFAKIENIEGLTHFDEILREADGIILSRGNLGIDLPPEKVFLFQKAAIYKCNMAGKPAVVTRVVDTMTDNLRPTRAEATDVANAVLDGSDAIVLGAETLRGLYPVETISTVGKICAEAEKVYNQDLYFKKAVKFVGEPMTHLESIASSAVRAAIKVKASVIICFTSSGRAARLIAKYRPTMPVISVVIPQLKTNQLRWTFTGAFEARQSLIVRGLFPMLADPRHPAESKSATNESILKVALDHGKAFGIIKAHDRVVVCQKVGDSSVVKIIELDE

SEQ ID NO: 944 - DNA, 1584 bp, Brassica napus
  CDS (1)..(1584)
atgcattcgagccatctccttctcgaggagccgatcaggatggcttctatcctcgagccatccaaatccagcttctttccggcgttaactaagatcgtcgggactctcggtcccaaatccagatccgttgagacactctccggctgtctcaaatccggcatgtctgtggctagattcgatttctcttggggagacgctgagtatcaccaagagacgcttgataatctgaagattgctgttaagagctccaagaagctttgtgctgttatgcttgatacagtgggacctgagcttcaagtgatcaacaagtctgagaaagctattactcttaaagctgatggacttgttactttgactcctaatcaagaccgagaagcctcttctgaagtccttcccattaactttgatggccttgccaaggcggtgaagaaaggagacactatctttgttgggcagtacctattcactggtagtgaaacaacttcagtttggctcgaggttgatgaagttaaaggagatgatgtcatttgcctttcaaggaatgctgctactctcgctggttctatgttcaccttgcacgcctctcaagttcacatcgatatgccaactcttactgagaaagataaagaggttataagcacatggggagttcaaaacaaaatcgactttctctcgttgtcctattgtcgccatgcagaggatgttcgccagacccgtgagatgcttaaaaagttgggtgacctctctcaaacacaaatatttgccaagattgagaacgttgagggactaaaccactttgatgagattctacaagaagctgatggaattattctttctcgtgggaacttgggtattgatctacccccggagaaggtgtttttgtttcaaaaggcggctctttacaagtgcaacatggcaggaaagccagccgttcttactcgtgttgttgatagtatgactgacaacttgcgaccaactcgtgcagaggcaacagatgttgctaatgctgttttagatggaagtgatgcaattcttctcggtgctgagactcttcgcggtctgtaccctgtggagactatatcaactgtcggaaggatctgtgctgaggcagagaaggttttcaatcaagatttgtacttcaagaagactgtcaagtatgttggagagccgatgtctcacctcgaatccattgcttcttcagctgtaagggcagcaatcaaggttaaggcatccgtcattatatgctttacctcttctggaagagcagccaggttgattgctaaatacaggccaacaatgccggttatttctgtagtcattccacgggttaagacaaatcagctaaaatggagcttcagtggagcctttgaggctaggcagtcacttattgtcaggggcctcttccccatgcttgctgaccctcgtcaccctgcggaatcaacaagtgcgacgaacgagtcagtcctgaaggttgcgttagaccacgggaagcaagcaggagtgatcaagtcgcacgacagagtagtggtgtgtcagaaagttggtgatgcatctgtggtcaagatcatcgagcttgaggattga

SEQ ID NO: 945 - protein, 527 aa, Brassica napus
MHSSHLLLEEPIRMASILEPSKSSFFPALTKIVGTLGPKSRSVETLSGCLKSGMSVARFDFSWGDAEYHQETLDNLKIAVKSSKKLCAVMLDTVGPELQVINKSEKAITLKADGLVTLTPNQDREASSEVLPINFDGLAKAVKKGDTIFVGQYLFTGSETTSVWLEVDEVKGDDVICLSRNAATLAGSMFTLHASQVHIDMPTLTEKDKEVISTWGVQNKIDFLSLSYCRHAEDVRQTREMLKKLGDLSQTQIFAKIENVEGLNHFDEILQEADGIILSRGNLGIDLPPEKVFLFQKAALYKCNMAGKPAVLTRVVDSMTDNLRPTRAEATDVANAVLDGSDAILLGAETLRGLYPVETISTVGRICAEAEKVFNQDLYFKKTVKYVGEPMSHLESIASSAVRAAIKVKASVIICFTSSGRAARLIAKYRPTMPVISVVIPRVKTNQLKWSFSGAFEARQSLIVRGLFPMLADPRHPAESTSATNESVLKVALDHGKQAGVIKSHDRVVVCQKVGDASVVKIIELED

SEQ ID NO: 946 - DNA, 1497 bp, Brassica napus
  CDS (1)..(1497)
atggcgatgatagagcaaaagccgaagacgaagatcgtgtgtaccctgggtccagcttcgagatccgttgagatggtggagaagcttctgaaggcgggcatgaacgtggctaggtttaacttttcacacggatctcatgagtaccaccaagagactctcgataacctccgtcaagctatgctcaacactggcatcctttgcgccgtcatgctcgataccaagggtcctgaaatccgaaccgggttcttgaaagatgggaaaccaatacagttgaaacaaggccaagagatcaccatttcgactgattatgacttgcagggcgacgagaacactatttgcatgagttacaagaagctggctgtagatgtgaaccctgggatggtcattctctgtgccgatggtactatttccttactcgtcctctcttgtgacacagagaatggtaccgtccgttgccgctgcgagaactccgccatgctcggtgagaggaagaatgtcaatctccctggtgttgtcgtggatctccctactctcaccgagaaagacaaagaagacatcatgaagtggggagtcccgaatcagatcgacatgatcgctctgtcttttgtcagaaaaggttcagacttggttcaggttaggaaactacttggaaagcacgccaagaacattcttctcatgtcaaaggttgagaaccaagaaggtgtggcgaacttcgatgacattctggtcaactccgacgcctttatgattgcaagaggagatctcggcatggagatcccgatagagaagatcttcttagctcagaaagtgatgatctacaaatgcaacatccaggggaaacctgtggtcacagcgactcagatgctcgagtccatgatcaaatctcctcgacccacaagagccgaagccactgatgtagcaaacgctgtcctcgacggcacggactgcgtcatgctcagtggcgaaaccgcagctggagcgtaccctgagctagctgtgcgtaccatggctaagatctgcgttgaagccgagaacacgcttgactacggagacgtcttcaagaggatcatgaagtactctccggttccaatgagcccacttgagtcactcgcgtcctctgctgtcagaacagctaactcggctagagccacactgatcatggtcctaaccaggggaggaagcacggcgaggcttgtggctaagtacagaccagggatgccgattttatcagtcgtggttccggagatcaaaaccgacttgttcgactggtcttgcagcgacgagtcacccgcgaggcatagtcttatcttccgtggtttgatccctgtgctgtacgcagggtcggcaagagcctcgcacgatgaatcgacagaagaagctattgagtttgcgactcagcaggggaaagagaaagagctgtgcaagactggagactccgttgttgctctactccgagttggtaacgcttccctaatcaagatcttgaccgttaagtga

SEQ ID NO: 947 - protein, 498 aa, Brassica napus
MAMIEQKPKTKIVCTLGPASRSVEMVEKLLKAGMNVARFNFSHGSHEYHQETLDNLRQAMLNTGILCAVMLDTKGPEIRTGFLKDGKPIQLKQGQEITISTDYDLQGDENTICMSYKKLAVDVNPGMVILCADGTISLLVLSCDTENGTVRCRCENSAMLGERKNVNLPGVVVDLPTLTEKDKEDIMKWGVPNQIDMIALSFVRKGSDLVQVRKLLGKHAKNILLMSKVENQEGVANFDDILVNSDAFMIARGDLGMEIPIEKIFLAQKVMIYKCNIQGKPVVTATQMLESMIKSPRPTRAEATDVANAVLDGTDCVMLSGETAAGAYPELAVRTMAKICVEAENTLDYGDVFKRIMKYSPVPMSPLESLASSAVRTANSARATLIMVLTRGGSTARLVAKYRPGMPILSVVVPEIKTDLFDWSCSDESPARHSLIFRGLIPVLYAGSARASHDESTEEAIEFATQQGKEKELCKTGDSVVALLRVGNASLIKILTVK

SEQ ID NO: 948 - DNA, 1581 bp, Glycine max
  CDS (1)..(1581)
atgcattccagccctttgcttcttgaggaacccattaggatggcatccatccttgagccatccaagcctactttttttccggctatgacgaaaattgttggcacacttggtccaaagtcacgatcagttgatataatttcccattgccttgatgcaggaatgtctgtggcaaggtttgacttttcatggggtgatccagaataccatcaagagacattggaaaatttgagagttgctatcaaaagtaccaagaaactctgtgcggttatgctagatactgtgggtccagaattacagattgagaataagactgatcacccaatcacccttgaagcagacacattagttgtcttaactccagatcaaaataaagaagctagttcaaatctcttaccattaaattttaccgggctatcaaaggctgtgaagaagggtgatactatttttattggaaaatacttgtttactggaagtgaaacagcttctgtatggctggaggtcagtgaggtggaaggtgaggatgtcacctgtctggtaaaaaacactgccacactctctggatcattgtttactgtacatgtctctcagattcacatcgatcttcctactcttgctgataaagataaggaggtaataagcacatggggtgttcaaaacaatattgacttcctttcattatatacccggcacgttgaagatattcgtcatgcacgtgaatttctctctaaattgggtgacctgaagcagacacatatttatgcaaagattgaaaatatagagggaatgaaacattttgatgaaatattgagagaagcagatggtatcatcctcgctcgtggaaatttagggatagaactcccacctgagaaggttttcttattccaaaaggctgctatttacaagtgtaacatggttggaaagccagttgttgttacacgtgttgtggactctatgactgataatctaagacctactcgtgctgaagcaacagatgttgccaatgcagtgttggatggaagtgacgcaattctccttggagcagagaccctgcggggacaataccctgtagagaccatttctatagttggaaaaatatgtgctgaggcagagaaagttcataatcaagatttgtattttaagaaggctgtaaaatatgtgggagagccaatgagccatttggaatcaattgcttcctctgcggttcgggcagctatcaaggttaaggcctctgttattatttgcttcacttcatctggaagagctgcaagattgattgctaagtacagaccaaccatgcctgtgatatctgttgtcattcctcaattgaagacaaatcaactccgatggacgttcaccggtgcttttgaggctaggcaatctcttattgtgagaggtctttttcctatgctggcagatccacgacacccagctgagtccagaagtggaacaaatgaatcaattttgaaggttgctttagaccatggcaaggcttttggcatcataaagccacatgaccgagttgttgtctgccagaaagtagctgactcgtcagttgtgaagattcttgagctcgaagattga

SEQ ID NO: 949 - protein, 526 aa, Glycine max
MHSSPLLLEEPIRMASILEPSKPTFFPAMTKIVGTLGPKSRSVDIISHCLDAGMSVARFDFSWGDPEYHQETLENLRVAIKSTKKLCAVMLDTVGPELQIENKTDHPITLEADTLVVLTPDQNKEASSNLLPLNFTGLSKAVKKGDTIFIGKYLFTGSETASVWLEVSEVEGEDVTCLVKNTATLSGSLFTVHVSQIHIDLPTLADKDKEVISTWGVQNNIDFLSLYTRHVEDIRHAREFLSKLGDLKQTHIYAKIENIEGMKHFDEILREADGIILARGNLGIELPPEKVFLFQKAAIYKCNMVGKPVVVTRVVDSMTDNLRPTRAEATDVANAVLDGSDAILLGAETLRGQYPVETISIVGKICAEAEKVHNQDLYFKKAVKYVGEPMSHLESIASSAVRAAIKVKASVIICFTSSGRAARLIAKYRPTMPVISVVIPQLKTNQLRWTFTGAFEARQSLIVRGLFPMLADPRHPAESRSGTNESILKVALDHGKAFGIIKPHDRVVVCQKVADSSVVKILELED

SEQ ID NO: 950 - DNA, 1584 bp, Hordeum vulgare
  CDS (1)..(1584)
atgcattccaccaatctgctcctcgaggagcccatccggatggtctccatcctcgagccgtccaaaccgaacttcttcccggcgatgacgaagatcgtggggacgctgggtcccaagtcccggtccgttgaggccatctccgcctgcctgaaggccggcatgtctgtggcacgtttcgatttctcgtggggggatgccgcgtaccaccaggagacactcgagaacctcaagatcgccatcaaggccaccaagaagctatgcgctgttatgcttgacactgttggccccgagttgcaagtggtgaacaagagtgaggtcacaatctcgcttgaagagaacgagtctgttgttctcacccctcacaaaggccaggaggcctcttccaaattgctccctatcaacttctctggactcgccaaggctgtgaagcccggagccacaatatttgttgggcaatatttgttcacgggcagtgagactacatcagtttggctggaggtttctgaagttcaaggggatgacgtggtttgtgtgatcaagaactcagctaccctggctgggtcactcttcacattgcactgctcccagatccatatcgacatgcccacgctgtctgatgaggataaagatgttatgaagaaatggggtgctccaaacaaaattgacttcctctctctttcttatacaaggcatgcagaagatgtgcggcaagcacgggagttcctctcaaagttaggtgatcttagccaaactctgatttttgccaaaattgagaatgtggagggcttgaaccattttgatgagatcctggaagaagcagatggtataattctgtcaagagggaaccttggaattgatcttccacctgaaaaggtgtttttatttcagaagtctgctctgcacaagtgcaacatggctggaaagcctgctgttgttactcgtgttgtggacagtatgacagacaacctaaggcctactcgtgcggaggcaactgatgtggcaaatgcagtgctggatggcagtgatgccattctccttggtgctgagactctccgtgggctgtatccagttgagactatttcaacagtgggcagaatttgtgctgaggctgagaaggtcttcaaccaagatttgtacttcaagcgaaccgtgaaatacgttggagaacccatgacccacttggagtctattgcttcctctgcagtgcgggcggctatcaaagttaaggcttcggtcatcatttgcttcacctcatctggacgagctgcaaggctaattgccaagtacaggcccaccatgcctgtcctgtctgttgtcattcctcgtctaaaaacaaatcaattgaagtggagcttcacaggcgcatttgaagcaagacaatcactcatagttagaggcctctttcccatgcttgctgatccacgtcaccccgctgaatctactagtactacaaatgaatctgtgttgaaggttgctcttgaccatggcaaagcatccggtgtgatcaaatcgcatgaccgtgttgttgtgtgccagaaagtgggagattcctctgtcgtgaagatcattgagctggacgactag

SEQ ID NO: 951 - protein, 527 aa, Hordeum vulgare
MHSTNLLLEEPIRMVSILEPSKPNFFPAMTKIVGTLGPKSRSVEAISACLKAGMSVARFDFSWGDAAYHQETLENLKIAIKATKKLCAVMLDTVGPELQVVNKSEVTISLEENESVVLTPHKGQEASSKLLPINFSGLAKAVKPGATIFVGQYLFTGSETTSVWLEVSEVQGDDVVCVIKNSATLAGSLFTLHCSQIHIDMPTLSDEDKDVMKKWGAPNKIDFLSLSYTRHAEDVRQAREFLSKLGDLSQTLIFAKIENVEGLNHFDEILEEADGIILSRGNLGIDLPPEKVFLFQKSALHKCNMAGKPAVVTRVVDSMTDNLRPTRAEATDVANAVLDGSDAILLGAETLRGLYPVETISTVGRICAEAEKVFNQDLYFKRTVKYVGEPMTHLESIASSAVRAAIKVKASVIICFTSSGRAARLIAKYRPTMPVLSVVIPRLKTNQLKWSFTGAFEARQSLIVRGLFPMLADPRHPAESTSTTNESVLKVALDHGKASGVIKSHDRVVVCQKVGDSSVVKIIELDD

SEQ ID NO: 952 - DNA, 1584 bp, Brassica napus
  CDS (1)..(1584)
atgcattcgagtcatctccttctcgaggaaccgatcaggatggcatcaatcctcgagccatccaaatctagcttctttccggcgttaactaagatcgtcgggactctcggtcccaaatccagatccgttgagactctctccggctgtctcaaatccggcatgtccgtggctcgattcgatttctcttggggagacgctgagtatcaccaagagacgctggataatctgaaaattgctgtgaagagcactaagaagctttgtgctgttatgcttgatacagtgggacctgagcttcaagtgatcaacaagtctgagaaagctattactcttaaagctgatggacttgttactttgactcctaatcaagaccaagaagcctcttctgaagtccttcccattaactttgatgggcttgccaaggcagtgaagaaaggagacactatctttgttgggcaatacctattcactggtagtgaaacaacttcagtttggctcgaggttgatgaagttaaaggagatgatgtcatttgcctgtcaaggaatgctgctactcttgctggtgctctcttcactttgcacgcctctcaagttcacatcgatctgccaactcttactgagaaagataaggaggttataagcacatggggagttcaaaacaaaattgattttctctcactgtcctattgtcgacatgcggaggatgttcgccagactcgcgaaatgcttaaaaagttgggtgacctctctcaaacacaaatatttgccaagattgagaatgtagagggactaacccactttgatgagattctacaagaagccgatggaattattctttctcgtgggaatttgggtatagatctacccccggaaaaggtgtttttgtttcaaaaggcggctctttacaagtgcaacatggctggaaagccagccgttcttacccgtgtggttgatagtatgactgacaacttgcgaccaactcgtgcagaggcaaccgatgttgctaatgctgttttagatggaagtgatgcaattcttcttggtgctgagacccttcgcgggttgtaccctgtcgagaccatatcaactgtcggaaggatctgtgctgaggcagaaaaggttttcaatcaagacttgtacttcaagaagactgtcaagtatgtaggagaaccgatgtctcacctggaatccattgcttcctcagctgtaagggcagcaatcaaggttaaggcatcagtcattatatgcttcacctcttctggaagagcagcaaggttaattgccaaatacaggcccacaatgcccgttatttctgttgtcattccccgggttaagacaaatcagctgaaatggagctttagtggagcctttgaggcgaggcagtcacttattgtcagaggccttttccccatgctcgctgatcctcgtcacccagcggaatcaacaagtgcgacgaacgagtcagtcctcaaggttgcactagaccatggaaagcaagcaggagtgatcaaatcgcatgacagagtagtggtgtgtcagaaagttggtgatgcatctgtggtgaagatcatcgagctagaggattaa

SEQ ID NO: 953 - protein, 527 aa, Brassica napus
MHSSHLLLEEPIRMASILEPSKSSFFPALTKIVGTLGPKSRSVETLSGCLKSGMSVARFDFSWGDAEYHQETLDNLKIAVKSTKKLCAVMLDTVGPELQVINKSEKAITLKADGLVTLTPNQDQEASSEVLPINFDGLAKAVKKGDTIFVGQYLFTGSETTSVWLEVDEVKGDDVICLSRNAATLAGALFTLHASQVHIDLPTLTEKDKEVISTWGVQNKIDFLSLSYCRHAEDVRQTREMLKKLGDLSQTQIFAKIENVEGLTHFDEILQEADGIILSRGNLGIDLPPEKVFLFQKAALYKCNMAGKPAVLTRVVDSMTDNLRPTRAEATDVANAVLDGSDAILLGAETLRGLYPVETISTVGRICAEAEKVFNQDLYFKKTVKYVGEPMSHLESIASSAVRAAIKVKASVIICFTSSGRAARLIAKYRPTMPVISVVIPRVKTNQLKWSFSGAFEARQSLIVRGLFPMLADPRHPAESTSATNESVLKVALDHGKQAGVIKSHDRVVVCQKVGDASVVKIIELED

SEQ ID NO: 954 - DNA, 1743 bp, Brassica napus
  CDS (1)..(1743)
atggctcaggtcgttgctacaaggtcgattcaaggctcgatgttgagtcccaacggtggatctgtttccacgagatccgacaagcttctgaagccggcgagtttcgcagtgaaggttcttggcaacgaatccaagaagagcggaagagtgtccgtaagaggaggaagaaaggttgataccactgtgagatccgctcgtgtggagaccgaagtcattccagtgtctcccgaggatgttccaaacagagaggagcaactggagcggtttttggaaatgcagaagtttagtgacacatcggtagggatgtggtcgaaaccgacagtgaggaggaagactaagattgtgtgcaccgttggtccttctaccaacacacgagagatgatatggaaactagctgaagctgggatgaatgttgcaaggatgaacatgtctcatggggatcatgcttctcataagaaggttattgatttggtcaaagagtacaatgcgcagtctaaggacaacaccattgctatcatgctggatactaagggtccagaagttaggagtggagatttaccccagccgattatgttagaccctggtcaagagtttacttttacaattgagagaggagtcagcacaccaagctgtgtcagtgttaactatgatgattttgtcaacgatgtggaggccggagacatgctccttgttgatggtggtatgatgtcgtttatggtgaagtctaagactaaagagactgtcatatgtgaggttgttgatggtggagagctaaagtcaaggagacacttgaatgtccgaaggaaaagtgcaacattaccttcaatcactgagaaggattgggaggatattaagttcggagtggagaacaaagttgacttctatgctgtttcttttgtcaaagatgcacaagtggtgcatgaactgaagaattacctccaaggttgtggtgctgatattcacgtgatagtaaaaattgaaagcgcagactccatacctaacttgcattccattatcaccgcatcagatggggcaatggttgcaagaggtgatcttggtgcagagcttcctattgaagaagtacccattcttcaggaaaagatcattaacctatgccgtagcatgggaaaagctgttattgttgcaactaacatgcttgagagtatgatagttcatccgactccaacccgagcggaggtttctgatattgctatagctgttagagaaggtgctgatgcagtcatgctttcaggagaaactgctcacggaaagttcccattgaaagctgctggagtgatgcatacagttgcactgcgaacagaagcaaccattactactagtactgaaatgccacctaatcttggtcaagccttcaagaaccatatgagtgagatgtttgcataccatgcaaccatgatgtcaaacacacttggaacttcaactgttgtcttcacaagaactggtttcatggccatactactaagtcactatcgcccttccggcacaatctacgccttcacgaacgagaaaaaaatacagcaaagattagccttgtatcaaggtgtatgccccatatatatggagttctcagatgatgcagaagacactttcactaaagctttggctacactactgaaacaaggaatggtgaagaagggagaggaaatagcgattgtacagagcgggtcacaaccaatctggcggtctcaatcgactcataacatccaagtccgcaaggtgtaa

SEQ ID NO: 955 - protein, 580 aa, Brassica napus
MAQVVATRSIQGSMLSPNGGSVSTRSDKLLKPASFAVKVLGNESKKSGRVSVRGGRKVDTTVRSARVETEVIPVSPEDVPNREEQLERFLEMQKFSDTSVGMWSKPTVRRKTKIVCTVGPSTNTREMIWKLAEAGMNVARMNMSHGDHASHKKVIDLVKEYNAQSKDNTIAIMLDTKGPEVRSGDLPQPIMLDPGQEFTFTIERGVSTPSCVSVNYDDFVNDVEAGDMLLVDGGMMSFMVKSKTKETVICEVVDGGELKSRRHLNVRRKSATLPSITEKDWEDIKFGVENKVDFYAVSFVKDAQVVHELKNYLQGCGADIHVIVKIESADSIPNLHSIITASDGAMVARGDLGAELPIEEVPILQEKIINLCRSMGKAVIVATNMLESMIVHPTPTRAEVSDIAIAVREGADAVMLSGETAHGKFPLKAAGVMHTVALRTEATITTSTEMPPNLGQAFKNHMSEMFAYHATMMSNTLGTSTVVFTRTGFMAILLSHYRPSGTIYAFTNEKKIQQRLALYQGVCPIYMEFSDDAEDTFTKALATLLKQGMVKKGEEIAIVQSGSQPIWRSQSTHNIQVRKV

SEQ ID NO: 956 - DNA, 1743 bp, Brassica napus
  CDS (1)..(1743)
atggctcaggtcgttgctacaaggtcgattcaaggctcgatgttgagtcccaacggtggatctgtttccacgagatccgacaagcttctgaagccggcgagtttcgcagtgaaggttcttggcaacgaatccaagaagagcggaagagtgtccgtaagaggaggaagaaaggttgataccactgtgagatccgctcgtgtggagaccgaagtcattccagtgtctcccgaggatgttccaaacagagaggagcaactggagcggtttttggaaatgcagaagtttagtgacacatcggtagggatgtggtcgaaaccgacagtgaggaggaagactaagattgtgtgcaccgttggtccttctaccaacacacgagagatgatatggaaactagctgaagctgggatgaatgttgcaaggatgaacatgtctcatggggatcatgcttctcataagaaggttattgatttggtcaaagagtacaatgcgcagtctaaggacaacaccattgctatcatgctggatactaagggtccagaagttaggagtggagatttaccccagccgattatgttagaccctggtcaagagtttacttttacaattgagagaggagtcagcacaccaagctgtgtcagtgttaactatgatgattttgtcaacgatgtggaggccggagacatgctccttgttgatggtggtatgatgtcgtttatggtgaagtctaagactaaagagactgtcatatgtgaggttgttgatggtggagagcttaagtcaaggagacacttgaatgtccgagggaaaagtgcaacattaccgtcaatcactgagaaggattgggaggatattaagttcggagtggagaacaaagttgacttttatgcagtttcttttgtcaaagatgcacaagtggtacacgaactcaagaattacctcaaaggttgtggtgctgatattcacgtgatagtaaaaattgaaagcgcagactccatacctaacttgaattccattatcaccgcatcagatggggcaatggttgcaagaggtgatcttggtgcagagcttcctattgaagaagtacccattcttcaggagaggatcattaacctatgccgtagcatgggaaaagctgttattgttgcaactaacatgcttgagagtatgatagttcatccgactccaacccgagcggaggtttctgatattgctatagctgttagagaaggtgctgatgcagtcatgctttcaggagaaactgctcacggaaagttcccactgaaagctgctggagtgatgcatacagtcgcactgcgaacagaagcaaccattactactagtactgaaatgccacctaatcttggtcaagccttcaagaaccatatgagtgagatgtttgcataccatgcaaccatgatgtcaaacacgcttggaacttcaactgttgtcttcaccagaactggtttcatggccatacttttaagtcactatcgcccttctggcaccatctacgccttcacgaatgagaaaaaaatacagcaaagattagccttgtatcaaggggtgtgccccatatatatggagttctcagatgatgcagaggacactttcactaaagctttggctacactactgaaacaaggaatggtgaagaagggagaggaaatagcgattgtacagagcgggtcacaaccaatctggcggtctcaatcgactcataacatccaagtccgcaaggtgtaa

SEQ ID NO: 957 - protein, 580 aa, Brassica napus
MAQVVATRSIQGSMLSPNGGSVSTRSDKLLKPASFAVKVLGNESKKSGRVSVRGGRKVDTTVRSARVETEVIPVSPEDVPNREEQLERFLEMQKFSDTSVGMWSKPTVRRKTKIVCTVGPSTNTREMIWKLAEAGMNVARMNMSHGDHASHKKVIDLVKEYNAQSKDNTIAIMLDTKGPEVRSGDLPQPIMLDPGQEFTFTIERGVSTPSCVSVNYDDFVNDVEAGDMLLVDGGMMSFMVKSKTKETVICEVVDGGELKSRRHLNVRGKSATLPSITEKDWEDIKFGVENKVDFYAVSFVKDAQVVHELKNYLKGCGADIHVIVKIESADSIPNLNSIITASDGAMVARGDLGAELPIEEVPILQERIINLCRSMGKAVIVATNMLESMIVHPTPTRAEVSDIAIAVREGADAVMLSGETAHGKFPLKAAGVMHTVALRTEATITTSTEMPPNLGQAFKNHMSEMFAYHATMMSNTLGTSTVVFTRTGFMAILLSHYRPSGTIYAFTNEKKIQQRLALYQGVCPIYMEFSDDAEDTFTKALATLLKQGMVKKGEEIAIVQSGSQPIWRSQSTHNIQVRKV

SEQ ID NO: 958 - DNA, 1764 bp, Brassica napus
  CDS (1)..(1764)
atgtctcagtctatccaattctcaactccttcacgcactcctcaccttctccacctccctaactcacgcttccaccgtcctctcacttccttatccttccgccaattccctctcaagtacacctcaatcagagcctcctcctctccagatctcggctcctcctcatcctcccaggtccttcactctcctaacggcactggcgctgccaaaccggaagagcgatccgtcgtagccaccgcggtctccacggatacggcagcgatagacgtagataccgtgacggaagcggagctgaaggagaatggattcaggagcacgaggaggacgaagctgatctgcacgatcgggcctgccacgtgcgggttcgagcaactggaagcgctcgcggagggaggcatgaacgtggcgaggctcaacatgtgccacggcacgcgcgagtggcaccgcgatgtgatacgcagcgttaggaagcttaacgaggagaaaggattcgcggttgctatcatgatggacactgaaggcagggagattcacatgggagatctgggcggtggtgaatcttctgctaaatctgaggatggtgaggttgggacattcactgttagagcctttgattcttctcgacctgcacgtaccatcagtgtgagctatgatggttttgcggaagatgtaagagttggtgatgagcttctggttgatggtggaatggtgagatttgaagtgattgagaagattggtcctgatgtcaagtgtctatgcaccgaccctgggttgttgcttcctcgagctaacttgactttctggagagatgggagtcttgttcgtgagcgtaacgctatgcttccaacaatttcctccaaggactggttggatattgattttggaattgctgaaggtgtggacttcattgctgtatcctttgtcaagtctgctgaagtaattaatcatcttaaaagttatcttgcagctcgtcccggtggaggggacataggagtgattgcaaagatcgagagtatcgattcactgacaaacttggaagaaatcatcctagcatcagatggagccatggttgcaagaggagacctgggagctcagatacctctcgagcaagttccagcagctcagcaaagaatcgtcaaagtctgcagagcgctgaacaaacccgtcatcgttgcttcgcagctactcgagtccatgatcgagtacccaactccaaccagagcagaagtagccgacgtttccgaagcagtaaggcagagatcagacgcgttgatgctctctggagaatcagctatgggtcagttcccggacaaggctctcacggttctcaggagtgtcagtctaagaatcgaaagatggtggagggaagagaaacgctacgaggctacaccacttcaagccataagctctgcttcttcagacaaaatctctgaagaaatctgcaactctgcttctaaaatggctaacaatcttggagtcgacgccgtcttcgtgtacacaaagaacggacacatggcgtctctagtctcccgatgccgccctgactgtccgatctttgctttcacgaacacaacctcggtgagaagacgcttaaacctacaatggggactgatcccgttccgtctaagcttctcagaggacatggagagcaacttgaacaaaacattctctttactgaaatcaagaggtatgatcaagtcgggtgacctggtgatcgctgtctctgacatgctgcaatccatccaggtcatgaacgttccgtag

SEQ ID NO: 959 - protein, 587 aa, Brassica napus
MSQSIQFSTPSRTPHLLHLPNSRFHRPLTSLSFRQFPLKYTSIRASSSPDLGSSSSSQVLHSPNGTGAAKPEERSVVATAVSTDTAAIDVDTVTEAELKENGFRSTRRTKLICTIGPATCGFEQLEALAEGGMNVARLNMCHGTREWHRDVIRSVRKLNEEKGFAVAIMMDTEGREIHMGDLGGGESSAKSEDGEVGTFTVRAFDSSRPARTISVSYDGFAEDVRVGDELLVDGGMVRFEVIEKIGPDVKCLCTDPGLLLPRANLTFWRDGSLVRERNAMLPTISSKDWLDIDFGIAEGVDFIAVSFVKSAEVINHLKSYLAARPGGGDIGVIAKIESIDSLTNLEEIILASDGAMVARGDLGAQIPLEQVPAAQQRIVKVCRALNKPVIVASQLLESMIEYPTPTRAEVADVSEAVRQRSDALMLSGESAMGQFPDKALTVLRSVSLRIERWWREEKRYEATPLQAISSASSDKISEEICNSASKMANNLGVDAVFVYTKNGHMASLVSRCRPDCPIFAFTNTTSVRRRLNLQWGLIPFRLSFSEDMESNLNKTFSLLKSRGMIKSGDLVIAVSDMLQSIQVMNVP

SEQ ID NO: 960 - DNA, 1533 bp, Brassica napus
  CDS (1)..(1533)
atgtcgaacatagacatagaagggatactgaaggagctacctaacgatgggaggatcccaaagaccaagatcgtttgcactctgggaccagcttctcgcactgttcctatgatcgaaaagcttctccgagccggtatgaacgtggctcgcttcaacttctctcatggaagccatgaataccaccaggacacactcaacaacctccgcaccgccatgcagaacaccggcattctcgctgctgtcatgctcgacacaaaggggcctgagattcgtactggtttcttgaaagatgggaaccctatacaactaaaggaaggccaggagatcaccatcaccaccgactacgacattcaaggagacgagacaacgatctccatgagctacaagaagcttcccttggatgtgaagcccggaaacaccatactatgtgcagatggaagcataagtctagctgtggtgtcatgcgatccagagtctggaactgttaggtgcaggtgcgaaaacacggcgatgcttggcgagagaaagaacgtgaatctccccggtgtcgttgttgatctccccactctgacagacaaggatattgaagatattatgggttggggtgttccgaacagcatcgatatgattgcgctttcgtttgtccgtaaaggctcggatcttgttaatgtcaggagggttcttggttctcatgctaaaagcataatgttgatgtcaaaggttgagaaccaggaaggagtggtgaactttgatgagatactgcgcgaaacagacgcattcatggttgctcgtggtgatctcgggatggagattcccatagagaagatcttcttagctcagaagctgatgatctacaagtgcaacctcgcaggcaaaccagtggtcacagccactcagatgcttgagtcaatgatcaaatcaccaaggccaacacgtgctgaagccacggacgttgcaaacgccgtcctcgacggcacagactgcgtgatgctcagcggagagagcgcagcaggagcttatccggagatagccgtgaaagtcatggccaagatctgcatcgaagcggagagctctcttgactacaacacgatcttcaaagagaggatcagagcaactccgcttccaatgagcccgctagagagtcttgcatcgtcagctgtaaggactgcgaacaaagcgcatgcgaaactcatcattgtgttgactcgtggaggctcaacagctaagcttgtggctaagtacagacctgctgttccgattctgtcggtggttgttccggttatgaccaccgatacctttgactggagttgtagcgacgagtcgcctgcgaggcacagtctgatatacagagggttgatccctatgttggctgaaggatctgcaaaggcgactgatagcgagtccacagaggttatcattgaatctgctttgaagtcagcgacacagagaggactgtgcaaccatggtgatgcagtcgtggcgctgcaccgtattggagctgcctcggttattaagatctgtgtggtgaagtaa

SEQ ID NO: 961 - protein, 510 aa, Brassica napus
MSNIDIEGILKELPNDGRIPKTKIVCTLGPASRTVPMIEKLLRAGMNVARFNFSHGSHEYHQDTLNNLRTAMQNTGILAAVMLDTKGPEIRTGFLKDGNPIQLKEGQEITITTDYDIQGDETTISMSYKKLPLDVKPGNTILCADGSISLAVVSCDPESGTVRCRCENTAMLGERKNVNLPGVVVDLPTLTDKDIEDIMGWGVPNSIDMIALSFVRKGSDLVNVRRVLGSHAKSIMLMSKVENQEGVVNFDEILRETDAFMVARGDLGMEIPIEKIFLAQKLMIYKCNLAGKPVVTATQMLESMIKSPRPTRAEATDVANAVLDGTDCVMLSGESAAGAYPEIAVKVMAKICIEAESSLDYNTIFKERIRATPLPMSPLESLASSAVRTANKAHAKLIIVLTRGGSTAKLVAKYRPAVPILSVVVPVMTTDTFDWSCSDESPARHSLIYRGLIPMLAEGSAKATDSESTEVIIESALKSATQRGLCNHGDAVVALHRIGAASVIKICVVK

SEQ ID NO: 962 - DNA, 1497 bp, Brassica napus
  CDS (1)..(1497)
atggcgatgatagagcaaaggccgaagacgaagatcgtgtgtacccttggtcccgcttccagatccgttgagatggtggagaagcttctcagggctggcatgaacgtcgctaggtttaacttctctcacggatctcatgagtaccaccaggagactctcgataacctccgtcaagctatgctcaacactggtatcctctgcgccgtcatgctcgataccaagggtccagaaatccgaaccggattcttgaaagatgggaaaccaatccagttgaaacaaggccaagagatcaccatctccactgactacgacttgcagggcgacgaggaaacaatctgcatgagttacaagaagttggctgaagatgtgaacccagggatggttatcctctgtgccgacggtacaatctcgttactggtcctctcttgtgacacagagaatggcacagtccgttgccgctgcgagaactctgccatgctcggtgagaggaagaatgttaatctcccaggtgttgttgtggacctcccaactctaactgagaaagacaaagaagacatcatgaagtggggagtcccgaatcagatcgacatgatcgctctgtcttttgtcagaaaaggttcagacttggttcaggtcaggaaactactaggaaatcacgccaagaacattcttctcatgtcaaaggttgagaaccaagaaggtgtggcgaacttcgatgacattctggtcaactccgacgcctttatgattgcaagaggagatctcggcatggagatcccgatagagaagatcttcttagctcacaaagtgatgatctacaaatgcaacatccaggggaaacctgcggtcacagcgactcagatgctccagtccatgatcaaatctcctcgacccacaagagccgaagccactgatgtagcaaacgctgtcctcgacggcacggactgcgtcatgctcagtggcgaaaccgcagctggagcgtaccctgagctagctgtgcgtaccatggctaagatctgcgttgaagccgagaacacgcttgactacggagacgtcttcaagaggatcatgaagtactctccggttccaatgagcccacttgagtcactcgcgtcctctgctgtcagaacagctaactcggctagagccacactcatcatggtcctaaccaggggaggaagcacggcgaggcttgtggctaagtacagaccagggatgccgattttatcagtcgtggttccggagatcaaaaccgacttgttcgactggtcttgcagcgacgagtcacccgcgaggcatagtcttatcttccgtggtttgatccctgtgctgtacgcagggtcggcaagagcctcgcacgatgaatcaacagaagaagctattgagtttgcgactcagcaggggaaagagaaagagctgtgcaagactggagactccgttgttgctctactccgagttgggaacgcttccctaatcaagatcttgaccgttaagtga

SEQ ID NO: 963 - protein, 498 aa, Brassica napus
MAMIEQRPKTKIVCTLGPASRSVEMVEKLLRAGMNVARFNFSHGSHEYHQETLDNLRQAMLNTGILCAVMLDTKGPEIRTGFLKDGKPIQLKQGQEITISTDYDLQGDEETICMSYKKLAEDVNPGMVILCADGTISLLVLSCDTENGTVRCRCENSAMLGERKNVNLPGVVVDLPTLTEKDKEDIMKWGVPNQIDMIALSFVRKGSDLVQVRKLLGNHAKNILLMSKVENQEGVANFDDILVNSDAFMIARGDLGMEIPIEKIFLAHKVMIYKCNIQGKPAVTATQMLQSMIKSPRPTRAEATDVANAVLDGTDCVMLSGETAAGAYPELAVRTMAKICVEAENTLDYGDVFKRIMKYSPVPMSPLESLASSAVRTANSARATLIMVLTRGGSTARLVAKYRPGMPILSVVVPEIKTDLFDWSCSDESPARHSLIFRGLIPVLYAGSARASHDESTEEAIEFATQQGKEKELCKTGDSVVALLRVGNASLIKILTVK

SEQ ID NO: 964 - DNA, 1533 bp, Brassica napus
  CDS (1)..(1533)
atgtcgaacatagacattgaagggatattgaaggagctacctaacgatgggaggatcccaaagaccaagatcgtttgcactctgggaccagcttctcgcactgttcctatgatcgaaaagcttctccgagccggtatgaacgtcgctcgcttcaacttctctcatggcagccatgaataccaccaggacacactcaacaacctccgcaccgctatgcagaacaccggcattctcgccgctgtcatgctcgacacaaagggacctgagattcgtactggtttcttgaaagatgggaaccctatacaactcaaggaaggccaggagattaccatcaccaccgactacgaaattttaggagatgagacgacgatctccatgagctataagaagcttcccttagatgtgaagcccggaaacaccatactctgtgcagatggaagcataagtctagctgtcttgtcatgtgatccagagtctggaactgttaggtgcaggtgcgaaaacacggcgatgcttggcgagagaaagaacgtgaatctccccggtgtcgttgttgatctccccactctgacagacaaggatattgaagatattatgggttggggtgttcctaacagcatcgatatgattgcgctttcttttgtccgtaaaggctcagatcttgttaatgtcaggagggttcttggttctcatgctaaaagcataatgctgatgtcaaaggttgagaaccaggaaggagtggtgaactttgatgagatactgcgcgaaacagatgcattcatggtcgctcgtggtgatctcgggatggagattcccatagagaagatcttcttagctcagaagctgatgatctacaagtgcaacctcgcaggcaaaccagtggtcacagccactcagatgcttgagtcaatgatcaagtcaccaaggccaacacgtgctgaagccacggacgttgccaacgccgtccttgacggcacagactgcgtgatgctcagcggagagagcgcagcaggagcttatccggagatagccgtgaaagtcatggccaagatctgcattgaagcggagagctctcttgactacaacacgatctttaaagagaggatcagagcaactccggttccaatgagcccgttagagagtcttgcatcgtcagctgtgagggctgcgaacaaagcgcatgcgaagctcatcattgtgttgactcgtggaggctcaacagctaagcttgtagctaagtacagaccctctgttccgattctttcggtggttgtaccagttatgaccacggattcctttgactggacttgtagtgacgagtcgcctgcaaggcatagtttgatatacagaggtttgatccctatgttggctgaaggatctgcaaaggcgacagatagtgagtccacagaggttatcattgaatccgctttgaagtcagctgtgcagagaggactgtgcaaccatggtgatgctgttgtggcgctgcaccgtattggagtcgcctcggttattaagatctgtgtggttaagtaa

SEQ ID NO: 965 - protein, 510 aa, Brassica napus
MSNIDIEGILKELPNDGRIPKTKIVCTLGPASRTVPMIEKLLRAGMNVARFNFSHGSHEYHQDTLNNLRTAMQNTGILAAVMLDTKGPEIRTGFLKDGNPIQLKEGQEITITTDYEILGDETTISMSYKKLPLDVKPGNTILCADGSISLAVLSCDPESGTVRCRCENTAMLGERKNVNLPGVVVDLPTLTDKDIEDIMGWGVPNSIDMIALSFVRKGSDLVNVRRVLGSHAKSIMLMSKVENQEGVVNFDEILRETDAFMVARGDLGMEIPIEKIFLAQKLMIYKCNLAGKPVVTATQMLESMIKSPRPTRAEATDVANAVLDGTDCVMLSGESAAGAYPEIAVKVMAKICIEAESSLDYNTIFKERIRATPVPMSPLESLASSAVRAANKAHAKLIIVLTRGGSTAKLVAKYRPSVPILSVVVPVMTTDSFDWTCSDESPARHSLIYRGLIPMLAEGSAKATDSESTEVIIESALKSAVQRGLCNHGDAVVALHRIGVASVIKICVVK

SEQ ID NO: 966 - DNA, 1584 bp, Brassica napus
  CDS (1)..(1584)
atgcattcgagtcatctccttctcgaggaaccgatcaggatggcatcaatcctcgagccatccaaatctagtttcttcccagcattgactaagatcgtcgggactctcggtcccaaatcccgatccgtcgagactctctccggttgcctcaaatccgggatgtccgtggctcgatttgatttctcttggggagatgctgagtatcaccaggagacgctggataatctgaaaattgctgtgaagagcactaagaagctttgtgctgttatgcttgatactgtgggacctgagctgcaagttatcaacaagtctgggaaagctattactcttaaagccgatggacttgttactttgacacccagtcaagatcgagaagcgtcttctgaagtccttccgattaactttaatgggcttgccaaggcagtgaagaaaggagacactatctttgttgggcaatacctattcactggtagtgaaacaacttcagtttggctcgaggttgatgaagttaaaggagatgatgtcatttgcctgtcaaggaatgctgctactcttgctggttctctcttcactctgcacgcctctcaagttcacatcgatctgccaactcttacggagaaagataaggaggttataagcacatggggagttcagaataaaatcgattttctctctttgtcttattgtcgtcatgcggaggatgttcgccagacccgcgaaatgcttaagaagttgggtgacctctctcaaacacaaatatttgccaagattgagaatgtagagggacttaaccactttgatgagattctacaagaagctgatggaattattctttctcgtgggaatttgggtattgatctacccccggaaaaggtgtttttgtttcaaaaggcggctctttacaagtgcaacatggctgggaaaccagccgttcttacccgtgtcgttgatagtatgactgacaacttgcgaccaactcgtgcagaggcaacagatgttgctaatgctgttctagatggaagtgatgcaattcttcttggtgctgagacccttcgcggtttataccctgttgagacaatatccactgtcggtaggatctgtgctgaggcagaaaaggttttcaatcaggacttgtacttcaagaagactgtcaagtatgtaggagaaccgatgtctcacttggaatccattgcttcttcagctgtacgggcagcaatcaaggttaaggcatctgtcattatatgcttcacctcttctggaagagcagcaaggttaattgccaaatacaggcccacaatgcccgttatttctgttgtcattccccgggttaagacaaatcagctgaaatggagctttagtggagcctttgaggcgaggcagtcacttattgtcagaggccttttccccatgctcgctgatcctcgtcacccagcggaatcaacaagtgcgacgaacgagtcagtcctcaaggttgcactagaccatggaaagcaagcaggagtgatcaaatcgcatgacagagtagtggtgtgtcagaaagttggtgatgcatctgtggtgaagatcatcgagctagaggattaa

SEQ ID NO: 967 - protein, 527 aa, Brassica napus
MHSSHLLLEEPIRMASILEPSKSSFFPALTKIVGTLGPKSRSVETLSGCLKSGMSVARFDFSWGDAEYHQETLDNLKIAVKSTKKLCAVMLDTVGPELQVINKSGKAITLKADGLVTLTPSQDREASSEVLPINFNGLAKAVKKGDTIFVGQYLFTGSETTSVWLEVDEVKGDDVICLSRNAATLAGSLFTLHASQVHIDLPTLTEKDKEVISTWGVQNKIDFLSLSYCRHAEDVRQTREMLKKLGDLSQTQIFAKIENVEGLNHFDEILQEADGIILSRGNLGIDLPPEKVFLFQKAALYKCNMAGKPAVLTRVVDSMTDNLRPTRAEATDVANAVLDGSDAILLGAETLRGLYPVETISTVGRICAEAEKVFNQDLYFKKTVKYVGEPMSHLESIASSAVRAAIKVKASVIICFTSSGRAARLIAKYRPTMPVISVVIPRVKTNQLKWSFSGAFEARQSLIVRGLFPMLADPRHPAESTSATNESVLKVALDHGKQAGVIKSHDRVVVCQKVGDASVVKIIELED

SEQ ID NO: 968 - DNA, 1584 bp, Brassica napus
  CDS (1)..(1584)
atgcattcgagccatctccttctcgaggagccgatcaggatggcttctatcctcgagccatccaaatccagcttctttccggcgttaactaagatcgtcgggactctcggtcccaaatccagatccgttgagacactctccggctgtctcaaatccggcatgtctgtggctagattcgatttctcttggggagacgctgagtatcaccaagagacgcttgataatctgaagattgctgttaagagcaccaagaagctttgtgctgttatgcttgatacagtgggacctgagcttcaagtgatcaacaagtctgagaaagctattactcttaaagctgatggacttgttactttgactcctaatcaagaccgagaagcctcttctgaagtccttcccattaactttgatggccttgccaaggcggtgaagaaaggagacgctatctttgttgggcaatacctattcactggtagtgaaacaacttcagtttggctcgaggttgatgaagttaaaggagatgatgtcatttgcctttcaaggaatgctgctactctcgctggttctatgttcaccttgcacgcctctcaagttcacatcgatatgccaactcttactgagaaagataaagaggttataagcacatggggagttcaaaacaaaatcgactttctctcgttgtcctattgtcgacatgcggaggatgttcgccagactcgcgaaatgcttaaaaagttgggtgacctctctcaaacacaaatatttgccaagattgagaatgttgagggactaacccactttgatgagattctacaagaagccgatggaattattctttctcgtgggaatttgggtattgatctacccccggaaaaggtgtttttgtttcaaaaggcggctctttacaagtgcaacatggctggaaagccagccgttcttactcgtgttgttgatagtatgactgacaacttgcgaccaactcgtgcagaggcaaccgatgttgctaatgctgttttagatggaagtgatgcaattcttctcggtgctgagacacttcgcggattgtaccctgtggagactatatcaactgtcggaaggatctgtgctgaggcagagaaggttttcaatcaagatttgtacttcaagaagactgtcaagtatgttggagagccgatgtctcacctcgaatccattgcttcttcagctgtaagggcagcaatcaaggttaaggcatccgtcattatatgctttacctcttctggaagagcagccaggttgattgctaaatacaggccaacaatgccggttatttctgtagtcattccacgggttaagacaaatcagctaaaatggagcttcagtggagcctttgaggctaggcagtcacttattgtcaggggcctcttccccatgcttgctgaccctcgtcaccctgcggaatcaacaagtgcgacgaacgagtcagtcctgaaggttgcgttagaccacgggaagcaagcaggagtgataaagtcgcacgacagagtagtggtgtgtcagaaagttggtgatgcatctgtggtcaagatcatcgagcttgaggattga

SEQ ID NO: 969 - protein, 527 aa, Brassica napus
MHSSHLLLEEPIRMASILEPSKSSFFPALTKIVGTLGPKSRSVETLSGCLKSGMSVARFDFSWGDAEYHQETLDNLKIAVKSTKKLCAVMLDTVGPELQVINKSEKAITLKADGLVTLTPNQDREASSEVLPINFDGLAKAVKKGDAIFVGQYLFTGSETTSVWLEVDEVKGDDVICLSRNAATLAGSMFTLHASQVHIDMPTLTEKDKEVISTWGVQNKIDFLSLSYCRHAEDVRQTREMLKKLGDLSQTQIFAKIENVEGLTHFDEILQEADGIILSRGNLGIDLPPEKVFLFQKAALYKCNMAGKPAVLTRVVDSMTDNLRPTRAEATDVANAVLDGSDAILLGAETLRGLYPVETISTVGRICAEAEKVFNQDLYFKKTVKYVGEPMSHLESIASSAVRAAIKVKASVIICFTSSGRAARLIAKYRPTMPVISVVIPRVKTNQLKWSFSGAFEARQSLIVRGLFPMLADPRHPAESTSATNESVLKVALDHGKQAGVIKSHDRVVVCQKVGDASVVKIIELED

SEQ ID NO: 970 - DNA, 1716 bp, Brassica napus
  CDS (1)..(1716)
atggcggcgacaggtcaaatctcgacgagaatgacggtggatcgcactctgtcctcctccaggaacgctggactttccctttcaccatcaccccagagaacgctaatcggcgtcgccggtaggtctggtatcgctcaccgtcaactgtctctctccgtcagagcgattaacaccaatgaagatagccggaaagtcaaggtttatgcagagaacggcgctttcgatttgggagtgatggatccttcagtggagccatataaatttgcggagccaagaacaagtcataatgattcgaggaggaaaaccaagattgtgtgtaccattggaccttcctctagctctcgtgaaatgatttggaaactcgcggaagcaggaatgaatgtggctcgtttgaatatgtctcatggagatcatgcttctcatcagattactattgatcttgttaaagaatacaactctctctttgttgacaaagccattgctatcatgttggatacaaagggtcctgaggttcgaagtggggatgtacctcagccgatcttccttgaagagggtcaagagtttaattttaccatcaagagaggtgtctcaatgaaagacaccgtcagtgtcaactatgatgattttgttaacgatgtcgaagttggagacatacttttggtcgatggtggaatgatgtcactagctgttaagtccaagacgagcgatttggtgaaatgtgtagttattgacggtggagagcttcaatctagacgtcacttgaatgttcgaggaaagagtgctactcttccttccataacagacaaagattgggaagacatcaaatttggagtggacaaccaagttgatttctatgctgtctcttttgttaaggatgctaaagttgtccatgagttgaaaaactacctcaaaagctgcagtgcggatatctctgtgattgtgaaaattgaaagcgcagattctataaagaatcttccttccattatatctgcttgtgatggggcaatggttgctcgtggagatcttggagctgaacttcccattgaggaggttcccttgttacaggaggagataatcacaaggtgtaggaacattcataaaccagtgattgtcgccacaaacatgctagagagtatgattaatcatccaacacctacaagagctgaagtatctgacattgcaattgcagtgcgcgaaggagcagatgcaatcatgctttctggtgaaaccgcacacggaaagtttcctctgaaagctgttaacgtgatgcataccgtggctttgagaactgaggctagtctacctgttagaacctcagcaatccggaccactgcttacaagggtcgcatgggccaaatgtttgctttccatgcttctataatggcgaatacactgaacacaccgatcattgtgttcacaagaactggatccatggcagtgcttctgagtcactaccgcccgtcctcaacaattttcgccttcacaaaccagaggagaataatgcaaaggctggctctttaccaaggtgtcatgcctatatacatggagttttctgatgatgcagaagatacatatgcccgttccttgaaactcctacaggacgagaatatgcttaaggaaggacaacatgtaactcttgtccaaagtggtgcgcaacccatttggcgtgaagaatcaacacatctcatacaagtccgtaagattaagataggttga

SEQ ID NO: 971 - protein, 571 aa, Brassica napus
MAATGQISTRMTVDRTLSSSRNAGLSLSPSPQRTLIGVAGRSGIAHRQLSLSVRAINTNEDSRKVKVYAENGAFDLGVMDPSVEPYKFAEPRTSHNDSRRKTKIVCTIGPSSSSREMIWKLAEAGMNVARLNMSHGDHASHQITIDLVKEYNSLFVDKAIAIMLDTKGPEVRSGDVPQPIFLEEGQEFNFTIKRGVSMKDTVSVNYDDFVNDVEVGDILLVDGGMMSLAVKSKTSDLVKCVVIDGGELQSRRHLNVRGKSATLPSITDKDWEDIKFGVDNQVDFYAVSFVKDAKVVHELKNYLKSCSADISVIVKIESADSIKNLPSIISACDGAMVARGDLGAELPIEEVPLLQEEIITRCRNIHKPVIVATNMLESMINHPTPTRAEVSDIAIAVREGADAIMLSGETAHGKFPLKAVNVMHTVALRTEASLPVRTSAIRTTAYKGRMGQMFAFHASIMANTLNTPIIVFTRTGSMAVLLSHYRPSSTIFAFTNQRRIMQRLALYQGVMPIYMEFSDDAEDTYARSLKLLQDENMLKEGQHVTLVQSGAQPIWREESTHLIQVRKIKIG

SEQ ID NO: 972 - DNA, 1728 bp, Glycine max
  CDS (1)..(1728)
atgtctcatgtagtggtcactcgatccattcacacctccctcacgcgccccacctcaggatctgcacaccacagagcccaaacgttgttgaagcctccaacttttgcttccaaagtgttcccacaacaaaggaacaacccctccaaagtttgctcccgaagttgcctcgtcaatgcgaggaaatctgcacccactgaagttgttcccgtctcacccgaggatgattcaaagattgaggaagagttgcagcactcgcgtggtatgcggcaacttggtgacacttctgttggaatgtggtcaaaacccacttttaggaggaagacaaaggttgtttgcaccattggtccttctaccaacaccagggaaatgatttggaagctggctgaggctgggatgaatgttgcccgattgaatatgtctcatggagaccatgcttctcatcagaaaattattgatttggttaaagaatataatgctcaatccaaggacaatgtaattgcaattatgcttgataccaagggtcctgaggttaggagtggggatttgccacaaccaatcaatttaacaactgggcaggaattcacatttaccatccggaggggtgttggaactgcagattgtgttagtgtgaactatgacgatttcgtcaatgatgtggatgtgggagacatgcttcttgttgatggtggtatgatgtctttggtggttaagtctaagacagaggattctgtgaaatgtgaagttgttgatggaggagagctcaagtcaaggagacatttgaacgttagaggaaaaagtgcaacactgccttcaatcactgagaaggattgggatgacatcaaatttggagtggataacaaagttgacttctatgctgtttcttttgttaaggatgcacaagtagttcatgaactgaagaattatttgaaaagctgtgatgctgatatacacgtcattgtaaaaattgaaagtgcagactctataccaaacttgcattcaattattacagcgtctgatggggccatggttgcaagaggagatcttggtgcagaactccctattgaagaggttccacttttgcaggaagaaataatcaccatatgtcgtagcatgggaaaggccgttattgtggcaacaaatatgctggaaagcatgattgttcacccgacaccaaccagagccgaggtatccgatattgcaattgctgttcgagaaggttctgatgcaataatgctttctggggaaactgctcatggaaagttcccactaaaagccgtgaaagtaatgcacaccgtagcattacggacagaagccactatacctggtggtcaaatgccaccaaatattggtcaagtattcaagaaccacatgagtgagatgtttgcttaccatgcaaccatgatgtctaatacccttggaacctcaactgttgtcttcactagatcaggcttcatggctatccttttgagccactatcgaccttcaggcaccatatttgcttttacagatcaaaagaggatacaacagaggttggctttgtatcaaggagtctgtcctatttacatggaattctctgaagatgctgaagagactttcacaagggccttggatttgctgcagaagcaaggaatggtgaaatcaggagaagaagtagcactagtacaaagtggcacgcaacccatatggaggttccaatccactcacaatatccaggtccgaacagtgtaa

SEQ ID NO: 973 - protein, 575 aa, Glycine max
MSHVVVTRSIHTSLTRPTSGSAHHRAQTLLKPPTFASKVFPQQRNNPSKVCSRSCLVNARKSAPTEVVPVSPEDDSKIEEELQHSRGMRQLGDTSVGMWSKPTFRRKTKVVCTIGPSTNTREMIWKLAEAGMNVARLNMSHGDHASHQKIIDLVKEYNAQSKDNVIAIMLDTKGPEVRSGDLPQPINLTTGQEFTFTIRRGVGTADCVSVNYDDFVNDVDVGDMLLVDGGMMSLVVKSKTEDSVKCEVVDGGELKSRRHLNVRGKSATLPSITEKDWDDIKFGVDNKVDFYAVSFVKDAQVVHELKNYLKSCDADIHVIVKIESADSIPNLHSIITASDGAMVARGDLGAELPIEEVPLLQEEIITICRSMGKAVIVATNMLESMIVHPTPTRAEVSDIAIAVREGSDAIMLSGETAHGKFPLKAVKVMHTVALRTEATIPGGQMPPNIGQVFKNHMSEMFAYHATMMSNTLGTSTVVFTRSGFMAILLSHYRPSGTIFAFTDQKRIQQRLALYQGVCPIYMEFSEDAEETFTRALDLLQKQGMVKSGEEVALVQSGTQPIWRFQSTHNIQVRTV

SEQ ID NO: 974 - DNA, 1584 bp, Glycine max
  CDS (1)..(1584)
atgccttccagtcacttgcttctcgaggaacctattaggatggtctccatccttgagccatccaagcctagttttttctctgcaatgacaaagattgttggtaccctgggacctaaatctagatccgtcgaaaccatttctggttgcctcaaggctggcatgtctgtggctcgttttgacttttcatggcatgaccctgagtaccaccaggagactttggagaatttgaaggctgctatcaagagtactaagaagctctgtgctgttatgctggacacagtgggcgctgagatgcaggttgttaacaaaagtgagagagcaatctcgctcgaggcaaatggtcaggttgttctaactcctgatcagggacaagaagcctcttcagagatattgcctatcaattttgatggactggctaaggcagtgaagaagggagacaccatttttattggtcaatacttgttcacgggaagtgaaactacttctgtatggctagaggtatctgaagtcaaagggcaagatgttgtttgtattataaagaacacagctacattggctgggtcattgttcactttgcatgcctctcaaattcatattgatttgcctactctcactgagaaagacaaggaggttataagcacctggggtgttaaaaacaaaattgattttctgtcattgtcatatactcgacacgccgaagatgttcgccaggctcgtgaatttctttcaaagttaggtgatctcagccaaactcaaatttttgcaaagattgaaaatgttgagggattgacccattttgatgagattctacaagaagctgatggtattatcctttcccgtgggaatttgggtattgatcttccaccagagaaggtgtttttgtttcaaaaatctgccctttacaagtgtaatatggctgggaaacctgctgtgcttacacgtgttgtggatagcatgactgacaacttgagaccaactcgtgctgaagccacagatgttgccaatgctgttttagatggaagtgatgccatacttctgggtgctgagactttacgtgggttgtaccctattgagactatttctactgttggcagaatttgttctgaggctgagaaagttttcaatcaagacctttattttaagaggacagtcaagtatgttggagaacccatgacccacttggaatctattgcatcctctgcggtacgggctgcaattaaggtgaaagcatctattataatttgtttcacttcatcaggaagggctgcaagattgatcgcaaagtataggccaacaatgccagtactatctgttgtgatcccccgactcaagacaaatcagctaaagtggagctttagtggagcttttgaggcaagacaatcacttatcgtgagaggtctctttcctatgcttgcagatccacgacatcctgctgagtcaacaagtgcaacaaatgagtctattcttaaggttgcccttgatcatggaaaatcattgggagttattaagtcacatgaccgggtagttgtttgccagaaacttggtgatgcatctgtggttaagattattgagcttgaagattaa

SEQ ID NO: 975 - protein, 527 aa, Glycine max
MPSSHLLLEEPIRMVSILEPSKPSFFSAMTKIVGTLGPKSRSVETISGCLKAGMSVARFDFSWHDPEYHQETLENLKAAIKSTKKLCAVMLDTVGAEMQVVNKSERAISLEANGQVVLTPDQGQEASSEILPINFDGLAKAVKKGDTIFIGQYLFTGSETTSVWLEVSEVKGQDVVCIIKNTATLAGSLFTLHASQIHIDLPTLTEKDKEVISTWGVKNKIDFLSLSYTRHAEDVRQAREFLSKLGDLSQTQIFAKIENVEGLTHFDEILQEADGIILSRGNLGIDLPPEKVFLFQKSALYKCNMAGKPAVLTRVVDSMTDNLRPTRAEATDVANAVLDGSDAILLGAETLRGLYPIETISTVGRICSEAEKVFNQDLYFKRTVKYVGEPMTHLESIASSAVRAAIKVKASIIICFTSSGRAARLIAKYRPTMPVLSVVIPRLKTNQLKWSFSGAFEARQSLIVRGLFPMLADPRHPAESTSATNESILKVALDHGKSLGVIKSHDRVVVCQKLGDASVVKIIELED

SEQ ID NO: 976 - DNA, 1584 bp, Glycine max
  CDS (1)..(1584)
atgcattccagtcacttacttctcgaagaacccattcgcatggtttccatcctcgaaccatccaagcccaatttctttcccgcaatgacgaagatcgttggtaccctgggtcctaaatctcggtcggtcgaggttatttctgcttgtcttaaagctggaatgtcagtggctcgtttcgacttctcttgggatgaccctgaatatcatcaggaaactttggagaatctgaagaatgctatcaagactactaagaaactctgtgctgttatgctggacaccgttggtgcagagatgcaggttgttaacaaaagtgagaaagcgatctcgcttgaggccgatggccaggttgttctgactcctgaccgaggacaagaagcatcgtcgcagatactgcctatcaactttgatggactggcaaagtcaatgaagaagggagacaccattttcattggtcaatacttgttcactggaagtgaaactacttctgtatggctagaggtatccgaagttaaagggcaggatgtcatttgtactataaagaattccgcaacattggctgggtcattgttcactttgcatgcctctcaagttcatattgacttgcctaccctcactgataaagacaaggaggttataagcacctggggagtaaaaaacaaaattgattttctatcattgtcatatactaggcatgctgaagatgttcgccaggcccgtgaattcctttctaagttaggtgatctaagccagactcaaatatttgcaaaaactgaaaatgttgagggattgacccattttgatgagattctacaagaagctgatggtattatcctttcccgtgggaatttgggcattgatcttcccccagagaaggtatttttctttcaaaaatctgccctttacaagtgtaatatggctgggaaacctgccgtgcttacacgtgttgtggatagcatgactgacaacttaagaccaactcgtgcagaagccactgatgttgccaatgctgttttagatggaagtgatgcaatacttctaggtgctgagaccttacgtgggttataccctgttgagactatttccacagttggaaaaatttgtgcagaagctgagaaagtttttaatcaagacctttattttaagaaaaccgtcaaatatgttggagaacccatgacccacttggaatctattgcatcctctgcggtacgagcagctattaaggtgaaggcttctgttattatttgcttcacttcttctggaagggctgcaagattaatagcaaaatataggccaaccatgccagttctctctgttgtgatcccccgactcaagacaaatcagctgaaatggagcttcagtggagcttttgaggctaggcaatcacttattgttagaggcctctttcccatgcttgccgatccccgacatcctgccgagtcgacaagtggcacaaacgagtctattctaaaggttgcccttgatcatggaaaagcatcaggagttataaagtcacacgaccgagtagttgtttgccagaaagttggtgatgcgtctgtggttaagattatcgagcttgaagattaa

SEQ ID NO: 977 - protein, 527 aa, Glycine max
MHSSHLLLEEPIRMVSILEPSKPNFFPAMTKIVGTLGPKSRSVEVISACLKAGMSVARFDFSWDDPEYHQETLENLKNAIKTTKKLCAVMLDTVGAEMQVVNKSEKAISLEADGQVVLTPDRGQEASSQILPINFDGLAKSMKKGDTIFIGQYLFTGSETTSVWLEVSEVKGQDVICTIKNSATLAGSLFTLHASQVHIDLPTLTDKDKEVISTWGVKNKIDFLSLSYTRHAEDVRQAREFLSKLGDLSQTQIFAKTENVEGLTHFDEILQEADGIILSRGNLGIDLPPEKVFFFQKSALYKCNMAGKPAVLTRVVDSMTDNLRPTRAEATDVANAVLDGSDAILLGAETLRGLYPVETISTVGKICAEAEKVFNQDLYFKKTVKYVGEPMTHLESIASSAVRAAIKVKASVIICFTSSGRAARLIAKYRPTMPVLSVVIPRLKTNQLKWSFSGAFEARQSLIVRGLFPMLADPRHPAESTSGTNESILKVALDHGKASGVIKSHDRVVVCQKVGDASVVKIIELED

SEQ ID NO: 978 - DNA, 1638 bp, Glycine max
  CDS (1)..(1638)
atggcaaccattaacctttcttccgctactacgtctctcttccaatccaaacaccgaacgaaacgcattccacgcctccctacaatcgccagaataacaaaccacatcgaaggaactcatcttaactcccccaacggctctcccatccttggcaacgcaaacaattcccttgaggttccctccaataactatatctcgctacactcttcagacgtgcgtaggaaaactaagatcgtgtgcacgataggtccttctacgagctcacgtgatatgatatggaacctggctcaagctggaatgaacgtggcgcgtttgaacatgtcgcatggggaccacgcctcgcacctccaaaccattgatttggtgaaagaatacaattctcagtttcaagataaggttgtagccatcatgctcgacaccaagggtcctgaagttagaagtggggatgtagctcaacctattttacttaaagagggacaagaattctgtttcaccactatgagaggggttagcacacatgacacggttagcgtgaactacgatggctttgtgaatgatgtggagttcggagatgtgttgctggttgatggaggaatgatgtctcttgctgttaagtcaaagacaaaagacttggttaaatgtgaagttattgatggtggtgaactgaaatctaggcgtcatttaaatgtccgtggaaaaagtgcaacacttccttccataactgacaaggactgggaagatatcaagtttggggtggacaatcaagtagacttctttgctgtctcatttgtcaaggatgctagagtggtgcacgagttaaaacactacctcaaaagtcataatgccgatatacacgtgattgtaaaaattgaaagtgcagattccataccaaatctccattcgatactttctgcttcagatggggccatggtcgctcgtggggatcttggagctgaacttccaatagaggaagttcctttattgcaggaagacatcattcgaagatgtcaaattatgcaaaagcctgttattgtggcaacaaatatgcttgaaagcatgattaatcatcccacaccaacaagggcagaagtttcagacatcgcaattgcagtaagacaaggtgctgatgctatcatgctttcaggagaaactgcacatggaaaatttccattgaaagctgttaaagttatgcacacggtggctcttaggaatgaatccagtgttcaaagtggtgtttcttatccgagtcaactgagttcccatgaaagtcatatgggagaaatgtttgctttccatgcgacaacaatgtctaacactcttaatactcctattattgttttcaccagaacaggatccatggcaattcttttgagccattataggccttactcaacaatctttgcattcacaaatgaagcaagaattaagcagaggttggcgctttatcatggggttatgtccatatacatgcaattttcaaatgatgtagaagagaccttctctagagccctcaagctactattgagtaagagtcatttacacgagggacaacatgtcacacttgttcaaagtggagcacaaccaatctggcgtgaggaatccactcaccacatacaagttcgcaaggttcatggataa

SEQ ID NO: 979 - protein, 545 aa, Glycine max
MATINLSSATTSLFQSKHRTKRIPRLPTIARITNHIEGTHLNSPNGSPILGNANNSLEVPSNNYISLHSSDVRRKTKIVCTIGPSTSSRDMIWNLAQAGMNVARLNMSHGDHASHLQTIDLVKEYNSQFQDKVVAIMLDTKGPEVRSGDVAQPILLKEGQEFCFTTMRGVSTHDTVSVNYDGFVNDVEFGDVLLVDGGMMSLAVKSKTKDLVKCEVIDGGELKSRRHLNVRGKSATLPSITDKDWEDIKFGVDNQVDFFAVSFVKDARVVHELKHYLKSHNADIHVIVKIESADSIPNLHSILSASDGAMVARGDLGAELPIEEVPLLQEDIIRRCQIMQKPVIVATNMLESMINHPTPTRAEVSDIAIAVRQGADAIMLSGETAHGKFPLKAVKVMHTVALRNESSVQSGVSYPSQLSSHESHMGEMFAFHATTMSNTLNTPIIVFTRTGSMAILLSHYRPYSTIFAFTNEARIKQRLALYHGVMSIYMQFSNDVEETFSRALKLLLSKSHLHEGQHVTLVQSGAQPIWREESTHHIQVRKVHG

SEQ ID NO: 980 - DNA, 1638 bp, Glycine max
  CDS (1)..(1638)
atggcaaccattaacctttcttccgctactacgtctctcttccaatccaaacaccgaacgaaacgcattccacgcctccctacaatcgccagaataacaaaccacatcgaaggaactcatcttaactcccccaacggctctcccatccttggcaacgcaaacaattcccttgaggttccctccaataactatatctcgctacactcttcagacgtgcgtaggaaaactaagatcgtgtgcacgataggtccttctacgagctcacgtgatatgatatggaacctggctcaagctggaatgaacgtggcgcgtttgaacatgtcgcatggggaccacgcctcgcacctccaaaccattgatttggtgaaagaatacaattctcagtttcaagataaggttgtagccatcatgctcgacaccaagggtcctgaagttagaagtggggatgtagctcaacctattttacttaaagagggacaagaattctgtttcaccactatgagaggggttagcacacatgacacggttagcgtgaactacgatggctttgtgaatgatgtggagttcggagatgtgttgctggttgatggaggaatgatgtctcttgctgttaagtcaaagacaaaagacttggttaaatgtgaagttattgatggtggtgaactgaaatctaggcgtcatttaaatgtccgtggaaaaagtgcaacacttccttccataactgacaaggactgggaagatatcaagtttggggtggacaatcaagtagacttctttgctgtctcatttgtcaaggatgctagagtggtgcacgagttaaaacactacctcaaaagtcataatgccgatatacacgtgattgtaaaaattgaaagtgcagattccataccaaatctccattcgatactttctgcttcagatggggccatggtcgctcgtggggatcttggagctgaacttccaatagaggaagttcctttattgcaggaagacatcattcgaagatgtcaaattatgcaaaagcctgttattgtggcaacaaatatgcttgaaagcatgattaatcatcccacaccaacaagggcagaagtttcagacatcgcaattgcagtaagacaaggtgctgatgctatcatgctttcaggagaaactgcacatggaaaatttccattgaaagctgttaaagttatgcacacggtggctcttaggaatgaatccagtgttcaaagtggtgtttcttatccgagtcaactgagttcccatgaaagtcatatgggagaaatgtttgctttccatgcgacaacaatgtctaacactcttaatactcctattattgttttcaccagaacaggatccatggcaattcttttgagccattataggccttactcaacaatctttgcattcacaaatgaagcaagaattaagcagaggttggcgctttatcatggggttatgtccatatacatgcaattttcaaatgatgtagaagagaccttctctagagccctcaagctactattgagtaagagtcatttacacgagggacaacatgtcacacttgttcaaagtggagcacaaccaatctggcgtgaggaatccactcactacatacaagttcgcaaggttcatggataa

SEQ ID NO: 981 - protein, 545 aa, Glycine max
MATINLSSATTSLFQSKHRTKRIPRLPTIARITNHIEGTHLNSPNGSPILGNANNSLEVPSNNYISLHSSDVRRKTKIVCTIGPSTSSRDMIWNLAQAGMNVARLNMSHGDHASHLQTIDLVKEYNSQFQDKVVAIMLDTKGPEVRSGDVAQPILLKEGQEFCFTTMRGVSTHDTVSVNYDGFVNDVEFGDVLLVDGGMMSLAVKSKTKDLVKCEVIDGGELKSRRHLNVRGKSATLPSITDKDWEDIKFGVDNQVDFFAVSFVKDARVVHELKHYLKSHNADIHVIVKIESADSIPNLHSILSASDGAMVARGDLGAELPIEEVPLLQEDIIRRCQIMQKPVIVATNMLESMINHPTPTRAEVSDIAIAVRQGADAIMLSGETAHGKFPLKAVKVMHTVALRNESSVQSGVSYPSQLSSHESHMGEMFAFHATTMSNTLNTPIIVFTRTGSMAILLSHYRPYSTIFAFTNEARIKQRLALYHGVMSIYMQFSNDVEETFSRALKLLLSKSHLHEGQHVTLVQSGAQPIWREESTHYIQVRKVHG

SEQ ID NO: 982 - DNA, 1728 bp, Glycine max
  CDS (1)..(1728)
atgtctcatgtagtggtcactcgatccattcacacctccctcacgcgccccacctcaggatctgcacaccacagagcccaaacgttgttgaagcctccaacttttgcttccaaagtgttcccacaacaaaggaacaacccctccaaagtttgctcccgaagttgcctcgtcaatgcgaggaaatctgcacccgctaaagttgttcccgtctcacccgaggatgattcaaagattgaggaagagttgcagcactcgcgtggtatgcagcaacttggcgacacttctgttggaatgtggtcaaaacccacgtttaggaggaagacaaaggttgtttgcaccattggtccttctaccaacaccagggaaatgatttggaagctggctgaggctgggatgaatgttgcccgattgaatatgtctcacggagaccatgcttctcatcagaaaattattgatttggttaaagaatataatgctcaatccaaggacaacgtaattgcaattatgcttgataccaagggtcctgaggttaggagtggggatttgccacaaccaatcaatttaacaactgggcaggaattcacatttaccatccggaggggtgttggaactgcagattgtgttagtgtgaactatgacgatttcgtcaatgatgtggatgtgggagacatgcttcttgttgatggtggtatgatgtctttggtggttaagtctaagacagaggattctgtgaaatgtgaagttgttgatggaggagagctcaagtcaaggagacatttgaatgttagaggaaaaagtgcaacactgccttccataactgagaaggattgggatgacatcaaatttggagtggataacaaagttgacttctatgctgtttcttttgttaaggatgcacaagtagttcatgaactgaagaattatttgaaaagctgtgatgctgatatacacgtcattgtaaaaattgaaagtgcagactctataccaaacttgcattcaattattacagcgtctgatggggccatggttgcaagaggagatcttggtgcagaactccctattgaagaggttccacttttgcaggaagaaataatcaccatatgtcgtagcatgggaaaggccgttattgtggcaacaaatatgctggaaagcatgattgttcacccgacaccaaccagagccgaggtatccgatattgcaattgctgttcgagaaggttctgatgcaataatgctttctggggaaactgctcatggaaagttcccactaaaagccgtgaaagtaatgcacaccgtagcattacggacagaagccactatacctggtggtcaaatgccaccaaatattggtcaagtattcaagaaccacatgagtgagatgtttgcttaccatgcaaccatgatgtctaatacccttggaacctcaactgttgtcttcactagatcaggcttcatggctatccttttgagccactatcgaccttcaggcaccatatttgcttttacagatcaaaagaggatacaacagaggttggctttgtatcaaggagtctgtcctatttacatggaattctctgaagatgctgaagagactttcacaagggccttggatttgctgcagaagcaaggaatggtgaaatcaggagaagaagtagcactagtacaaagtggcacgcaacccatatggaggttccaatccactcacaatatccaggtccgaacagtgtaa

SEQ ID NO: 983 - protein, 575 aa, Glycine max
MSHVVVTRSIHTSLTRPTSGSAHHRAQTLLKPPTFASKVFPQQRNNPSKVCSRSCLVNARKSAPAKVVPVSPEDDSKIEEELQHSRGMQQLGDTSVGMWSKPTFRRKTKVVCTIGPSTNTREMIWKLAEAGMNVARLNMSHGDHASHQKIIDLVKEYNAQSKDNVIAIMLDTKGPEVRSGDLPQPINLTTGQEFTFTIRRGVGTADCVSVNYDDFVNDVDVGDMLLVDGGMMSLVVKSKTEDSVKCEVVDGGELKSRRHLNVRGKSATLPSITEKDWDDIKFGVDNKVDFYAVSFVKDAQVVHELKNYLKSCDADIHVIVKIESADSIPNLHSIITASDGAMVARGDLGAELPIEEVPLLQEEIITICRSMGKAVIVATNMLESMIVHPTPTRAEVSDIAIAVREGSDAIMLSGETAHGKFPLKAVKVMHTVALRTEATIPGGQMPPNIGQVFKNHMSEMFAYHATMMSNTLGTSTVVFTRSGFMAILLSHYRPSGTIFAFTDQKRIQQRLALYQGVCPIYMEFSEDAEETFTRALDLLQKQGMVKSGEEVALVQSGTQPIWRFQSTHNIQVRTV

SEQ ID NO: 984 - DNA, 1584 bp, Glycine max
  CDS (1)..(1584)
atgccttccagtcacttgcttctcgaggaacctattaggatggtctccatccttgagccatccaagcctagttttttctctgcaatgacaaagattgttggtaccctgggacctaaatctagatccgtcgaaaccatttctggttgcctcaaggctggcatgtctgtggctcgttttgacttttcatggcatgaccctgagtaccaccaggagactttggagaatttgaaggctgctatcaagagtactaagaagctctgtgctgttatgctggacacagtgggcgctgagatgcaggttgttaacaaaagtgagagagcaatctcgctcgaggcaaatggtctggttgttctaactcctgatcagggacaagaagcctcttcagagatattgcctatcaattttgatggactggctaaggcagtgaagaagggagacaccatttttattggtcaatacttgttcacgggaagtgaaactacttctgtatggctagaggtatctgaagtcaaagggcaagatgttgtttgtattataaagaacacagctacattggctgggtcattgttcactttgcatgcctctcaaattcatattgatttgcctactctcactgagaaagacaaggaggttataagcacctggggtgttaaaaacaaaattgattttctgtcattgtcatatactcgacacgccgaagatgttcgccaggctcgtgaatttctttcaaagttaggtgatctcagccaaactcaaatttttgcaaagattgaaaatgttgagggattgacccattttgatgagattctacaagaagctgacggtattatcctttcccgtgggaatttgggtattgatcttccaccagagaaggtgtttttgtttcaaaaatctgccctttacaagtgtaacatggctgggaaacctgctgtgcttacacgtgttgtggatagcatgactgacaacttgagaccaactcgtgctgaagccacagatgttgccaatgctgttttagatggaagtgatgccatacttctgggtgctgagactttacgtgggttgtaccctattgagactatttctactgttggcagaatttgttctgaggctgagaaagttttcaatcaagacctttattttaagaggacagtcaagtatgttggagaacccatgacccacttggaatctattgcatcctctgcggtacgggctgcaattaaggtgaaagcatctattataatttgtttcacttcatcaggaagggctgcaagattgatcgcaaagtataggccaacaatgccagtactatctgttgtgatcccccgactcaagacaaatcagctaaagtggagctttagtggagcttttgaggcaagacaatcacttatcgtgagaggtctctttcctatgcttgcagatccacgacatcctgctgagtcaacaagtgcaacaaatgagtctattcttaaggttgcccttgatcatggaaaatcattgggagttattaagtcacatgaccgggtagttgtttgccagaaacttggtgatgcatctgtggttaagattattgagcttgaagattaa

SEQ ID NO: 985 - protein, 527 aa, Glycine max
MPSSHLLLEEPIRMVSILEPSKPSFFSAMTKIVGTLGPKSRSVETISGCLKAGMSVARFDFSWHDPEYHQETLENLKAAIKSTKKLCAVMLDTVGAEMQVVNKSERAISLEANGLVVLTPDQGQEASSEILPINFDGLAKAVKKGDTIFIGQYLFTGSETTSVWLEVSEVKGQDVVCIIKNTATLAGSLFTLHASQIHIDLPTLTEKDKEVISTWGVKNKIDFLSLSYTRHAEDVRQAREFLSKLGDLSQTQIFAKIENVEGLTHFDEILQEADGIILSRGNLGIDLPPEKVFLFQKSALYKCNMAGKPAVLTRVVDSMTDNLRPTRAEATDVANAVLDGSDAILLGAETLRGLYPIETISTVGRICSEAEKVFNQDLYFKRTVKYVGEPMTHLESIASSAVRAAIKVKASIIICFTSSGRAARLIAKYRPTMPVLSVVIPRLKTNQLKWSFSGAFEARQSLIVRGLFPMLADPRHPAESTSATNESILKVALDHGKSLGVIKSHDRVVVCQKLGDASVVKIIELED

SEQ ID NO: 986 - DNA, 1749 bp, Glycine max
  CDS (1)..(1749)
atggttttgaaatcaatggttgcttccgcgagcgatctaagtctcgtgagtgttgcagggaaccctccccttgatttgaagaatcgggttttcggtagccgcgtcatcagcctcggatttcgtttcaacaaaggtagtaaatggaaggggaatgaaaggtttaactttaaggttcgtgcagctgtggaagtgggtgtggagagatcgaagagcaaggctttggagggtggttttgggttggatgtggtttcagaggcagagttaacggtgaagggttttgcggggttgaggaagaccaagctcgtgtgcactgttggtcctgcttgcagctctatggaggatcttgagaacttggctcttggaggcatgagtgttgccaggctcaacatgtgccatgggaccagggagtggcaccgtgatgtgattaggaagatcaagaagttgaatgaggagaaagggttctgtgtttctgtaatgattgacactgagggtagtcagattcatgttgttgatcatggagctccttcctccgttaaagttgaggaaggttcaaattgggtgtttactgctgaacattatgagggttctcgtccattcactgttcaaacgaactatagaggtttttctgaaggtaccgaagtgggtgatgaacttgtaattgatggtggaatggcatgctttgaagtcacagaaaagactggtaatgatttgcattgcaaatgcatagatgctggtcttttcctgcctggagccaaatttagtttttggagagatggaaagcttgtgagggggaataacaagctccccactctatcgacaaaggattgggctgacattgactttggtatagcagagggagttgatttttttgccttatcctttgtcaatcatgctgattctgttaaggatctaaagatgtacctctctacgaagtcaactaaatccattaaagttttggcaaagatagaaagcttagaatcccttcataaactggaggaaatagtgcaagcttctgatgggatcatggtggctcggggtgaccttggtgtcgaaataccacttgaacagattcctacagtccaagaggatataatttacgtatgcagacaattaaacaagccagtgattgtagcttctcagcttcttgagtcaatggtcgagtatccaacgccaacacgtgctgaggtagcagatgtttctgaagcagttcgacagtatgctgatgctttgatgttgtctggagagtcagctattggatcatatggacgaaaagctttggcagtcttggatatggctagcagtagaatggaatcatggagtcgggaggaaaatagacaaagtcttgttagccaccatcaacttggagaatcattgccagaatgcataactgagcaaatatgcaattgtgccgttgaaatggccaacaaccttggtgtggatgccatctttgtgtacacaaagtatggacacatggcatcgcttctatcgcgcaaccgcccgaatcctcccatctttgctttcaccaacgatgacagtacccgcatggctctgactttgcaatggggtgttgtgcccattctggttgatttgtccgatgatgctgaatctaacatctcaaagtctgtgcaacttatgaaatctagagggttgatcagccaaggagatgttgttctagtggtctcagatgttgctccgacacgtgcctctcctatggctttccagtctattcaggtgaagactattatctaa

SEQ ID NO: 987 - protein, 582 aa, Glycine max
MVLKSMVASASDLSLVSVAGNPPLDLKNRVFGSRVISLGFRFNKGSKWKGNERFNFKVRAAVEVGVERSKSKALEGGFGLDVVSEAELTVKGFAGLRKTKLVCTVGPACSSMEDLENLALGGMSVARLNMCHGTREWHRDVIRKIKKLNEEKGFCVSVMIDTEGSQIHVVDHGAPSSVKVEEGSNWVFTAEHYEGSRPFTVQTNYRGFSEGTEVGDELVIDGGMACFEVTEKTGNDLHCKCIDAGLFLPGAKFSFWRDGKLVRGNNKLPTLSTKDWADIDFGIAEGVDFFALSFVNHADSVKDLKMYLSTKSTKSIKVLAKIESLESLHKLEEIVQASDGIMVARGDLGVEIPLEQIPTVQEDIIYVCRQLNKPVIVASQLLESMVEYPTPTRAEVADVSEAVRQYADALMLSGESAIGSYGRKALAVLDMASSRMESWSREENRQSLVSHHQLGESLPECITEQICNCAVEMANNLGVDAIFVYTKYGHMASLLSRNRPNPPIFAFTNDDSTRMALTLQWGVVPILVDLSDDAESNISKSVQLMKSRGLISQGDVVLVVSDVAPTRASPMAFQSIQVKTII

SEQ ID NO: 988 - DNA, 1728 bp, Glycine max
  CDS (1)..(1728)
atgtctcaggtagtggccactcgatccattcactcctccctcacgcgccccacctcaggatctgcacaccacagggcccaaacgttgttgaagcctccaacttttgcttccaaattgttcggagcacaaaggaacaacccctccaaagtttgctcccgaagttgcctcgtcaatgcgaggaaatctgcacccgctaaagttgttcccgtgtcacccgaggatgattcaaagattgaggaagagttgcagcacttgcgtggtatgcagcaacttggcgacacttctgttggaatgtggtcaaaacccacgtttaggaggaagacaaaggttgtttgcaccattggtccttctaccaacaccagggaaatgatttggaagctggctgagactgggatgaatgttgcccgattgaatatgtctcacggagaccatgcttctcatcagaaaattattgatttggttaaagaatataatgctcaatccaaggacaacgtaattgcaattatgcttgataccaagggtcctgaggttaggagtggggatttgccacaaccaatcaatttaacaactgggcaggaattcacttttaccatccggaggggtgttggaactgcagattgtgttagtgtgaactatgacgatttcgtcaatgatgtggatgtgggagacatgcttcttgttgatggtggtatgatgtctttggtggttaagtctaagacagaggattctgtgaaatgtgaagttgttgatggaggagagctcaagtcaaggagacatttgaatgttagaggaaaaagtgcaacactgccttccataactgagaaggattgggatgacatcaaatttggagtggataacaaagttgacttctatgctgtttcttttgttaaggatgcacaagtagttcatgaactgaagaattatttgaaaagctgtgatgctgatatacacgtcattgtaaaaattgaaagtgcagactctataccaaacttgcattcaattattacagcgtctgatggggccatggttgcaagaggagatcttggtgcagaactccctattgaagaggttccacttttgcaggaagaaataatcaccatatgtcgtagcatgggaaaggccgttattgtggcaacaaatatgctggaaagcatgattgttcacccgacaccaaccagagccgaggtatccgatattgcaattgctgttcgagaaggttctgatgcaataatgctttctggggaaactgctcatggaaagttcccactaaaagccgtgaaagtaatgcacaccgtagcattacggacagaagccactatacctggtggtcaaatgccaccaaatattggtcaagtattcaagaaccacatgagtgagatgtttgcttaccatgcaaccatgatgtctaatacccttggaacctcaactgttgtcttcactagatcaggcttcatggctatccttttgagccactatcgaccttcaggcaccatatttgcttttacagatcaaaagaggatacaacagaggttggctttgtatcaaggagtctgtcctatttacatggaattctctgaagatgctgaagagactttcacaagggccttggatttgctgcagaagcaaggaatggtgaaatcaggagaagaagtagcactagtacaaagtggcacgcaacccatatggaggttccaatccactcacaatatccaggtccgaacagtgtaa

SEQ ID NO: 989 - protein, 575 aa, Glycine max
MSQVVATRSIHSSLTRPTSGSAHHRAQTLLKPPTFASKLFGAQRNNPSKVCSRSCLVNARKSAPAKVVPVSPEDDSKIEEELQHLRGMQQLGDTSVGMWSKPTFRRKTKVVCTIGPSTNTREMIWKLAETGMNVARLNMSHGDHASHQKIIDLVKEYNAQSKDNVIAIMLDTKGPEVRSGDLPQPINLTTGQEFTFTIRRGVGTADCVSVNYDDFVNDVDVGDMLLVDGGMMSLVVKSKTEDSVKCEVVDGGELKSRRHLNVRGKSATLPSITEKDWDDIKFGVDNKVDFYAVSFVKDAQVVHELKNYLKSCDADIHVIVKIESADSIPNLHSIITASDGAMVARGDLGAELPIEEVPLLQEEIITICRSMGKAVIVATNMLESMIVHPTPTRAEVSDIAIAVREGSDAIMLSGETAHGKFPLKAVKVMHTVALRTEATIPGGQMPPNIGQVFKNHMSEMFAYHATMMSNTLGTSTVVFTRSGFMAILLSHYRPSGTIFAFTDQKRIQQRLALYQGVCPIYMEFSEDAEETFTRALDLLQKQGMVKSGEEVALVQSGTQPIWRFQSTHNIQVRTV

SEQ ID NO: 990 - DNA, 1749 bp, Glycine max
  CDS (1)..(1749)
atggtcctgaagtcagtggttgcttccgcgagcgatctaagtctcgtgtctgttgcagggaactctccccttgatttcaagaatcgggttttcggtggccgactcattagcctcggatttcgtttcaacaaaggtagtaaatgcaaggggaatgaaaggtttaactttgaggttcgtgcagctgtggaagtgggtgtggagagatcgaagagtaaggctttggagggtggttttgggttggatgtggtttcagaggcagagttaacagtgaagggttttgcggggttgaggaagaccaaactcgtgtgcactgttggtcctgcttgcagctctatggaggatcttgagaacttggctcttggaggcatgagtgttgccaggctcaacatgtgccatgggaccagggagtggcaccgtgatgtgattaggaagatcaagaagttgaatgaggagaaagggttctgtgtttctgtaatgattgacactgagggtagtcagattcatgttgttgatcatggagctccttcctccgttaaagttgaggaaggttcaaattgggtgtttactgctgaacattatgagggttctcgtccattcactgttcaaacgaactatagaggtttttctgaaggtaccgaagtgggtgatgaacttgtaattgatggtggaatggcatgctttgaagtcacagaaaagactggtaatgatttgcattgcaaatgcatagatgctggtcttttcctgcctggagccaaatttagtttttggagagatggaaagcttgtgagggggaataacaagctccccactctatcgacaaaggattgggctgacattgactttggtatagcagagggagttgatttttttgccttatcctttgtcaatcatgctgattctgttaaggatctaaagatgtacctctctacgaagtcaactaaatccattaaagttttggcaaagatagaaagcttagaatcccttcataaactggaggaaatagtgcaagcttctgatgggatcatggtggctcggggtgaccttggtgtcgaaataccacttgaacagattcctacagtccaagaggatataatttacgtatgcagacaattaaacaagccagtgattgtagcttctcagcttcttgagtcaatggtcgagtatccaacgccaacacgtgctgaggtagcagatgtttctgaagcagttcgacagtatgctgatgctttgatgttgtctggagagtcagctattggatcatatggacgaaaagctttggcagtcttggatatggctagcagtagaatggaatcatggagtcgggaggaaaatagacaaagtcttgttagccaccatcaacttggagaatcattgccagaatgcataactgagcaaatatgcaattgtgccgttgaaatggccaacaaccttggtgtggatgccatctttgtgtacacaaagtatggacacatggcatcgcttctatcgcgcaaccgcccgaatcctcccatctttgctttcaccaacgatgacagtacccgcatggctctgactttgcaatggggtgttgtgcccattctggttgatttgtccgatgatgctgaatctaacatctcaaagtctgtgcaacttatgaaatctagagggttgatcagccaaggagatgttgttctagtggtctcagatgttgctccgacacgtgcctctcctatggctttccagtctattcaggtgaagactattatctaa

SEQ ID NO: 991 - protein, 582 aa, Glycine max
MVLKSVVASASDLSLVSVAGNSPLDFKNRVFGGRLISLGFRFNKGSKCKGNERFNFEVRAAVEVGVERSKSKALEGGFGLDVVSEAELTVKGFAGLRKTKLVCTVGPACSSMEDLENLALGGMSVARLNMCHGTREWHRDVIRKIKKLNEEKGFCVSVMIDTEGSQIHVVDHGAPSSVKVEEGSNWVFTAEHYEGSRPFTVQTNYRGFSEGTEVGDELVIDGGMACFEVTEKTGNDLHCKCIDAGLFLPGAKFSFWRDGKLVRGNNKLPTLSTKDWADIDFGIAEGVDFFALSFVNHADSVKDLKMYLSTKSTKSIKVLAKIESLESLHKLEEIVQASDGIMVARGDLGVEIPLEQIPTVQEDIIYVCRQLNKPVIVASQLLESMVEYPTPTRAEVADVSEAVRQYADALMLSGESAIGSYGRKALAVLDMASSRMESWSREENRQSLVSHHQLGESLPECITEQICNCAVEMANNLGVDAIFVYTKYGHMASLLSRNRPNPPIFAFTNDDSTRMALTLQWGVVPILVDLSDDAESNISKSVQLMKSRGLISQGDVVLVVSDVAPTRASPMAFQSIQVKTII

SEQ ID NO: 992 - DNA, 1542 bp, Hordeum vulgare
  CDS (1)..(1542)
atggtgtccaacggggagctgtcgcagccgcaggcgggggagtacggcaccgccgtgatgcggcgccggcccaagaccaagatcgtttgcacgctcggcccggcctcgcgctccgtcgatatgatcgagaagctgttgcgcgccgggatgtgcgtcgcccgcttcaacttctcccacggctcccacgaataccaccaggagacgctcgacaacctgcacgccgccatggagcgcaccgagatcctctgcgccgtcatgctcgacaccaagggtccagagatccgtactggatttttgaaagatgggaagcctatccagttgaaaaagggccaagaaattgtaatctccacagattataccataaagggggacgacaagatgatatcgatgagctataagaagctagcagttgatctgaagccaggcagtgttatattatgcgctgatggtactatcactcttactgtgcttcactgtgacaaagagcaaggtctcgttcgttgctgttgtgagaacactgctatgcttggtgagaggaagaatgtcaatcttccaggggtcgttgttgatctcccaacactcactgaaaaggacagggaggatatccttcaatggggtgtcccgaacaagattgacatgattgctttgtcgtttgttcgcaagggttcagatcttgtggaggtccggaaggtacttggggagcatgccaagtcaataatgctgatgtcaaaggttgagaaccaagaaggagtagctaactttgacgatatcctggcacagtctgatgcttttatggtggcaagaggtgatttgggaatggaaatccctgtagagaagatcttttatgcacagaaggtgatgattttcaagtgcaacattcagggcaagccagttgtgactgcaacccagatgttggagtctatgatcaagtctcctcgccctacccgagcggaagcaaccgacgtggccaacgcagttcttgatggcactgactgtgtcatgctcagtggcgagacagctgccggtgcttatccagaactggcagtgcaaactatggccaagatctgcttgcaggctgagtcatgcgtggactattctgctgtttttaaatcaatcatgtcatcagccccgattcccatgagcccattggagagccttgcctcatcagctgtccgcacagcgaactcagctaaggcgacgcttatcttggtactgaccaggggaggaacaactgcaaggcttgtagccaagtataggccatccatgccgatactgtctgtcgtggttcctgagctcaagacagtcgagtttgattggatctgcagcgacgaggggcctgccaggcaaagccttatcgtgaggggcgtgatcccaatgctgagtgctggcactgcgaaggcgtttgacagcgaagccacggaagaggcactgaggtttgccgtgaagagcgccaaggagacggggctttgcaacgctggtgagtccattgtggcccttcaccgcatcgggaatgcatctgtcatcaagctcttgaccgtgtaa

SEQ ID NO: 993 - protein, 513 aa, Hordeum vulgare
MVSNGELSQPQAGEYGTAVMRRRPKTKIVCTLGPASRSVDMIEKLLRAGMCVARFNFSHGSHEYHQETLDNLHAAMERTEILCAVMLDTKGPEIRTGFLKDGKPIQLKKGQEIVISTDYTIKGDDKMISMSYKKLAVDLKPGSVILCADGTITLTVLHCDKEQGLVRCCCENTAMLGERKNVNLPGVVVDLPTLTEKDREDILQWGVPNKIDMIALSFVRKGSDLVEVRKVLGEHAKSIMLMSKVENQEGVANFDDILAQSDAFMVARGDLGMEIPVEKIFYAQKVMIFKCNIQGKPVVTATQMLESMIKSPRPTRAEATDVANAVLDGTDCVMLSGETAAGAYPELAVQTMAKICLQAESCVDYSAVFKSIMSSAPIPMSPLESLASSAVRTANSAKATLILVLTRGGTTARLVAKYRPSMPILSVVVPELKTVEFDWICSDEGPARQSLIVRGVIPMLSAGTAKAFDSEATEEALRFAVKSAKETGLCNAGESIVALHRIGNASVIKLLTV

SEQ ID NO: 994 - DNA, 1593 bp, Hordeum vulgare
  CDS (1)..(1593)
atgcagggcggcaaccacatgctcctcgaggagcccgtccgcctcgcctccgtcctcgcccccgccaagcccaaagttttcccatccctcactaagattgttgggacgcttgggcccaactcgcattctgtcgaagttattgaagaatgcctcactgctgggatgtcagttgcacggtttgatttctcttggaaggatgctacttatcatcaggagaccctcgacaatctgaggaaagcggcacagaatgtgaagaagttatgtcctataatgctgcatacaaagggtccagaaattcaggttcacaatccaactggtggagcaatcgagttgataggtgggaatcatgtcacaataacaccagatctttctaaagctccttcggctgatatcctaccaattaaatttggcgatcttgcaaaagttgtaaagaagggtgatactcttttcattggtcaatatcttttcacaggaagtgaaacaacatctctatggcttgaagttatggagacttctggtgaagaagtgatttgttttgtgaagaacacagctacactgtcggggcccattttcactctacatgtttcacaagtacatatcagtatgcccactttgagtgaatatgataaacaggtcatatcaacatgggggttggataacagtgttgacattatatcgctttcccatacccgctcttctgaggatgtcagggagcttagagcctttttacaatctcataatcttcaagacacacagatatatgcgaagattgaaaatgccgagggtttggaacattttgatgaaattctccaagaggcggatggtatcattatatctcgaggagacctgggaatcgacctcccaccagagagggtgttcatgtcccaaaagactggtattcataaatgcaacatggccggcaaacctgtgatcattaccagagttgtggacagcatgattgacaatcttcgccctactcgcgcagaagcgactgatgttgcaaatgccgtcctagatggaactgatggtattttgcttggtgcggagacactccgagggcagtatcctgttgacgccgtgagtactgtgggcagaatatgcgcagaagctgagaccgtgtataaccagtcgcttcacttcaagaaagtagtgaggcatgtaggtgaaccaatggcccatgaagaatctgtggcatcatcagcggttcgttctgcaatgaaagtaaaagctgctgcgattgttgtgttcaccttctcagggagagctgccaggttagttgctaaatacaggccaccaatgccagttttagcagttgtgttcccacgcgagggctctgatccatcaaagtggcgttcttatggcacaacgcaggcgaggcaatgtttttctgtgagaggtgtgtaccctttgatggggagtactgacgaggctgaaaccggtgggctcaccaaagaagcatacgggataaaacttgcactaaactatggccggtcagtcggcataataaagccatacgacagggtgattatttttgaaaagatcggtgattcttctgttgtcaagatcatcgagtgcgacgattctgaaagatga

SEQ ID NO: 995 - protein, 530 aa, Hordeum vulgare
MQGGNHMLLEEPVRLASVLAPAKPKVFPSLTKIVGTLGPNSHSVEVIEECLTAGMSVARFDFSWKDATYHQETLDNLRKAAQNVKKLCPIMLHTKGPEIQVHNPTGGAIELIGGNHVTITPDLSKAPSADILPIKFGDLAKVVKKGDTLFIGQYLFTGSETTSLWLEVMETSGEEVICFVKNTATLSGPIFTLHVSQVHISMPTLSEYDKQVISTWGLDNSVDIISLSHTRSSEDVRELRAFLQSHNLQDTQIYAKIENAEGLEHFDEILQEADGIIISRGDLGIDLPPERVFMSQKTGIHKCNMAGKPVIITRVVDSMIDNLRPTRAEATDVANAVLDGTDGILLGAETLRGQYPVDAVSTVGRICAEAETVYNQSLHFKKVVRHVGEPMAHEESVASSAVRSAMKVKAAAIVVFTFSGRAARLVAKYRPPMPVLAVVFPREGSDPSKWRSYGTTQARQCFSVRGVYPLMGSTDEAETGGLTKEAYGIKLALNYGRSVGIIKPYDRVIIFEKIGDSSVVKIIECDDSER

SEQ ID NO: 996 - DNA, 1710 bp, Hordeum vulgare
  CDS (1)..(1710)
atggccgccgcgcactccctcctccacctcgcggtgcccaagtccctcgcccccacgttcaccctctctcctctcggcgccgctcaccgcctgctgccctccctccggcctcagcgcatggttgcgtcctgtagctcagcccaccctgacctcgccgccttccccaaccccaacggactcctggtggccgagcccgctgcggtgacgcccaccgacattgacgtggccacggaggccgagctgcgggaaaacgggtcccggagcacgcgccgcaccaagctcgtctgcaccgtggggccagccacttgcggcccctcggagctggaggcgctggccgtgggcgggatgaacgtcgcgcgtctcaacatgtgccatggggaccgcgactggcaccagaaggtcatcagctccgtgcggaggctcaacgaggagaaggggtatgccgtcgccgtcatgatggacaccgaggggagcgagatccacatgggggacctcggcggcgcgccagcggccaaggcggaggatggagaaatctggatattcagcgttagatcttttgaggtacctctcccagaactaactgttcatgtgaactacgaaggctttgctgaagatgtgagagttggtgatgatcttcttgtggatggtggaatggctcgttttgaggtcgttgagaaactaggaccagatgtgaagtgccgttgcacagatcctggtttgctgttgccacgtgccaatcttacattctggcgggatggcagtgttgtccgcgcgaagaatgccatgcttccgacaattacatctaaggattggcttgacatagactttggaattgctgaaggtgtagattttattgcagtttcatttgttaagtcagctgaggttattaaccatctaaagagctacatagcagcaaggagtcgtggcagtgatatagcggttattgcaaagatcgagagcatcgactctttgacaaacttggaggagatcatccgtgcatcggatggtgccatggtagccagaggggacttgggagcacaaattcccttggagcaggtcccttcaatacaacaaaagatagttaaactgtgcaggcagctaaacaagccagtcattgttgcttcccagcttcttgaatcgatgattgagtatcctatacccaccagggctgaagttgctgatgtttctgaagcagtccaccaacgtgcggatgctttaatgctttctggcgaatcggcaatgggcagatatccagataaggcgctcagcgtcctcagtaatgttagcttaaggattgaaagatggtggagggaggagaagcaccatgagccactagaacttgaggacgtttcgtcttctttctctgacaaaatatcagaagagatctgcatttctgctgctaaaatggctaacaagttggaagtagatgccgttttcgtctatacgaagggtgtccacatggcttccttgctttcacggtgccgccctgactgcccaatcttcgccttcacaaactcgacgtccgtgaggagacgactgaacctccaatggggcctcatccccttccgcctcactttctcagatgacatggagagcaacctgaaccgcaccttctccctgctcaaggcgagaggcatgatcaagtccggtgacctggggatcgctctctctgacatgctgcagtccatccaggtgatgaacgtaccatga

SEQ ID NO: 997 - protein, 569 aa, Hordeum vulgare
MAAAHSLLHLAVPKSLAPTFTLSPLGAAHRLLPSLRPQRMVASCSSAHPDLAAFPNPNGLLVAEPAAVTPTDIDVATEAELRENGSRSTRRTKLVCTVGPATCGPSELEALAVGGMNVARLNMCHGDRDWHQKVISSVRRLNEEKGYAVAVMMDTEGSEIHMGDLGGAPAAKAEDGEIWIFSVRSFEVPLPELTVHVNYEGFAEDVRVGDDLLVDGGMARFEVVEKLGPDVKCRCTDPGLLLPRANLTFWRDGSVVRAKNAMLPTITSKDWLDIDFGIAEGVDFIAVSFVKSAEVINHLKSYIAARSRGSDIAVIAKIESIDSLTNLEEIIRASDGAMVARGDLGAQIPLEQVPSIQQKIVKLCRQLNKPVIVASQLLESMIEYPIPTRAEVADVSEAVHQRADALMLSGESAMGRYPDKALSVLSNVSLRIERWWREEKHHEPLELEDVSSSFSDKISEEICISAAKMANKLEVDAVFVYTKGVHMASLLSRCRPDCPIFAFTNSTSVRRRLNLQWGLIPFRLTFSDDMESNLNRTFSLLKARGMIKSGDLGIALSDMLQSIQVMNVP

SEQ ID NO: 998 - DNA, 1584 bp, Oryza sativa
  CDS (1)..(1584)
atgcattcgacgaatctgctgctggaggagcccatcaggatggcatccatcctggagccatccaagcccagcttcttcccggcgatgaccaagatcgtggggacgctggggccaaagtcgcgctccgtcgacaccatctcctcctgcctcaaggccggcatgtcggtggcccgatttgatttctcgtggggagacgccgagtaccaccaggaaacccttgagaacctcaaggtcgccatcaagtccaccaagaagctctgcgcggtcatgcttgacacggtcggcccagagttgcaggtggtgaacaagagcgaagcctccatctccctcgaggagaacggcactgttattctcacccctgaccaggggcaggaggcctcctcacaagtgctgccaattaacttcgctgggcttgctaaggctgtgaagccaggtgacacaatatttgttgggcaatacttgttcacaggcagtgagactacttcagtttggttagaggtttctcaaattaaaggagatgatgtggtctgtgtgataaaaaacacagcaactctggctgggtcgctcttcacattgcattgctcgcagattcacatcgacttacctaccctatctgatgaggacaaggaggttatcagaaaatggggtgccccaaacaagattgacttcctctctctttcttatacaagacatgtagaagatgtgcgacaggcacgtgaattcctctcaaagttaggtgaccttagccagacccagatttttgcaaaaatcgagaatgtggaggggttgaataattttgatgaaatcctccaagaagctgatggtatcatcctgtcaagaggaaaccttggaattgatcttccacctgaaaaggtgtttttatttcaaaagtctgctctgcacaagtgcaacatggctggaaagcctgctgttgttactcgtgttgtagacagtatgactgacaacctcaggcctactcgtgcagaggctacggatgtggcaaatgcagtgcttgacgggagtgatgccattctccttggtgctgagactctgcgtggtttatacccagttgagactatttcaatagtgggcaaaatttgcgctgaggcagagaaggtattcaaccaagatttatacttcaagcggactgtgaaatatgttggggagcccatgacccacttggagtctatcgcttcttctgcggtgcgagctgctatcaaagtgaaggcttctgtcattatttgcttcacatcatctggacgcgctgcaagactaattgccaagtacaggcccaccatgcctgttctatctgttgtcattcctcgtctgaaaacaaaccaactgaggtggagtttcactggcgcatttgaagcaagacaatcactcatagttagaggtctctttccgatgcttgctgatcctcgccatccagctgaatcgaccagcgctaccaatgagtcagttttgaaggttgctcttgaccatggcaaagcttccggtgtgatcaagtcgcatgatcgcgttgttgtctgccagaaagtgggtgattcctcggttgtgaagatcattgagctggacgattag

SEQ ID NO: 999 - protein, 527 aa, Oryza sativa
MHSTNLLLEEPIRMASILEPSKPSFFPAMTKIVGTLGPKSRSVDTISSCLKAGMSVARFDFSWGDAEYHQETLENLKVAIKSTKKLCAVMLDTVGPELQVVNKSEASISLEENGTVILTPDQGQEASSQVLPINFAGLAKAVKPGDTIFVGQYLFTGSETTSVWLEVSQIKGDDVVCVIKNTATLAGSLFTLHCSQIHIDLPTLSDEDKEVIRKWGAPNKIDFLSLSYTRHVEDVRQAREFLSKLGDLSQTQIFAKIENVEGLNNFDEILQEADGIILSRGNLGIDLPPEKVFLFQKSALHKCNMAGKPAVVTRVVDSMTDNLRPTRAEATDVANAVLDGSDAILLGAETLRGLYPVETISIVGKICAEAEKVFNQDLYFKRTVKYVGEPMTHLESIASSAVRAAIKVKASVIICFTSSGRAARLIAKYRPTMPVLSVVIPRLKTNQLRWSFTGAFEARQSLIVRGLFPMLADPRHPAESTSATNESVLKVALDHGKASGVIKSHDRVVVCQKVGDSSVVKIIELDD

SEQ ID NO: 1000 - DNA, 1803 bp, Zea mays
  CDS (1)..(1803)
atgggacctcgagccggcgggaccgcaccgcatctccctcccattccactccagtccaccaccgctcccattccccagccgccgtcggccgtcgccatggccaccgccgcccactccctcctgcacacaccggaggcccacagggccgccacccgctcgcccttctctcctcccgcgcccactcccttcctccatctccgccctcaccgcctccccctccgcctccgctccacctccccgaccgcctccgacctcaccgccttccccccgaacccgaacgggatcttcgcgtccgaccggcccatcgacgtggacgccgccacggaggccgagctgcgggagaacgggttccggagcacgcgccgcaccaagctcgtctgcaccgtgggccccgccacctcgcgcccggaccagctcgaggcgctcgccgtcggcgggatgaacgtggcccggctcaacatgtgccacggcgacagggagtggcatagggccgccatccgcgccgtcaggagcctcaacgaggagaagggcttcgccgtcgccgtcatgatggacaccgagggcagcgagatccacatgggggacctcggcggcgcatcctcggtcaaggcggaggatggagaagtatggacgttcagtgttagatcatttgaattgcctctcccagaacgaactattaatgtgaactatgatggatttgctgaagatgtgagagttggtgatgagctccttgtggatggtggaatggctcggtttgaggtgattgagaagataggaccagatgttaagtgccgttgcacagatcctggtttattgttgccacgtgccaatcttacattctggcgtgacggcagtatcgtccgtgagaggaatgctatgcttcctacaatttcatcaaaggattggcttgacatagactttgggattgccgaaggtgtagatttcatcgctgtttcatttgtcaagtctgcagaagtaattaggcacttgaaaagctacatagctgcaaggagccgtggaagtgacatggcagtcattgcgaaaatcgagagcatcgactctctaaagaacctggaggagatcatccgagcgtcagacggcgccatggtagccagaggggacatgggggcgcaggttcccctggagcaggtcccctcgatacagcaaaagatcgttcagctctgcaggcagctgaacaagccggtcatcgtcgcctcccagctcctcgagtcgatgatagagtaccccacgcccaccagggccgaggtcgcggacgtctccgaagccgtccgccagcgcgccgacgccctgatgctttccggcgagtcggcaatggggaggtacccggacaaggctctcagcgttctgaggagcgtcagcctgaggatcgagaagtggtggagggaggagaagcggcacgaggcgctggagctccggagcgtctcgtcctccttctccgacaagatatcggaggagatctgcaactcagcagctaaaatggctaatggcctgggagtggacgccgtctttgtgttcaccaagaccgggcacatggcctccctgctctcgcggtgccgccccgactgcccggtcttcgccttcacgacgtcgacgtccgtcaggaggcggctgaacctgcagtggggcctgatccccttccgcctcgccttctcggacgacatggagagcaacctgaaccgcaccttctccctgctcaaggccaggggcatgatccagtctggggacctcgtgatcgccctctcggacatgctgcagtccatccaggtgatgaacgtaccctga

SEQ ID NO: 1001 - protein, 600 aa, Zea mays
MGPRAGGTAPHLPPIPLQSTTAPIPQPPSAVAMATAAHSLLHTPEAHRAATRSPFSPPAPTPFLHLRPHRLPLRLRSTSPTASDLTAFPPNPNGIFASDRPIDVDAATEAELRENGFRSTRRTKLVCTVGPATSRPDQLEALAVGGMNVARLNMCHGDREWHRAAIRAVRSLNEEKGFAVAVMMDTEGSEIHMGDLGGASSVKAEDGEVWTFSVRSFELPLPERTINVNYDGFAEDVRVGDELLVDGGMARFEVIEKIGPDVKCRCTDPGLLLPRANLTFWRDGSIVRERNAMLPTISSKDWLDIDFGIAEGVDFIAVSFVKSAEVIRHLKSYIAARSRGSDMAVIAKIESIDSLKNLEEIIRASDGAMVARGDMGAQVPLEQVPSIQQKIVQLCRQLNKPVIVASQLLESMIEYPTPTRAEVADVSEAVRQRADALMLSGESAMGRYPDKALSVLRSVSLRIEKWWREEKRHEALELRSVSSSFSDKISEEICNSAAKMANGLGVDAVFVFTKTGHMASLLSRCRPDCPVFAFTTSTSVRRRLNLQWGLIPFRLAFSDDMESNLNRTFSLLKARGMIQSGDLVIALSDMLQSIQVMNVP

SEQ ID NO: 1002 - DNA, 1584 bp, Triticum aestivum
  CDS (1)..(1584)
atgcattccaccaatctgctcctcgaggagcccatccggatggtctccatcctcgagccatccaagccgaacttcttcccggcgatgacgaagatcgtggggacgctgggtcccaagtcccggtccgttgaggccatctccgcctgtctaaaggccggcatgtctgtggcccgtttcgatttctcgtggggggatgccgcgtaccaccaggagacactcgagaacctcaagctcgccatcaaggccaccaagaagctatgtgctgttatgctcgacactgttggccctgagttgcaagtggtgaacaagagtgaagtcacaatctcgcttgaagagaacgagtctgttgttctcacccctcacaagggccaggaggcctcttccaagttgctccctatcaacttcgctggactcgccaaggctgtgaagcccggagccacaatattcgttgggcaatatttgttcacgggcagtgagactacatcagtttggctggaggtttctgaagttcaaggggatgacgtggtttgcgtgatcaagaactcagctaccctggctgggtcactcttcacattgcactgctcccagatccatatcgacatgcccacgctgtctgatgaggataaagatgttatgaaaaaatggggtgctccaaacaagattgacttcctctctctttcttatacaaggcacgcagaagatgtgcggcaagcacgggagttcctctctaagttaggtgatcttagccaaactctgatttttgccaaaattgagaatgtggagggcttgaaccattttgatgagatcctggaggaagcggatggtatcattctgtcaagagggaaccttggaattgatcttccacctgaaaaggtgttcttatttcagaagtctgctctgcacaagtgcaacatggctggaaagcctgctgttgttactcgtgttgtggacagtatgacggacaacctaaggcctactcgtgcggaggcaactgatgtggcaaatgcggtgctggatggtagtgatgccattctccttggtgccgagactctccgtgggttgtatccagttgagactatttcaacagtgggcagaatttgtgctgaggctgagaaggtcttcaaccaagatttgtactttaagcgaactgtgaaatatgtgggagaacccatgacccacttggagtctattgcttcctctgcagtgcgggctgctattaaagttaaggcttcggtcatcatttgcttcacctcatctggacgggctgcaaggctaattgccaagtacaggcccaccatgcctgtcctctctgttgtcattcctcgtctgaaaacaaatcaattgaagtggagcttcacaggtgcatttgaggcaagacaatcactcatagttagaggtctctttcccatgcttgccgatccacgtcatccggctgaatctactagcactacaaatgaatcagtgttgaaggttgctcttgaccacggcaaagcatctggtgtgatcaagtcgcatgaccgcgtcgtcgtgtgccagaaagtgggagattcctctgtcgtgaagatcattgagctggacgactag

SEQ ID NO: 1003 - protein, 527 aa, Triticum aestivum
MHSTNLLLEEPIRMVSILEPSKPNFFPAMTKIVGTLGPKSRSVEAISACLKAGMSVARFDFSWGDAAYHQETLENLKLAIKATKKLCAVMLDTVGPELQVVNKSEVTISLEENESVVLTPHKGQEASSKLLPINFAGLAKAVKPGATIFVGQYLFTGSETTSVWLEVSEVQGDDVVCVIKNSATLAGSLFTLHCSQIHIDMPTLSDEDKDVMKKWGAPNKIDFLSLSYTRHAEDVRQAREFLSKLGDLSQTLIFAKIENVEGLNHFDEILEEADGIILSRGNLGIDLPPEKVFLFQKSALHKCNMAGKPAVVTRVVDSMTDNLRPTRAEATDVANAVLDGSDAILLGAETLRGLYPVETISTVGRICAEAEKVFNQDLYFKRTVKYVGEPMTHLESIASSAVRAAIKVKASVIICFTSSGRAARLIAKYRPTMPVLSVVIPRLKTNQLKWSFTGAFEARQSLIVRGLFPMLADPRHPAESTSTTNESVLKVALDHGKASGVIKSHDRVVVCQKVGDSSVVKIIELDD

SEQ ID NO: 1004 - DNA, 1698 bp, Triticum aestivum
  CDS (1)..(1698)
atggcggcggcggcggcggagatggtgcgcgggttcgccgcgacggcgcgcgcggccaggccggccgcgacggtggcggcgcccccgcagcccaggcgggcggtcgccgcgcgggtgctgcggacctccgcctccgagaaggtggcggcggatctctccgtcgccgggaccaacggctccctctccgccctgagcaatactgatgtcagtactgacgccacctcacaagcagtggatgcgactcccaggaggaagacaaagatagtctgcaccataggcccctcgaccaacactcgtgagatgatatggaagcttgcagagactggaatgaatgttgcgcgtatgaatatgtcccatggagaccaccagtcacaccaaaaagtgattgatttggtcaaggagtacaacgcacagaacactgatggcaatactgttgctattatgctggacacaaagggtccggaagtgcgaagtggggatcttcctgagccaatcatgcttgcggaaggtcaagagttcaatttcacgattaaaagaggggtgagcaccgaagacactgtcagcgtgaattatgatgacttcataagcgatgttgaagctggtgacatactgttggtggatggaggaatgatgtcgcttgctgtgaagtcgaaaacagctgacacagtcaagtgtgtagtagtcgatggtggggagttgaaatcaaggcgccaccttaatgtgcgcggaaagagcgcaactctgccatctataacagagaaggattgggaagatatcaagtttggcgtcgaaaatggtgttgatttctatgctgtttcgtttgtgaaggatgccaaagttattcatgaactcaaggcttacctgaaaagtgctaatgcggatatacatgttattccaaaaattgagagtgctgattcaatcccaaacctccagtccattattgctgcttcagatggggcaatggtggctcgtggagatcttggtgctgaacttccaattgaggaagttcctttactacaggaggagattatcagaacatgccgaagcatgcagaaaccagtaattgttgcaacaaatatgttagaaagcatgatagatcatccaactccaacaagggctgaagtctctgatatagccattgctgttcgggaggctgctgatgccattatgctatctggtgaaactgcccatgggaagtacccattgaaggcagtgaaggtgatgcacactgtggcacttagaacagaatccagcctgtacgacccaactaaagctcccagtcttgttgcacgcccaaaggcgctgctcaatgatgacttctgcaaaagccaattaagtaaaatgtttggatctcatgctacaatgatggcgaacacccttcgtacaccgatcattgtgtttacacgtgtgggctccatggctgtccttctgagccactaccgtccctcgtccaccatatatgcattcactaatgaagtacgagtgaagcaacgactggcactctatcagggcgtggttcctattctcatggagttctcagatgacgcggaagagactttctcaagagcaattaccagcttgctggatgcgaaatacatgaatgaaggggactatgtcaccctcgttcagagcgggtcgcagtcgatctggagagaagaatctacccaccacatacaagtgaggaaagtccagtgctga

SEQ ID NO: 1005 - protein, 565 aa, Triticum aestivum
MAAAAAEMVRGFAATARAARPAATVAAPPQPRRAVAARVLRTSASEKVAADLSVAGTNGSLSALSNTDVSTDATSQAVDATPRRKTKIVCTIGPSTNTREMIWKLAETGMNVARMNMSHGDHQSHQKVIDLVKEYNAQNTDGNTVAIMLDTKGPEVRSGDLPEPIMLAEGQEFNFTIKRGVSTEDTVSVNYDDFISDVEAGDILLVDGGMMSLAVKSKTADTVKCVVVDGGELKSRRHLNVRGKSATLPSITEKDWEDIKFGVENGVDFYAVSFVKDAKVIHELKAYLKSANADIHVIPKIESADSIPNLQSIIAASDGAMVARGDLGAELPIEEVPLLQEEIIRTCRSMQKPVIVATNMLESMIDHPTPTRAEVSDIAIAVREAADAIMLSGETAHGKYPLKAVKVMHTVALRTESSLYDPTKAPSLVARPKALLNDDFCKSQLSKMFGSHATMMANTLRTPIIVFTRVGSMAVLLSHYRPSSTIYAFTNEVRVKQRLALYQGVVPILMEFSDDAEETFSRAITSLLDAKYMNEGDYVTLVQSGSQSIWREESTHHIQVRKVQC

SEQ ID NO: 1006 - DNA, 1542 bp, Triticum aestivum
  CDS (1)..(1542)
atggtgtccaacggggagctgtcgcagccgcaggcgggggagtacggcctcgccgtgatgcgccgccggcccaagaccaagatcgtctgcacgctcggcccggcctcgcgctccgtcgacatgatcgagaagctgctgcgcgccggcatgtgcgtcgcccgcttcaacttctcccacggctcccacgactaccaccaggagacgctcgacaacctgcacgccgccatggagcgcaccgggatcctctgcgccgtcatgctcgacaccaagggtccagagatccgtactggatttttgaaagatgggaagcctatccagttgagaaagggccaagaaattgtgatctccacagattatagcataaagggggacgacaagatgatatcgatgagctataagaagctagcagttgatctgaagccaggcagtgtcatattatgcgctgatggtaccatcactcttactgtgcttcattgtgacaaagagcaaggtcttgttcgctgctgttgtgagaacactgctatgcttggtgagaggaagaatgtcaatcttccaggggtcgttgttgatctcccaacactcactgaaaaggacaaggaggatatccttcaatggggtgtcccgaacaagattgacatgattgctttgtcgtttgtccgcaaaggttcagatcttgtggaggtcaggaaggtacttggggagcatgccaagtcaataatgctgatgtcaaaggttgagaaccaggaaggagtagctaactttgacgatatcctggcacagtctgatgcttttatggtggcaagaggtgatttggggatggaaattcctgtagagaagatcttttatgcacagaaggtgatgattttcaagtgcaacattcagggcaagccagttgtgaccgcaactcagatgttggagtctatgatcaagtctcctcgccctactcgagctgaagcaaccgatgttgccaatgcagttcttgatggcactgactgtgtcatgctcagtggtgagacagctgctggagcttatccagaactggcagtgcaaactatggccaagatctgcttgcaggccgagtcatgtgtggactattctgctgtttttaaatcaatcatgtcatcagccccaattcccatgagcccattggagagccttgcctcatcagctgtccgcacagcgaactcagccaaggcgacgcttatcttggtactgaccaggggaggaacaactgcaaggcttgtagccaagtataggccatccatgccgatactgtctgtcgtggttcctgagctcaagacggtcgagtttgactggatctgcagcgacgaggggcctgccaggcaaagccttatcgtgaggggtgtgatccctatgctgagtgctggcactgccaaggcgtttgacagcgaagccacggaagaggcgctgaggtttgccatgaagaacgccaaggagatggggctttgcaacgctggtgagtccattgtggcccttcaccgcatcgggaatgcatctgtcatcaagctcttgaccgtgtaa

SEQ ID NO: 1007 - protein, 513 aa, Triticum aestivum
MVSNGELSQPQAGEYGLAVMRRRPKTKIVCTLGPASRSVDMIEKLLRAGMCVARFNFSHGSHDYHQETLDNLHAAMERTGILCAVMLDTKGPEIRTGFLKDGKPIQLRKGQEIVISTDYSIKGDDKMISMSYKKLAVDLKPGSVILCADGTITLTVLHCDKEQGLVRCCCENTAMLGERKNVNLPGVVVDLPTLTEKDKEDILQWGVPNKIDMIALSFVRKGSDLVEVRKVLGEHAKSIMLMSKVENQEGVANFDDILAQSDAFMVARGDLGMEIPVEKIFYAQKVMIFKCNIQGKPVVTATQMLESMIKSPRPTRAEATDVANAVLDGTDCVMLSGETAAGAYPELAVQTMAKICLQAESCVDYSAVFKSIMSSAPIPMSPLESLASSAVRTANSAKATLILVLTRGGTTARLVAKYRPSMPILSVVVPELKTVEFDWICSDEGPARQSLIVRGVIPMLSAGTAKAFDSEATEEALRFAMKNAKEMGLCNAGESIVALHRIGNASVIKLLTV

SEQ ID NO: 1008 - DNA, 1584 bp, Triticum aestivum
  CDS (1)..(1584)
atgcattccaccaatctgctcctcgaggagcccatccggatggtctccatcctcgagccatccaagccgaacttcttcccggcgatgacgaagattgtggggacgctgggtccgaagtcccggtccgttgaggccatctccgcctgtctaaaggccggcatgtctgtggcccgtttcgatttctcgtggggggatgccgcgtaccaccaggagacactcgagaacctcaagctcgccatcaaggccaccaagaagctatgtgctgttatgctcgacactgttggccctgagttgcaagtggtgaacaagagtgaagtcacaatctcgcttgaagagaacgagtctgttgttctcacccctcaccagggccaggaggcctcttccaagttgctccctatcaacttcgctggactcgccaaggctgtgaagcccggagccacaatattcgttgggcaatatttgttcacgggcagtgagactacatcagtttggctggaggtttctgaagttcaaggggatgacgtggtttgcgtgatcaagaactcagctaccctggctgggtcactcttcacattgcactgctcccagatccatatcgacatgcccacgctgtctgatgaggataaagatgttatgaaaaaatggggtgctccaaacaagattgacttcctctctctttcttatacaaggcatgcagaagatgtgcggcaagcacgggagttcctctctaagttaggtgatcttagccaaactctgatttttgccaaaattgagaatgtggagggcttgaaccattttgatgagatcctggaggaagcggatggtatcattctgtcaagagggaaccttggaattgatcttccacctgaaaaggtgttcttatttcagaagtctgctctgcacaagtgcaacatggctggaaagcctgctgttgttactcgtgttgtggacagtatgacggacaacctaaggcctactcgtgcggaggcaactgatgtggcaaatgcggtgctggacggtagtgatgccattctccttggtgctgagactctccgtgggttgtatccagtcgagactatttcaacagtgggcagaatttgtgctgaggctgagaaggtcttcaaccaagatttgtatttcaagcgaaccgtgaaatatgtgggagaacccatgacccacttggagtctattgcttcctctgcagtgcgggctgctattaaagttaaggcttcggtcatcatttgcttcacttcatctggacgggctgcaaggctaattgccaagtacaggcccaccatgcctgtcctgtccgttgtcattcctcgtctgaaaacaaatcaattgaagtggagcttcacaggtgcatttgaggcaagacaatcactcatagttagaggcctctttcccatgcttgctgatccacgtcatccggctgaatctactagcactacaaatgaatcagtgttgaaggttgctcttgaccacggcaaagcatctggtgtgatcaagtcgcatgaccgtgtcgtcgtgtgccagaaagtgggagattcctctgtcgtgaagatcattgagctagacgactag

SEQ ID NO: 1009 - protein, 527 aa, Triticum aestivum
MHSTNLLLEEPIRMVSILEPSKPNFFPAMTKIVGTLGPKSRSVEAISACLKAGMSVARFDFSWGDAAYHQETLENLKLAIKATKKLCAVMLDTVGPELQVVNKSEVTISLEENESVVLTPHQGQEASSKLLPINFAGLAKAVKPGATIFVGQYLFTGSETTSVWLEVSEVQGDDVVCVIKNSATLAGSLFTLHCSQIHIDMPTLSDEDKDVMKKWGAPNKIDFLSLSYTRHAEDVRQAREFLSKLGDLSQTLIFAKIENVEGLNHFDEILEEADGIILSRGNLGIDLPPEKVFLFQKSALHKCNMAGKPAVVTRVVDSMTDNLRPTRAEATDVANAVLDGSDAILLGAETLRGLYPVETISTVGRICAEAEKVFNQDLYFKRTVKYVGEPMTHLESIASSAVRAAIKVKASVIICFTSSGRAARLIAKYRPTMPVLSVVIPRLKTNQLKWSFTGAFEARQSLIVRGLFPMLADPRHPAESTSTTNESVLKVALDHGKASGVIKSHDRVVVCQKVGDSSVVKIIELDD

SEQ ID NO: 1010 - DNA, 1728 bp, Zea mays
  CDS (1)..(1728)
atggcggcgcaggtggtcgcagcggcgggcaccccggtggccaggccgctgggcggcggatctggggccgacgcgctccggccagcggcaacgatgccaagggagagaaggaccggtgctgtggccgcgagaggacgccgcgagtctcaggtggtatccgtcataagccgcgccccacgccccgatgccggggtgctgccggtgtcgcccgacgacgacgcggccgtaaaggaagaagcaaacttccagcaccttaaggctatccagcaacttgcaactgcagcaaatggcgtgtggtctaaaccaaatgtaaggcgcaagacaaagattgtgtgtacaatcggtccttcaaccaacacaagggacatgatatggaaactcgctgagactggcatgaatgtggctcggcttaatatgtcacatggagaccatgcatcacaccagaaagttattgatctggtaaaggagtacaatgcatcacatgctgacaatgtgattgctatcatgcttgacacaaagggaccagaagttcgaagtggagatttgcctcaaccgatatttctggaaagcggacaagaatttacttttacaatcaaaaggggagttgggactgatacgtgtgttagcgttaactatgacgactttgttaatgatgttgaagtgggcgacatgctccttgtagatggaggaatgatgtcattcttggtcaaatcaaaaactgaagattctgtgaaatgtgaagttattgacggtggtgaattgaaatctaggcgccatctgaatgttcgtggaaagagtgcaaccttgccatcaataactgacaaggactgggacgacattaagtttggtgtggataatcaagttgattactatgctgtttcttttgtgaaggatgctcaagttgtccacgaactcaaggattatctaaaaagttgcaatgctgacatacatgttatcgtaaaaatagaaagtgcagactccatccccaacttacattcaatcatcacagcatctgatggggctatggttgccaggggtgaccttggagctgagctgcccattgaggaggtgccgctgttgcaggaagaaattattagaatgtgcaggagcatggggaaggctgttattgttgctacaaatatgctcgaaagtatgattgttcatccaactccaacccgagcagaagtttcagacattgctatagctgtccgagagggtgctgatgcagttatgctttcaggagaaactgcacatgggaaatttcccttgaaagctgttaaggtcatgcacactgttgccctgagaaccgaggcaactattcctggtggggaaacacctgcagaccttggtcaggctttcaagaaccacatgagcgaaatgttcgcataccatgcgacaatgatgtcaaatacccttcgaacatcaatagtggttttcactaggacgggatttatggctatactgcttagtcactaccgtccatctggcactatttttgccttcacagacgaggagagagttaggcaacgattggctttgtaccaaggtgtatgtccggttcaaatggaattttctgatgatgctgagaagacatttggcaatgctttgtcttatttgctgaaacatggtatggttaaggacggtaaggaggttgcacttgttcaaagtggtaaacatcccatctggagatcacaatcaacacacaacattcaggtgaggaagatctga

SEQ ID NO: 1011 - protein, 575 aa, Zea mays
MAAQVVAAAGTPVARPLGGGSGADALRPAATMPRERRTGAVAARGRRESQVVSVISRAPRPDAGVLPVSPDDDAAVKEEANFQHLKAIQQLATAANGVWSKPNVRRKTKIVCTIGPSTNTRDMIWKLAETGMNVARLNMSHGDHASHQKVIDLVKEYNASHADNVIAIMLDTKGPEVRSGDLPQPIFLESGQEFTFTIKRGVGTDTCVSVNYDDFVNDVEVGDMLLVDGGMMSFLVKSKTEDSVKCEVIDGGELKSRRHLNVRGKSATLPSITDKDWDDIKFGVDNQVDYYAVSFVKDAQVVHELKDYLKSCNADIHVIVKIESADSIPNLHSIITASDGAMVARGDLGAELPIEEVPLLQEEIIRMCRSMGKAVIVATNMLESMIVHPTPTRAEVSDIAIAVREGADAVMLSGETAHGKFPLKAVKVMHTVALRTEATIPGGETPADLGQAFKNHMSEMFAYHATMMSNTLRTSIVVFTRTGFMAILLSHYRPSGTIFAFTDEERVRQRLALYQGVCPVQMEFSDDAEKTFGNALSYLLKHGMVKDGKEVALVQSGKHPIWRSQSTHNIQVRKI

SEQ ID NO: 1012 - DNA, 1707 bp, Zea mays
  CDS (1)..(1707)
atggcggcagcggcggagatcggtggtttcgcggcggcgagagtggcggtggcgacgctcaggccggctgcgcacccagccccggcggcggcaccgcagcagcctaggagggcggtggcggcgcagtcgctgcggacgaccgccaccgaggcgctgacggcggatctcgccggcacgaccaacggcgctgtgcatgctcggatgaatagtaaggctacaagtgaaatcacttcacaggcagttactgcaaattctaggagaaagacaaagatagtctgcaccataggtccctcaaccaacactcgtgagatgatttggaagcttgcagagactggaatgaatgtagcacgccttaatatgtcccatggtgaccaccagtcgcaccagaaggttattgatttggtcaaggagtacaatgcacagaacactgatggcaatgttattgccattatgctggacacaaagggtcctgaagttagaagtggggatgttccagagccaatcatgctcaaggaaggtcaagagttcaacttcacgattaaaagaggggtgagcactgaagacactgtcagcgtgaactatgatgacttcataaatgatgttgaagctggcgacatactattagtggatggaggaatgatgtcgcttgctgtgaagtctaaaacagccgatacagtcaagtgtaaagtagttgatggtggggaattgaaatcacggcgccacctaaatgtccgtggaaagagtgctactttgccatctatcactgagaaggattgggaagacataaaatttggtgtcgaaaacggtgttgatttctatgcagtttcctttgtgaaggatgccaaagttatccatgaattaaaagactaccttaaaagtgctaatgccgatatacatgtcattccaaaaattgaaagtgcagattcaataccaaacctgcagtccattattgctgcttcagatggggcaatggtggcgcgtggagaccttggtgctgaacttccgattgaggatgttcctttgctacaggcagagattgtccaaacatgtcgaagcatggagaaaccagtcattgtcgctacaaatatgttggaaagcatgattgaccatcctactcccactagggcagaagtttctgacatagctattgcagttcgggaaggtgctgatgccatcatgttatctggcgaaactgctcatggaaagtatccactaaaggcagtcaaggtgatgcacactgtggcactcagaacagaatccagcctttataacccaactacttctcctagtcttgttgcatctgcacagggtctacagaatgaggacttctccccaagccagctaagtaaaatgttcggatctcatgcaacgatgatggccaacacccttcgcacaccaatcattgtatttacacagacaggctccatggctgtcctcctgagccattatcgtccctcgtctacactatttgcatttacaaacgaggaacgagtgaagcaacggctagcactctaccagggcgtcatccctattcacatgcagttctctgacgacgcagaagaaactttctccagagcaattagcagcttgctgaaagcacaatatgtgaagaagggagactacgtcactcttgttcagagcggagtgacttcaatctggagagaggaatccactcaccacatccaagtgaggaaagttcaggtctga

SEQ ID NO: 1013 - protein, 568 aa, Zea mays
MAAAAEIGGFAAARVAVATLRPAAHPAPAAAPQQPRRAVAAQSLRTTATEALTADLAGTTNGAVHARMNSKATSEITSQAVTANSRRKTKIVCTIGPSTNTREMIWKLAETGMNVARLNMSHGDHQSHQKVIDLVKEYNAQNTDGNVIAIMLDTKGPEVRSGDVPEPIMLKEGQEFNFTIKRGVSTEDTVSVNYDDFINDVEAGDILLVDGGMMSLAVKSKTADTVKCKVVDGGELKSRRHLNVRGKSATLPSITEKDWEDIKFGVENGVDFYAVSFVKDAKVIHELKDYLKSANADIHVIPKIESADSIPNLQSIIAASDGAMVARGDLGAELPIEDVPLLQAEIVQTCRSMEKPVIVATNMLESMIDHPTPTRAEVSDIAIAVREGADAIMLSGETAHGKYPLKAVKVMHTVALRTESSLYNPTTSPSLVASAQGLQNEDFSPSQLSKMFGSHATMMANTLRTPIIVFTQTGSMAVLLSHYRPSSTLFAFTNEERVKQRLALYQGVIPIHMQFSDDAEETFSRAISSLLKAQYVKKGDYVTLVQSGVTSIWREESTHHIQVRKVQV

SEQ ID NO: 1014 - DNA, 1608 bp, Zea mays
  CDS (1)..(1608)
atgctcctggaggagcccttccgcctcgcctccgtcctctcccccgccaagcctaaagtattcccatcactcaccaagatagttgggacgctcgggcccaattcacactcggttgagattattcaggaatgcctcactgctggaatgtcagttgcacggtttgatttctcatggatggatgctgcgtatcaccaggagacccttgataatttgaggaaagcggcacagaatgtgaagaagttgtgccctgctagagttgaaacccaacaaaaaccacaagtcaaggttcaggtaatgttggatactcttggtccagaaattcaggttcacaattccactggtgagccaattgagttgaaagctgggaatcatgttatcataactccagatatttgtaaagctctctctgctgagatcctaccaattaagtttggtgatcttgcaaaagctgtgaagaagggtgatactctttttatgggccaatatctcttcacaggaagtgaaacaacatctgtctggctagaagttgtggaaacttctggggaaaatgtaaattgtctagtgaagaatgcagctacacttgacggccccatattcactctgcatgcttcacaagttcacatcaatttgcccactttgagtgaatatgataaacatgtcatttcaacttggggttcatgtaacagtgttgacattatatcactttcccatacccgctctgctgaagatgtcagggagctcagggcctttttacaagcacacgcccttcccgacacacaaatatacgcgaagattgaaaattcagagggtttggatcattttgatgacattctcaacgcggcagatggtatcattatttctcgaggagacctgggtattgaccttcctccagaaaacgttttcatgttccaaaagacagctattcataaatgcaatttggagggtaaacctgtgatcatcactagagttgtggacagcatgattgacaatctacgccctacccgtgcagaggcaactgatgttgcaaatgctgtcctagatggcactgatggcattttgcttggtgcggagacacttcgagggctttatcctgttgatgcagtgagtactgtggggagaatatgtgcagaagctgagactgtgtataatcagccgcttcaattcaagaaagtaatgtggcatgtaggtgacccaatgccccacgaggaatctgtggcatcagcagcggttggttctgcaatcaaagtaaaagctgctgccattgttgtgttcacattctcagggagagctgcgaggttagttgccaagtataggccaacaatgccaattttagcagttatcttcccacgtgaaggatccgatccatcaaagtggcgttcttatggcacaacacaggcaagacaatgtttcgcagtgagaggcgtgtaccctttgatggggagtactgatgaggccgaaactggtgggctaacaaaggaagagtatgggataaaacttgcgatgagctatggtcggtcggttggcatagtgaagcctttcgacaggttgataatctttgaaaagattggtgattcttctgttgtcaagatcattgagtgtgaaggttag

SEQ ID NO: 1015 - protein, 535 aa, Zea mays
MLLEEPFRLASVLSPAKPKVFPSLTKIVGTLGPNSHSVEIIQECLTAGMSVARFDFSWMDAAYHQETLDNLRKAAQNVKKLCPARVETQQKPQVKVQVMLDTLGPEIQVHNSTGEPIELKAGNHVIITPDICKALSAEILPIKFGDLAKAVKKGDTLFMGQYLFTGSETTSVWLEVVETSGENVNCLVKNAATLDGPIFTLHASQVHINLPTLSEYDKHVISTWGSCNSVDIISLSHTRSAEDVRELRAFLQAHALPDTQIYAKIENSEGLDHFDDILNAADGIIISRGDLGIDLPPENVFMFQKTAIHKCNLEGKPVIITRVVDSMIDNLRPTRAEATDVANAVLDGTDGILLGAETLRGLYPVDAVSTVGRICAEAETVYNQPLQFKKVMWHVGDPMPHEESVASAAVGSAIKVKAAAIVVFTFSGRAARLVAKYRPTMPILAVIFPREGSDPSKWRSYGTTQARQCFAVRGVYPLMGSTDEAETGGLTKEEYGIKLAMSYGRSVGIVKPFDRLIIFEKIGDSSVVKIIECEG

SEQ ID NO: 1016 - DNA, 1629 bp, Zea mays
  CDS (1)..(1629)
atggctgcctccgccaggactaccagctcgttgccctacctagtcgccgtctcctcccccgcggctcaccgccacggggccagccacccgatccgcgcctcggtgggggaggcgacaatggacgtggtgtcggaggcggagctgcgggagaaagggttcttggggatgcggaaaacgaaactggtgtgcacggtggggcccgcctgcgtcgaggcgctgccggcgctggcgcgcggcgggatgggcgtggcgcggatcaacctctgccacggtggccgggagtggcatcgtgccgccatgcgctctgtgcggaggctcaacgaggagggaggattctgcgtgacgcttatggtcgacaccgagggttcccagctcctcgtcgcggaccacggaggcgccacctcagtcaaggccgaggatgggtcagagtggatatttacaaacaaaaaagctgatgaagcccatcagttcacaatgcatgtgaattttgataagttttctgaaggcattttggttggtgatgagcttgtaatagatggtggaatggcaacatttgaagttactgagaaaataggaaatgatttgcgctgtaagtgcacggacccaggtttgcttcttcctcgagccaaattgtcattctggaggaacggaaaaatagttcaaaggaactttggccttcctacattgtcaacaaaggattgggctgacatcgaatttgggatagctgaaggagttgattgcattgctctatcatttgtaaatgatgctaatgatataaagcagttgaaagcttacctctctagaagatcgttagagcacatcaaagtatttgcaaagattgagagtctagaatctctcaagaacctgaaagacatcatagaggcatctgatggagttatggtagcacgaggggatcttggagttcagattcctcttgaacagatcccagccattcaagaatcaattgttaaactatgtagacacctgaacaagcctgtgatagttgcttctcagcttctcgaatcaatggttgaatacccaacaccaactcgagcagaggtggccgatgtttcggaagcagtgcggcaatatgcagacgctgtgatgctatcagcagagtcagctataggtgcatatccccaaaaagcgctatctgtacttcgtgcagccagtgaaaggatggaatcatggagccgtgaggaaaacatgcagaaacttcttccacggcatcagcttgcaattgcattgcctgaccggatctcagagcagatttgcagctgtgctgtagaaatggcaaacaaccttgctgtggatgccatatttgtctacacaaagcatggtcacatggcatcacttctatcgcgcaaccgacccaaccctcccatattcgcgttcactgataatgccaattcaagaaagagcatgaacctctactggggagtgattccacttcatctaccattgtcaaatagcatggaggataacttcaacaaaaccatcagcctgatgaggtcgaagggttcagtgaaacccggagacacggtcttggtggtatcagattctgatctaaaccaaccttgtgctgccacctcggtgttccaatccattcaggtccggctagtggagtag

SEQ ID NO: 1017 - protein, 542 aa, Zea mays
MAASARTTSSLPYLVAVSSPAAHRHGASHPIRASVGEATMDVVSEAELREKGFLGMRKTKLVCTVGPACVEALPALARGGMGVARINLCHGGREWHRAAMRSVRRLNEEGGFCVTLMVDTEGSQLLVADHGGATSVKAEDGSEWIFTNKKADEAHQFTMHVNFDKFSEGILVGDELVIDGGMATFEVTEKIGNDLRCKCTDPGLLLPRAKLSFWRNGKIVQRNFGLPTLSTKDWADIEFGIAEGVDCIALSFVNDANDIKQLKAYLSRRSLEHIKVFAKIESLESLKNLKDIIEASDGVMVARGDLGVQIPLEQIPAIQESIVKLCRHLNKPVIVASQLLESMVEYPTPTRAEVADVSEAVRQYADAVMLSAESAIGAYPQKALSVLRAASERMESWSREENMQKLLPRHQLAIALPDRISEQICSCAVEMANNLAVDAIFVYTKHGHMASLLSRNRPNPPIFAFTDNANSRKSMNLYWGVIPLHLPLSNSMEDNFNKTISLMRSKGSVKPGDTVLVVSDSDLNQPCAATSVFQSIQVRLVE

SEQ ID NO: 1018 - DNA, 1584 bp, Zea mays
  CDS (1)..(1584)
atgctttcgaccaacctgctgctggaggagcccatccggagggcctccatcctggagccatccaagaccagcttcttcccggcgaagaccaagatcgtcggcacgctcggccccaagtcgcgctccgtcgacaccatctcctcctgcctcaaggccggcatgtccgtcgcgcggttcgatttctcgtggggagacgccgcctaccaccaggagacgctcgagaacctcaagctcgccatcaagtccaccaagaagctgtgcgctgttatgctcgacacggttggaccggagctgcaggtggtcaacaagagtgaaacccccatctccctcgaggagaacgggactgtcgtgctcacgccgcatcagggccaagaagcctcctccaccttgctgcccatcaacttcgatggactcgccaaggctttgacaccaggtgcaacgatatttgtgggccaatacttgttcactggtagcgagactacttcagtttggttggaggtttctgaagttaaaggagatgatgtggtttgtatcatcaagaacacagctaccttggctgggtcgctcttcacgcagcattgttcccagattcatattgacttgcccacgctgtctgatgaggataaggatgttatcaaaaaatggggtgctccaaataagattgacttcctctctctgtcttacacaagacatgcagaagatgtgcggcaggcacgtgagttcctctcgaaattgggtgatcttagccaaactcagatctttgccaaaattgagaatgttgagggcttgaaccattttgatgaaatactggcagaggcagatggtatcattctgtcaagaggaaaccttggaattgaccttccacctgagaaggtctttttgtttcaaaagtctgcgcttcacaagtgcaacatggctggaaagcctgctgttgttactcgtgtcgtggacagcatgactgacaacctcagacctactcgcgcagaggcaactgatgtggcaaatgcagttcttgatgggagtgacgccattctccttggtgctgagactctccgtggtttatatccggtggagactatttcaacagtgggcagaatttgtgctgaggctgagaaggtattcaaccaagatttatactacaagcggactgtgaagtatgtgggagaacctatgacccacttggagtctattgcttcttcagcagtgcgagctgcaatcaaagttaaggcatcagtcatcatttgcttcacctcttctggacgagctgcaaggctcattgctaagtacaggcccagcatgcctgttttgtctgttgtcattcctcgtctaaagacaaaccaactgaggtggagtttcacaggtgtttttgaggcaagacaatcactcatagttagaggcctcttccctatgcttgctgatccacgacacccagctgaatctaccagtgctacaaatgagtctgtgttgaaggttgctcttgaccatggcaaagcctcgggcgtgatcaagtcccacgaccgcgtcgtcgtttgccagaaagtgggtgattcctctgtggtgaagatcattgagctggatgattag

SEQ ID NO: 1019 - protein, 527 aa, Zea mays
MLSTNLLLEEPIRRASILEPSKTSFFPAKTKIVGTLGPKSRSVDTISSCLKAGMSVARFDFSWGDAAYHQETLENLKLAIKSTKKLCAVMLDTVGPELQVVNKSETPISLEENGTVVLTPHQGQEASSTLLPINFDGLAKALTPGATIFVGQYLFTGSETTSVWLEVSEVKGDDVVCIIKNTATLAGSLFTQHCSQIHIDLPTLSDEDKDVIKKWGAPNKIDFLSLSYTRHAEDVRQAREFLSKLGDLSQTQIFAKIENVEGLNHFDEILAEADGIILSRGNLGIDLPPEKVFLFQKSALHKCNMAGKPAVVTRVVDSMTDNLRPTRAEATDVANAVLDGSDAILLGAETLRGLYPVETISTVGRICAEAEKVFNQDLYYKRTVKYVGEPMTHLESIASSAVRAAIKVKASVIICFTSSGRAARLIAKYRPSMPVLSVVIPRLKTNQLRWSFTGVFEARQSLIVRGLFPMLADPRHPAESTSATNESVLKVALDHGKASGVIKSHDRVVVCQKVGDSSVVKIIELDD

SEQ ID NO: 1020 - DNA, 1728 bp, Zea mays
  CDS (1)..(1728)
atggcggcgcaggtggtcgcagcggcgggcaccccggtggccaggccgctgggcggtggatctggggccgacgcgctccggcccgcggcgaggatgccaagggagagaaggaccggtgctgtggccgcgagaggacgccgcgagtctcaggtggtatccgtcataagccgcgccccacgccccgatgccggggtgctgccggtgtcgcccgacgacgacgcggccgtaaaggaagaagcaaacttccagcaccttaaggctatccagcaacttgcaactgcagcaaatggcgtgtggtctaaaccaaatgtaaggcgcaagacaaagattgtgtgtacaatcggtccttcaaccaacacaagggacatgatatggaaactcgctgagactggcatgaatgtggctcggcttaatatgtcacatggagaccatgcatcacaccagaaagttattgatctggtaaaggagtacaatgcatcacatgctgacaatgtgattgctatcatgcttgacacaaagggaccagaagttcgaagtggagatttgcctcaaccgatatttctggaaagcggacaagaatttacttttacaatcaaaaggggagttgggactgatacgtgtgttagcgttaactatgacgactttgttaatgatgttgaagtgggcgacatgctccttgtagatggaggaatgatgtcattcttggtcaaatcaaaaactgaagattctgtgaaatgtgaagttattgacggtggtgaattgaaatctaggcgccatctgaatgttcgtggaaagagtgcaaccttgccatcaataactgacaaggactgggacgacattaagtttggtgtggataatcaagttgattactatgctgtttcttttgtgaaggatgctcaagttgtccacgaactcaaggattatctaaaaagttgcaatgctgacatacatgttatcgtaaaaatagaaagtgcagactccatccccaacttacattcaatcatcacagcatctgatggggctatggttgccaggggtgaccttggagctgagctgcccattgaggaggtgccgctgttgcaggaagaaattattagaatgtgcaggagcatggggaaggctgttattgttgctacaaatatgctcgaaagtatgattgttcatccaactccaacccgagcagaagtttcagacattgctatagctgtccgagagggtgctgatgcagttatgctttcaggagaaactgcacatgggaaatttcccttgaaagctgttaaggtcatgcacactgttgccctgagaaccgaggcaactattcctggtggggaaacacctgcagaccttggtcaggctttcaagaaccacatgagcgaaatgttcgcataccatgcaacaatgatgtcaaatacccttcgaacatcaatagtggttttcactaggacgggatttatggctatactgcttagtcactaccgtccatctggcactatttttgcctttacagatgaggagagggttaggcaacgattggctttgtaccaaggtgtatgtccggttcaaatggaattttctgatgatgctgagaagacatttggcaatgctttgtcttatttgctgaaacatggtatggttaaggacggtgaggaggttgcgctcgttcaaagtggtaaacatcccatctggagatcacaatcaacacacaacattcaggtgaggaagatctga

SEQ ID NO: 1021 - protein, 575 aa, Zea mays
MAAQVVAAAGTPVARPLGGGSGADALRPAARMPRERRTGAVAARGRRESQVVSVISRAPRPDAGVLPVSPDDDAAVKEEANFQHLKAIQQLATAANGVWSKPNVRRKTKIVCTIGPSTNTRDMIWKLAETGMNVARLNMSHGDHASHQKVIDLVKEYNASHADNVIAIMLDTKGPEVRSGDLPQPIFLESGQEFTFTIKRGVGTDTCVSVNYDDFVNDVEVGDMLLVDGGMMSFLVKSKTEDSVKCEVIDGGELKSRRHLNVRGKSATLPSITDKDWDDIKFGVDNQVDYYAVSFVKDAQVVHELKDYLKSCNADIHVIVKIESADSIPNLHSIITASDGAMVARGDLGAELPIEEVPLLQEEIIRMCRSMGKAVIVATNMLESMIVHPTPTRAEVSDIAIAVREGADAVMLSGETAHGKFPLKAVKVMHTVALRTEATIPGGETPADLGQAFKNHMSEMFAYHATMMSNTLRTSIVVFTRTGFMAILLSHYRPSGTIFAFTDEERVRQRLALYQGVCPVQMEFSDDAEKTFGNALSYLLKHGMVKDGEEVALVQSGKHPIWRSQSTHNIQVRKI

SEQ ID NO: 1022 - DNA, 22 bp, Artificial sequence
  primer
atgtcgaacatagacatagaag

SEQ ID NO: 1023 - DNA, 22 bp, Artificial sequence
  primer
atgtcgaacatagacatagaag

SEQ ID NO: 1024 - protein, 580 aa, Artificial sequence
  consensus sequence
  Variant (4)..(5): Xaa in position 4 to 5 is any amino acid
  Variant (7)..(7): Xaa in position 7 is any amino acid
  Variant (10)..(21): Xaa in position 10 to 21 is any amino acid
  Variant (22)..(44): Xaa in position 22 to 44 is any or no amino acid
  Variant (46)..(49): Xaa in position 46 to 49 is any amino acid
  Variant (51)..(51): Xaa in position 51 is any amino acid
  Variant (57)..(60): Xaa in position 57 to 60 is any amino acid
  Variant (62)..(79): Xaa in position 62 to 79 is any amino acid
  Variant (80)..(97): Xaa in position 80 to 97 is any or no amino acid
  Variant (99)..(100): Xaa in position 99 to 100 is any amino acid
  Variant (101)..(104): Xaa in position 101 to 104 is any or no amino acid
  Variant (107)..(107): Xaa in position 107 is any amino acid
  Variant (110)..(121): Xaa in position 110 to 121 is any amino acid
  Variant (122)..(130): Xaa in position 122 to 130 is any or no amino acid
  Variant (132)..(148): Xaa in position 132 to 148 is any amino acid
  Variant (149)..(156): Xaa in position 149 to 156 is any or no amino acid
  Variant (158)..(166): Xaa in position 158 to 166 is any amino acid
  Variant (167)..(169): Xaa in position 167 to 169 is any or no amino acid
  Variant (171)..(173): Xaa in position 171 to 173 is any amino acid
  Variant (174)..(178): Xaa in position 174 to 178 is any or no amino acid
  Variant (180)..(181): Xaa in position 180 to 181 is any amino acid
  Variant (184)..(188): Xaa in position 184 to 188 is any amino acid
  Variant (190)..(200): Xaa in position 190 to 200 is any amino acid
  Variant (201)..(208): Xaa in position 201 to 208 is any or no amino acid
  Variant (210)..(212): Xaa in position 210 to 212 is any amino acid
  Variant (213)..(214): Xaa in position 213 to 214 is any or no amino acid
  Variant (216)..(217): Xaa in position 216 to 217 is any amino acid
  Variant (219)..(221): Xaa in position 219 to 221 is any amino acid
  Variant (222)..(233): Xaa in position 222 to 233 is any or no amino acid
  Variant (235)..(238): Xaa in position 235 to 238 is any amino acid
  Variant (241)..(242): Xaa in position 241 to 242 is any amino acid
  Variant (244)..(252): Xaa in position 244 to 252 is any amino acid
  Variant (253)..(254): Xaa in position 253 to 254 is any or no amino acid
  Variant (256)..(259): Xaa in position 256 to 259 is any amino acid
  Variant (262)..(262): Xaa in position 262 is any amino acid
  Variant (264)..(266): Xaa in position 264 to 266 is any amino acid
  Variant (268)..(282): Xaa in position 268 to 282 is any amino acid
  Variant (283)..(294): Xaa in position 283 to 294 is any or no amino acid
  Variant (298)..(303): Xaa in position 298 to 303 is any amino acid
  Variant (304)..(306): Xaa in position 304 to 306 is any or no amino acid
  Variant (308)..(310): Xaa in position 308 to 310 is any amino acid
  Variant (312)..(315): Xaa in position 312 to 315 is any amino acid
  Variant (318)..(318): Xaa in position 318 is any amino acid
  Variant (327)..(327): Xaa in position 327 is any amino acid
  Variant (329)..(329): Xaa in position 329 is any amino acid
  Variant (331)..(331): Xaa in position 331 is any amino acid
  Variant (333)..(333): Xaa in position 333 is any amino acid
  Variant (335)..(337): Xaa in position 335 to 337 is any amino acid
  Variant (340)..(341): Xaa in position 340 to 341 is any amino acid
  Variant (343)..(349): Xaa in position 343 to 349 is any amino acid
  Variant (351)..(351): Xaa in position 351 is any amino acid
  Variant (353)..(353): Xaa in position 353 is any amino acid
  Variant (354)..(354): Xaa in position 354 is any or no amino acid
  Variant (360)..(360): Xaa in position 360 is any amino acid
  Variant (363)..(365): Xaa in position 363 to 365 is any amino acid
  Variant (373)..(374): Xaa in position 373 to 374 is any amino acid
  Variant (380)..(381): Xaa in position 380 to 381 is any amino acid
  Variant (384)..(384): Xaa in position 384 is any amino acid
  Variant (386)..(387): Xaa in position 386 to 387 is any amino acid
  Variant (391)..(391): Xaa in position 391 is any amino acid
  Variant (393)..(393): Xaa in position 393 is any amino acid
  Variant (395)..(395): Xaa in position 395 is any amino acid
  Variant (397)..(397): Xaa in position 397 is any amino acid
  Variant (400)..(402): Xaa in position 400 to 402 is any amino acid
  Variant (404)..(405): Xaa in position 404 to 405 is any amino acid
  Variant (407)..(413): Xaa in position 407 to 413 is any amino acid
  Variant (415)..(448): Xaa in position 415 to 448 is any amino acid
  Variant (449)..(475): Xaa in position 449 to 475 is any or no amino acid
  Variant (477)..(479): Xaa in position 477 to 479 is any amino acid
  Variant (481)..(482): Xaa in position 481 to 482 is any amino acid
  Variant (484)..(484): Xaa in position 484 is any amino acid
  Variant (485)..(485): Xaa in position 485 is any or no amino acid
  Variant (487)..(493): Xaa in position 487 to 493 is any amino acid
  Variant (495)..(511): Xaa in position 495 to 511 is any amino acid
  Variant (512)..(536): Xaa in position 512 to 536 is any or no amino acid
  Variant (538)..(539): Xaa in position 538 to 539 is any amino acid
  Variant (541)..(559): Xaa in position 541 to 559 is any amino acid
  Variant (560)..(578): Xaa in position 560 to 578 is any or no amino acid
TKIXXTXGPXXXXXXXXXXXXXXXXXXXXXXXXXXXXXXXXXXXGXXXXRXNFSHGXXXXHXXXXXXXXXXXXXXXXXXXXXXXXXXXXXXXXXXXXDXXXXXXGPXIRXXXXXXXXXXXXXXXXXXXXXGXXXXXXXXXXXXXXXXXXXXXXXXXYXXXXXXXXXXXXGXXXXXXXXLXXDGXXXXXVXXXXXXXXXXXXXXXXXXXGXXXXXKXXNXXXXXXXXXXXXXXXPXXXXKDXXDXXXXXXXXXXXDXXXXSFXRXXXDXXXXXXXXXXXXXXXXXXXXXXXXXXXKIEXXXXXXXXXNXXXIXXXXDGXMVARGDLGXEXPXEXVXXXQKXXIXXXXXXXKXVXXATQMLXSMXXXPRPTRAEXXDVANAXXDGXDXXMLSXEXAXGXYPXXXVXXMXXXXXXXEXXXXXXXXXXXXXXXXXXXXXXXXXXXXXXXXXXXXXXXXXXXXXXXXXXXXXXXXXXXXXIXXXTXXGXXAXXXXXXXPXXXXXXXXXXXXXXXXXXXXXXXXXXXXXXXXXXXXXXXXXXGXXPXXXXXXXXXXXXXXXXXXXXXXXXXXXXXXXXXXXXXXGD

SEQ ID NO: 1025 - protein, 52 aa, Artificial sequence
  protein pattern
  Variant (2)..(5): Xaa in position 2 to 5 is any or no amino acid
  Variant (7)..(7): Xaa in position 7 is any amino acid
  Variant (10)..(10): Xaa in position 10 is any amino acid
  Variant (13)..(17): Xaa in position 13 to 17 is any amino acid
  Variant (23)..(23): Xaa in position 23 is any amino acid
  Variant (24)..(24): Xaa in position 24 is Ala, Gly, Asn, Ser or Thr
  Variant (26)..(28): Xaa in position 26 to 28 is any amino acid
  Variant (29)..(29): Xaa in position 29 is Ala, Gly or Ser
  Variant (30)..(30): Xaa in position 30 is Ile or Val
  Variant (31)..(31): Xaa in position 31 is any amino acid
  Variant (32)..(32): Xaa in position 32 is Asp, Glu or Gln
  Variant (34)..(34): Xaa in position 34 is Ala, Ser, Thr or Val
  Variant (35)..(35): Xaa in position 35 is Asp, Gly or Ser
  Variant (36)..(37): Xaa in position 36 to 37 is any amino acid
  Variant (39)..(39): Xaa in position 39 is any amino acid
  Variant (41)..(41): Xaa in position 41 is Ala, Glu, Gly or Asn
  Variant (43)..(44): Xaa in position 43 to 44 is Ala, Ser or Thr
  Variant (45)..(45): Xaa in position 45 is any amino acid
  Variant (47)..(51): Xaa in position 47 to 51 is any amino acid
  Variant (52)..(52): Xaa in position 52 is Ala, Cys, Ser, Thr or Val
AXXXXTXMLXSMXXXXXPTRAEXXDXXXXXXXGXXXXMXSXEXXXGXXXXXX

SEQ ID NO: 1026 - protein, 39 aa, Artificial sequence
  protein pattern
  Variant (2)..(11): Xaa in position 2 to 11 is any amino acid
  Variant (13)..(13): Xaa in position 13 is Ile, Leu or Val
  Variant (14)..(16): Xaa in position 14 to 16 is any amino acid
  Variant (18)..(18): Xaa in position 18 is Ala, Gly or Ser
  Variant (19)..(19): Xaa in position 19 is any amino acid
  Variant (21)..(21): Xaa in position 21 is Ile or Val
  Variant (26)..(26): Xaa in position 26 is Leu or Met
  Variant (28)..(28): Xaa in position 28 is any amino acid
  Variant (30)..(30): Xaa in position 30 is Ile, Leu, Met or Val
  Variant (31)..(34): Xaa in position 31 to 34 is any amino acid
  Variant (35)..(35): Xaa in position 35 is Ile, Leu or Val
  Variant (36)..(38): Xaa in position 36 to 38 is any amino acid
EXXXXXXXXXXIXXXXDXXMXARGDXGXEXXXXXXXXXQ

SEQ ID NO: 1027 - protein, 17 aa, Artificial sequence
  protein pattern
  Variant (2)..(2): Xaa in position 2 is any amino acid
  Variant (3)..(3): Xaa in position 3 is Cys, Asp, Asn, Ser or Thr
  Variant (4)..(5): Xaa in position 4 to 5 is any amino acid
  Variant (7)..(7): Xaa in position 7 is any amino acid
  Variant (9)..(9): Xaa in position 9 is Phe, Leu or Met
  Variant (13)..(16): Xaa in position 13 to 16 is any amino acid
GXXXXRXNXSHGXXXXH

SEQ ID NO: 1028 - protein, 10 aa, Artificial sequence
  protein pattern
  Variant (2)..(2): Xaa in position 2 is any or no amino acid
  Variant (4)..(5): Xaa in position 4 to 5 is any amino acid
  Variant (8)..(8): Xaa in position 8 is Glu or Lys
  Variant (9)..(9): Xaa in position 9 is Ile or Val
LXDXXGPXXR

SEQ ID NO: 1029 - protein, 11 aa, Artificial sequence
  protein pattern
  Variant (2)..(2): Xaa in position 2 is any amino acid
  Variant (3)..(3): Xaa in position 3 is Ile, Leu or Met
  Variant (4)..(4): Xaa in position 4 is Ile or Val
  Variant (5)..(5): Xaa in position 5 is any amino acid
  Variant (7)..(7): Xaa in position 7 is Ile, Leu, Met or Val
  Variant (10)..(10): Xaa in position 10 is any amino acid
  Variant (11)..(11): Xaa in position 11 is Cys, Ser or Thr
TXXXXTXGPXX

SEQ ID NO: 1030 - DNA, 117 bp, Azotobacter vinelandii
  CDS (1)..(117): transl_table=11
atgaaagttcgtgcatcggtgaaaaagctgtgccgcaactgcaagatcattcgccgcgacggcgtcgtgcgcgtgatctgcagtacggagccgcgtcacaagcagcgccaaggctga

SEQ ID NO: 1031 - protein, 38 aa, Azotobacter vinelandii
MKVRASVKKLCRNCKIIRRDGVVRVICSTEPRHKQRQG

SEQ ID NO: 1032 - DNA, 297 bp, Oryza sativa
  CDS (1)..(297)
atgaaggttcgcgcgtcggtgaagcggctgtgcgcgtactgcaaggtggtgaagcgcaggggcatcgtgttcatccagtgcaaggccaacgccaagcacaagcagcgccagggcttctccacgctcgccgaggccgccgccgcctgccaccccccacctccgccgctgctcaccaacacatccccggctgtcgccgccgccgttgcggaggcctcgaaggttgctaagcaagagccgtctatgaagtttaattggcctctgggtttagctgctctgctcaagaacagcgataaataa

SEQ ID NO: 1033 - protein, 98 aa, Oryza sativa
MKVRASVKRLCAYCKVVKRRGIVFIQCKANAKHKQRQGFSTLAEAAAACHPPPPPLLTNTSPAVAAAVAEASKVAKQEPSMKFNWPLGLAALLKNSDK

SEQ ID NO: 1034 - DNA, 300 bp, Glycine max
  CDS (1)..(300)
atgaaggtgcggtcatctgtgaagaagatgtgtgaattttgtcagatagttaagcgccggggacgaatctatgtgatttgctctgggaaccctaagcacaagcaacgacagggcatggcaacatttgcaagtgaaggcccatctcgaccagtgtcctcggaaacaagtagctggaagatggggataaagcctgctcaaattgcgcgaccaggtctgatttctaatacccctcaaaggcacagcttgtctatgttgtatggatggagggtgggattggcctctattctgtctatgaagtag

SEQ ID NO: 1035 - protein, 99 aa, Glycine max
MKVRSSVKKMCEFCQIVKRRGRIYVICSGNPKHKQRQGMATFASEGPSRPVSSETSSWKMGIKPAQIARPGLISNTPQRHSLSMLYGWRVGLASILSMK

SEQ ID NO: 1036 - DNA, 300 bp, Glycine max
  CDS (1)..(300)
atgaaggttcggtcatctgtgaagaagatgtgtgaattttgtcagatagttaagcgccggggacgaatctatgtgatttgctctgggaaccctaagcacaagcaacgacagggcatggcaacatttgcaagtgaaggcccatctcaaccagtgtcctcggagacaagtagctgcaagattatgattaagcctgctcaaattgcgcgaccaggtcggatttgtacttcccctcaaaggcacagtttgtctatgttgtatggatggagggtgggattggcctctattctgtctataaagtag

SEQ ID NO: 1037 - protein, 99 aa, Glycine max
MKVRSSVKKMCEFCQIVKRRGRIYVICSGNPKHKQRQGMATFASEGPSQPVSSETSSCKIMIKPAQIARPGRICTSPQRHSLSMLYGWRVGLASILSIK

SEQ ID NO: 1038 - DNA, 252 bp, Glycine max
  CDS (1)..(252)
atgaaggttcggtcatctgtgaagaagatgtgtgaattttgtcagatagttaagcgccggggacgaatctatgtgatttgctctgggaaccctaagcacaagcaacgacagggcatggcaactattgctagaggggtgggatctgacccagtttctgcctatgaagtaggaaacataattatgttacctcctgcactaagtgtactaagtgcgaagagattgataatcaacgcttatggattgaggccttaa

SEQ ID NO: 1039 - protein, 83 aa, Glycine max
MKVRSSVKKMCEFCQIVKRRGRIYVICSGNPKHKQRQGMATIARGVGSDPVSAYEVGNIIMLPPALSVLSAKRLIINAYGLRP

SEQ ID NO: 1040 - DNA, 531 bp, Sorghum bicolor
  CDS (52)..(345)
gcacgagggaagaccccgaggcaggaggcgagcgggggaaggaagaagaagatgaaggtccgcgcgtcggtgaagcgcctgtgcgggttctgcaaggtggtgaagcgccggggcatcgtcttcatccactgcaccgccaaccccaagcacaagcagcgccagggcttctccaccatcgccgaagccgccgccgcgtgcgtccacctgccgccgccaccgcccgccagcggttccgcctccgccgcagcgttcgcggaggcttcaaaggtggcgaggcaagagatgtctatgaagttcaattggccgctaggtttagctgccttgctcaagaatggagaaaaataatgcatcaggtctaccatatgctgacattttaagcagatgttgaatagagccagttggtatcatgatatgaagagaagcatgtagcaaaaacttgaaactgtaccatcatcatgtatttgctattactacacatcagttgaagtcatgctacggtggaataatatcagcaaaaaaaaaaaaaaaaaa

SEQ ID NO: 1041 - protein, 97 aa, Sorghum bicolor
MKVRASVKRLCGFCKVVKRRGIVFIHCTANPKHKQRQGFSTIAEAAAACVHLPPPPPASGSASAAAFAEASKVARQEMSMKFNWPLGLAALLKNGEK

SEQ ID NO: 1042 - DNA, 180 bp, Gossypium hirsutum
  CDS (1)..(180)
atgaaggtgcgagcatcagtgaaaaagatgtgggagttctgtagaaccgttaagcgccgcggacgggtatatgtactatgcacttccaaccctaagcataagcaacgacaaggcatttccacatttgcttttgaaggcacactgccccctgcgtatgcctctctcattgcagttacttaa

SEQ ID NO: 1043 - protein, 59 aa, Gossypium hirsutum
MKVRASVKKMWEFCRTVKRRGRVYVLCTSNPKHKQRQGISTFAFEGTLPPAYASLIAVT

SEQ ID NO: 1044 - DNA, 282 bp, Saccharomyces cerevisiae
  CDS (1)..(282)
atgtttttacagactctccgcctaactatgccaaggatgtttttgcacatgaaaccgtcccccataacgataacaagggcctgcacagtgcccagcctcctatctgttgcagctccgcaaccagctcttgttgcagctaacagacctttggtttttaacagaggtttcaaggtcagaacatctgtcaaaaagttctgcagtgattgctacttggtaagaagaaagggaagagtatacatttattgcaagtcgaataaaaaacacaaacagcgtcaaggctga

SEQ ID NO: 1045 - protein, 93 aa, Saccharomyces cerevisiae
MFLQTLRLTMPRMFLHMKPSPITITRACTVPSLLSVAAPQPALVAANRPLVFNRGFKVRTSVKKFCSDCYLVRRKGRVYIYCKSNKKHKQRQG

SEQ ID NO: 1046 - DNA, 117 bp, Mesostigma viride
  CDS (1)..(117): transl_table=11
atgaaagttcgtgcatcagttcgtaaaatttgtgaaaattgtcgtctaattaaaagacgaggaacagtaatggtcatttgttctaataacccaaaacataaacaacgtcaaggataa

SEQ ID NO: 1047 - protein, 38 aa, Mesostigma viride
MKVRASVRKICENCRLIKRRGTVMVICSNNPKHKQRQG

SEQ ID NO: 1048 - DNA, 114 bp, Marchantia polymorpha
  CDS (1)..(114): transl_table=11
atgaaaatccgcgcttctgttcgaaaaatttgtgaaaattgtcgattaattcgacgccgaagacgaattatggtagtttgttctaatccaaaacacaaacaaagacaaggttaa

SEQ ID NO: 1049 - protein, 37 aa, Marchantia polymorpha
MKIRASVRKICENCRLIRRRRRIMVVCSNPKHKQRQG

SEQ ID NO: 1050 - DNA, 114 bp, Oryza sativa Japonica Group
  CDS (1)..(114): transl_table=11
atgaaaataagagcttctgttcgtaaaatttgtacaaaatgtcgactgattcgtaggcgtggacgaattagagtcatttgttccaatccgaagcataaacaaagacaggggtaa

SEQ ID NO: 1051 - protein, 37 aa, Oryza sativa Japonica Group
MKIRASVRKICTKCRLIRRRGRIRVICSNPKHKQRQG

SEQ ID NO: 1052 - DNA, 114 bp, Pinus thunbergii
  CDS (1)..(114): transl_table=11
atgaaaattcgtgcttctattcgtagaatttgtggaaaatgtcgaccaattcgtagacggaaacgagttatgataatttgttctaatccgagacataagcaaaaacaggggtaa

SEQ ID NO: 1053 - protein, 37 aa, Pinus thunbergii
MKIRASIRRICGKCRPIRRRKRVMIICSNPRHKQKQG

SEQ ID NO: 1054 - DNA, 114 bp, Chlorella vulgaris
  CDS (1)..(114): transl_table=11
atgaaagttcgtccttcagtaaaaaaaatgtgtgacaaatgtcgattaattaaacgaaaaggcactttacgagtaatttgtcaaaatccaaaacataaacaacgtcagggttaa

SEQ ID NO: 1055 - protein, 37 aa, Chlorella vulgaris
MKVRPSVKKMCDKCRLIKRKGTLRVICQNPKHKQRQG

SEQ ID NO: 1056 - DNA, 114 bp, Nephroselmis olivacea
  CDS (1)..(114): transl_table=11
atgaaagttcgtccttctgttcgtaaaatctgtgataaatgttgtctgattcgtagacatcgaaagcttttagtgatttgttccaatcccaaacataaacaacgtcaaggataa

SEQ ID NO: 1057 - protein, 37 aa, Nephroselmis olivacea
MKVRPSVRKICDKCCLIRRHRKLLVICSNPKHKQRQG

SEQ ID NO: 1058 - DNA, 114 bp, Arabidopsis thaliana
  CDS (1)..(114): transl_table=11
atgaaaataagggcttccgttcgtaaaatttgtgaaaagtgtcgactaatccgcaggaggggacgaattatagtaatttgttccaacccgaggcataaacaaagacaaggataa

SEQ ID NO: 1059 - protein, 37 aa, Arabidopsis thaliana
MKIRASVRKICEKCRLIRRRGRIIVICSNPRHKQRQG

SEQ ID NO: 1060 - DNA, 114 bp, Epifagus virginiana
  CDS (1)..(114): transl_table=11
atgaaaataagagcttccattcgtaaaatttgtgaaaagtgtaggttaatctgtaggcgtaggcgcattatagtaatttgttccaacccgagacataaacaacggcaaggataa

SEQ ID NO: 1061 - protein, 37 aa, Epifagus virginiana
MKIRASIRKICEKCRLICRRRRIIVICSNPRHKQRQG

SEQ ID NO: 1062 - DNA, 114 bp, Spinacia oleracea
  CDS (1)..(114): transl_table=11
atgaaaataagagcttctgttcgtccaatttgtgaaaaatgtcgactgatccgcagacggggacgaattatagtaatttgttctaacccaaaacataaacaacgacaaggataa

SEQ ID NO: 1063 - protein, 37 aa, Spinacia oleracea
MKIRASVRPICEKCRLIRRRGRIIVICSNPKHKQRQG

SEQ ID NO: 1064 - DNA, 114 bp, Mycoplasma genitalium G37
  CDS (1)..(114): transl_table=4
atgaaggttagagcaagcgtaaaaccaatttgtaaagattgtaagatcatcaaacgtcaccgcatcttaagggtgatctgcaaaaccaaaaaacacaagcaaaggcaaggataa

SEQ ID NO: 1065 - protein, 37 aa, Mycoplasma genitalium G37
MKVRASVKPICKDCKIIKRHRILRVICKTKKHKQRQG

SEQ ID NO: 1066 - DNA, 114 bp, Ureaplasma parvum serovar 3 str. ATCC 700970
  CDS (1)..(114): transl_table=4
atgaaagttagagcttcagttaaagcaatttgtaaagattgcaaaatcgtaaagcgatcaggtgttgtgcgtgttatttgtgctaattcaaaacacaaacaacgtcaaggttaa

SEQ ID NO: 1067 - protein, 37 aa, Ureaplasma parvum serovar 3 str. ATCC 700970
MKVRASVKAICKDCKIVKRSGVVRVICANSKHKQRQG

SEQ ID NO: 1068 - DNA, 114 bp, Oenothera elata subsp. hookeri
  CDS (1)..(114): transl_table=11
atgaaaatacgggcatccgttcgtaaaatttgtacaaaatgtcgactgatccgtaggagaggacgaattatagtaatttgttccaatccgagacataaacaaagacaaggctaa

SEQ ID NO: 1069 - protein, 37 aa, Oenothera elata subsp. hookeri
MKIRASVRKICTKCRLIRRRGRIIVICSNPRHKQRQG

SEQ ID NO: 1070 - DNA, 114 bp, Lotus japonicus
  CDS (1)..(114): transl_table=11
atgaaaataggagcgtctgttcgtaagatttgtgaaaaatgtcgattgatccgaaggcgaggtcggattatagtaatttgttccaacccaagacataaacaaagacagggataa

SEQ ID NO: 1071 - protein, 37 aa, Lotus japonicus
MKIGASVRKICEKCRLIRRRGRIIVICSNPRHKQRQG

SEQ ID NO: 1072 - DNA, 114 bp, Mycoplasma pneumoniae M129
  CDS (1)..(114): transl_table=4
atgaaagttagagcgagcgtaaagccaatttgcaaagattgcaagatcattaagcgccaccaaattgtgcgcgttatttgcaaaactcaaaaacataaacaacgacaaggataa

SEQ ID NO: 1073 - protein, 37 aa, Mycoplasma pneumoniae M129
MKVRASVKPICKDCKIIKRHQIVRVICKTQKHKQRQG

SEQ ID NO: 1074 - DNA, 312 bp, Arabidopsis thaliana
  CDS (1)..(312)
atgaaggtgagatcatctgtgaagaagatgtgtgagttttgtaaaacagtgaaacgtcgtggacgtgtgtatgttatatgctcttccaatcctaagcacaagcaaagacaagggttcagttcctttgcttatgaaggaattacaccttcccctttgtttgctgagccgattgctagtcaggagttggtgaggctgcctggtcagggggtatcagccggactggcatcacttttacacaaaaggcctatgccaacagcgtatttcggatggaggtctggtcttgcatccattctcttcaaacaaggaaattag

SEQ ID NO: 1075 - protein, 103 aa, Arabidopsis thaliana
MKVRSSVKKMCEFCKTVKRRGRVYVICSSNPKHKQRQGFSSFAYEGITPSPLFAEPIASQELVRLPGQGVSAGLASLLHKRPMPTAYFGWRSGLASILFKQGN

SEQ ID NO: 1076 - DNA, 114 bp, Helicobacter pylori 26695
  CDS (1)..(114): transl_table=11
atgaaagtcaggccatcagtgaaaaagatgtgcgataactgcaaaatcattaaaagaaggggcgttattagagtgatctgcgctacccctaaacacaaacaaagacaaggataa

SEQ ID NO: 1077 - protein, 37 aa, Helicobacter pylori 26695
MKVRPSVKKMCDNCKIIKRRGVIRVICATPKHKQRQG

SEQ ID NO: 1078 - DNA, 120 bp, Borrelia burgdorferi B31
  CDS (1)..(120): transl_table=11
ttgattatgaaagttagagtaagtgtaaagccaatttgtgaaaaatgtaaggttataaaaagaaaaggtgtattaagaattatttgtgataatttaaagcataaacaaagacaaaagtaa

SEQ ID NO: 1079 - protein, 39 aa, Borrelia burgdorferi B31
MIMKVRVSVKPICEKCKVIKRKGVLRIICDNLKHKQRQK

SEQ ID NO: 1080 - DNA, 150 bp, Aquifex aeolicus VF5
  CDS (1)..(150): transl_table=11
atgaaagttaggtcttccgtgaagaaaaggtgtgctaagtgcaagataataaggagaaagggaagagttatggtaatttgcgaaatacccagtcacaagcaaaagacaggggtaacggaggttagaaatggcgagaatagcgggcgttga

SEQ ID NO: 1081 - protein, 49 aa, Aquifex aeolicus VF5
MKVRSSVKKRCAKCKIIRRKGRVMVICEIPSHKQKTGVTEVRNGENSGR

SEQ ID NO: 1082 - DNA, 114 bp, Mycobacterium tuberculosis H37Rv
  CDS (1)..(114): transl_table=11
atgaaggtaaacccgagcgtcaagccgatctgtgacaagtgcaggctgatccgtcggcacgggcgggttatggtgatctgttccgatccgcgtcacaaacaaaggcagggctag

SEQ ID NO: 1083 - protein, 37 aa, Mycobacterium tuberculosis H37Rv
MKVNPSVKPICDKCRLIRRHGRVMVICSDPRHKQRQG

SEQ ID NO: 1084 - DNA, 114 bp, Treponema pallidum subsp. pallidum str. Nichols
  CDS (1)..(114): transl_table=11
atgaagataaggacgagcgtaaaggttatttgtgataagtgtaagcttattaagcgtttcggtattatccgggtgatttgtgtgaatccaaagcacaagcaacgtcagggctaa

SEQ ID NO: 1085 - protein, 37 aa, Treponema pallidum subsp. pallidum str. Nichols
MKIRTSVKVICDKCKLIKRFGIIRVICVNPKHKQRQG

SEQ ID NO: 1086 - DNA, 114 bp, Helicobacter pylori J99
  CDS (1)..(114): transl_table=11
atgaaagtcaggccatcagtgaaaaagatgtgcgataagtgcaaaatcattaaaagaaggggcgttattagagtgatctgcgctacccctaaacacaaacaaagacaaggataa

SEQ ID NO: 1087 - protein, 37 aa, Helicobacter pylori J99
MKVRPSVKKMCDKCKIIKRRGVIRVICATPKHKQRQG

SEQ ID NO: 1088 - DNA, 117 bp, Thermotoga maritima MSB8
  CDS (1)..(117): transl_table=11
atgaaggttcaggcttctgtaaagaagagatgtgaacactgcaaaataatcagaagaaagaagagagtctatgttatctgcaaggttaacccaaaacacaatcagaagcaaggttga

SEQ ID NO: 1089 - protein, 38 aa, Thermotoga maritima MSB8
MKVQASVKKRCEHCKIIRRKKRVYVICKVNPKHNQKQG

SEQ ID NO: 1090 - DNA, 114 bp, Vibrio cholerae O1 biovar eltor str. N16961
  CDS (1)..(114): transl_table=11
atgaaagttcgtgcttccgttaaaaaaatctgccgtaactgtaaagttatcaagcgtaacggtgtcgttcgcgtgatttgcagtgagccaaagcacaagcagcgccaaggctaa

SEQ ID NO: 1091 - protein, 37 aa, Vibrio cholerae O1 biovar eltor str. N16961
MKVRASVKKICRNCKVIKRNGVVRVICSEPKHKQRQG

SEQ ID NO: 1092 - DNA, 117 bp, Buchnera aphidicola str. APS (Acyrthosiphon pisum)
  CDS (1)..(117): transl_table=11
atgaaagtacaagcttctgtgaaagtactttgccgtagttgcaaaattataaaaagaaataatgttgtaagagtaatttgtagtaatgatcctaagcataaacagcgtcagggttaa

SEQ ID NO: 1093 - protein, 38 aa, Buchnera aphidicola str. APS (Acyrthosiphon pisum)
MKVQASVKVLCRSCKIIKRNNVVRVICSNDPKHKQRQG

SEQ ID NO: 1094 - DNA, 114 bp, Bacillus halodurans C-125
  CDS (1)..(114): transl_table=11
atgaaggtaagaccatccgtcaagccgatttgtgaaaaatgtaaagtgatccgccgtaaaggcacggtcatggtcatttgtgaaaatccgaagcacaaacaaaaacaaggataa

SEQ ID NO: 1095 - protein, 37 aa, Bacillus halodurans C-125
MKVRPSVKPICEKCKVIRRKGTVMVICENPKHKQKQG

SEQ ID NO: 1096 - DNA, 114 bp, Pasteurella multocida subsp. multocida str. Pm70
  CDS (1)..(114): transl_table=11
atgaaagttcgtgcttccgtgaagaaattatgtcgtaactgtaaaattgttaaacgtgaaggtgtcgttcgtgtactttgtagcgaccctaaacataaacaacgtcaaggttag

SEQ ID NO: 1097 - protein, 37 aa, Pasteurella multocida subsp. multocida str. Pm70
MKVRASVKKLCRNCKIVKREGVVRVLCSDPKHKQRQG

SEQ ID NO: 1098 - DNA, 117 bp, Pseudomonas aeruginosa PAO1
  CDS (1)..(117): transl_table=11
atgaaagttcgtgcatcggtcaagaagctgtgccgtaactgcaaaatcatccgtcgcgatggcatcgtgcgggtgatctgcagcgcggaaccgcgtcacaagcagcgccaaggctga

SEQ ID NO: 1099 - protein, 38 aa, Pseudomonas aeruginosa PAO1
MKVRASVKKLCRNCKIIRRDGIVRVICSAEPRHKQRQG

SEQ ID NO: 1100 - DNA, 117 bp, Lactococcus lactis subsp. lactis Il1403
  CDS (1)..(117): transl_table=11
atgaaagtaagaccatcagttaaaccaatctgcgaatactgtaaagttattcgtcgtaacggtcgtgtaatggtaatttgccctgccaatccaaaacacaaacaacgtcagggatag

SEQ ID NO: 1101 - protein, 38 aa, Lactococcus lactis subsp. lactis Il1403
MKVRPSVKPICEYCKVIRRNGRVMVICPANPKHKQRQG

SEQ ID NO: 1102 - DNA, 114 bp, Neisseria meningitidis MC58
  CDS (1)..(114): transl_table=11
atgcgtgtacaaccatctgttaagaaaatttgccgaaattgcaagattattcgtcgaaatcgtgtagttcgtgtaatttgtactgatctccgtcacaaacagcgtcaaggttaa

SEQ ID NO: 1103 - protein, 37 aa, Neisseria meningitidis MC58
MRVQPSVKKICRNCKIIRRNRVVRVICTDLRHKQRQG

SEQ ID NO: 1104 - DNA, 114 bp, Campylobacter jejuni subsp. jejuni NCTC 11168
  CDS (1)..(114): transl_table=11
atgaaagtgagaccatcggttaaaaagatgtgcgacaaatgcaaagtagttcgccgtaaaggcgtggttcgcattatttgcgaaaatccaaaacataaacaaagacaaggataa

SEQ ID NO: 1105 - protein, 37 aa, Campylobacter jejuni subsp. jejuni NCTC 11168
MKVRPSVKKMCDKCKVVRRKGVVRIICENPKHKQRQG

SEQ ID NO: 1106 - DNA, 117 bp, Escherichia coli O157:H7 EDL933
  CDS (1)..(117): transl_table=11
atgaaagttcgtgcttccgtcaagaaattatgccgtaactgcaaaatcgttaagcgtgatggtgtcatccgtgtgatttgcagtgccgagccgaagcataaacagcgccaaggctga

SEQ ID NO: 1107 - protein, 38 aa, Escherichia coli O157:H7 EDL933 [sequence omitted]

SEQ ID NO: 1108 - DNA, 114 bp, Unknown
  Unidentified
  CDS (1)..(114)
atgaaagttcgtagcagtgtcaagaaaatgtgcgacaactgcaaagtggtccgccgccatggtcgcgtgctggtcatttgctccaacgtcaagcacaagcagaggcagggttaa

SEQ ID NO: 1109 - protein, 37 aa, Unknown
  Unidentified
MKVRSSVKKMCDNCKVVRRHGRVLVICSNVKHKQRQG

SEQ ID NO: 1110 - DNA, 114 bp, Mycobacterium leprae TN
  CDS (1)..(114): transl_table=11
gtgaaggtgaacccgagtgtaaagcccatgtgcgacaagtgcagggttatccgtcggcataggcgggtcatggtgatttgcgtggatccgcggcacaagcagcgacaagggtag

SEQ ID NO: 1111 - protein, 37 aa, Mycobacterium leprae TN
MKVNPSVKPMCDKCRVIRRHRRVMVICVDPRHKQRQG

SEQ ID NO: 1112 - DNA, 114 bp, Mycoplasma pulmonis UAB CTIP
  CDS (1)..(114): transl_table=4
atgaaagttagagcatcagtaaaagcaatgtgtaaagattgcaaaaacattaaaagaaaagggatacgaagaattatttgtattcaaccaaaacacaaacaaaggcaagggtaa

SEQ ID NO: 1113 - protein, 37 aa, Mycoplasma pulmonis UAB CTIP
MKVRASVKAMCKDCKNIKRKGIRRIICIQPKHKQRQG

SEQ ID NO: 1114 - DNA, 114 bp, Clostridium acetobutylicum ATCC 824
  CDS (1)..(114): transl_table=11
atgaaagtaagaccatcagttaaaccaatttgcgaaaaatgcaaggtcataaaaagaaaaggcaaagtaatggttatatgcgaaaatcctaagcataagcaaaaacagggttaa

SEQ ID NO: 1115 - protein, 37 aa, Clostridium acetobutylicum ATCC 824
MKVRPSVKPICEKCKVIKRKGKVMVICENPKHKQKQG

SEQ ID NO: 1116 - DNA, 114 bp, Bacillus subtilis subsp. subtilis str. 168
  CDS (1)..(114): transl_table=11
atgaaagtgagaccatcagttaaaccaatctgcgaaaaatgtaaagttattcgcagaaaaggaaaagtaatggtgatctgtgaaaatccaaagcataaacaaaaacaaggataa

SEQ ID NO: 1117 - protein, 37 aa, Bacillus subtilis subsp. subtilis str. 168
MKVRPSVKPICEKCKVIRRKGKVMVICENPKHKQKQG

SEQ ID NO: 1118 - DNA, 117 bp, Yersinia pestis CO92
  CDS (1)..(117): transl_table=11
atgaaagttcgtgcttccgtcaagaaattatgtcgtaactgcaaaattgttaagcgtaacggtgtcgttcgcgtgatttgcagtgccgaaccaaagcataaacagcgtcaaggctga

SEQ ID NO: 1119 - protein, 38 aa, Yersinia pestis CO92
MKVRASVKKLCRNCKIVKRNGVVRVICSAEPKHKQRQG

SEQ ID NO: 1120 - DNA, 114 bp, Haemophilus influenzae Rd KW20
  CDS (1)..(114): transl_table=11
atgaaagttcgtgcttccgtaaagaaaatgtgtcgtaactgtaagattgttaaacgtgagggtgttgtacgcgtattgtgtagcgaccctaaacacaaacaacgtcaaggttaa

SEQ ID NO: 1121 - protein, 37 aa, Haemophilus influenzae Rd KW20
MKVRASVKKMCRNCKIVKREGVVRVLCSDPKHKQRQG

SEQ ID NO: 1122 - DNA, 117 bp, Synechocystis sp. PCC 6803
  CDS (1)..(117): transl_table=11
atgaaagttagagcttccgttaagaaaatgtgtgataagtgccgcgttattcgtcggcgcggtcgtgtgatggttatctgttccgctaaccccaagcataaacagcgtcaaggttag

SEQ ID NO: 1123 - protein, 38 aa, Synechocystis sp. PCC 6803
MKVRASVKKMCDKCRVIRRRGRVMVICSANPKHKQRQG

SEQ ID NO: 1124 - DNA, 114 bp, Listeria innocua Clip11262
  CDS (1)..(114): transl_table=11
atgaaagtaagaccatcagtgaaacctatgtgcgaaaaatgtaaagttattcgtcgtaaaggtaaagtaatggtaatttgtgaaaatccaaaacataaacaaaaacaaggataa

SEQ ID NO: 1125 - protein, 37 aa, Listeria innocua Clip11262
MKVRPSVKPMCEKCKVIRRKGKVMVICENPKHKQKQG

SEQ ID NO: 1126 - DNA, 114 bp, Nostoc sp. PCC 7120
  CDS (1)..(114): transl_table=11
atgaaagtcagagcctcggtcaagaaaatttgtgaaaaatgcaacgtaatccgccgtcgtggacgcgttatggtgatctgtgttaatcccaagcacaagcaacgtcaaggataa

SEQ ID NO: 1127 - protein, 37 aa, Nostoc sp. PCC 7120
MKVRASVKKICEKCNVIRRRGRVMVICVNPKHKQRQG

SEQ ID NO: 1128 - DNA, 117 bp, Ralstonia solanacearum GMI1000
  CDS (1)..(117): transl_table=11
atgaaagtgctggcttctgttaagcgcatttgccgcaactgcaaaatcatcaagcgcaagggcgtggtgcgtgtgatctgctcgtcggacccgcgtcataagcagcgccaaggctaa

SEQ ID NO: 1129 - protein, 38 aa, Ralstonia solanacearum GMI1000
MKVLASVKRICRNCKIIKRKGVVRVICSSDPRHKQRQG

SEQ ID NO: 1130 - DNA, 114 bp, Clostridium perfringens str. 13
  CDS (1)..(114): transl_table=11
atgaaagtaagaccatcagttaagcctatttgcgaaaagtgcaaagttataaaaagaaaaggaagagtaatggtaatctgtgaaaatcctaagcacaaacaaaaacaaggctaa

SEQ ID NO: 1131 - protein, 37 aa, Clostridium perfringens str. 13
MKVRPSVKPICEKCKVIKRKGRVMVICENPKHKQKQG

SEQ ID NO: 1132 - DNA, 114 bp, Psilotum nudum
  CDS (1)..(114): transl_table=11
atgaaaattcgtgcttccgtccgtaagatttgtgagaaatgtcgattgattcgtagacgaaaacggatcatggtaatttgttttaatccgaagcacaagcaaaaacagggataa

SEQ ID NO: 1133 - protein, 37 aa, Psilotum nudum
MKIRASVRKICEKCRLIRRRKRIMVICFNPKHKQKQG

SEQ ID NO: 1134 - DNA, 180 bp, Schizosaccharomyces pombe
  CDS (1)..(180)
atgttcttaacccctgctttcagactttctcctagccttctaccttggaacttttcaagaggtttcaaagtgaaagcatcagtaaaaaagcgttgttcatcctgctattttgtgcgtcgcaaaggtaggttgtatgtactatgcaaaaaacatccgagacataaaacccgtcaaggttaa

SEQ ID NO: 1135 - protein, 59 aa, Schizosaccharomyces pombe
MFLTPAFRLSPSLLPWNFSRGFKVKASVKKRCSSCYFVRRKGRLYVLCKKHPRHKTRQG

SEQ ID NO: 1136 - DNA, 114 bp, Thermoanaerobacter tengcongensis MB4
  CDS (1)..(114): transl_table=11
atgaaggtgagaccgtctgttaagaaaatgtgcgaaaaatgcaagatcataaagagaaagggaagagtaatggtaatttgtgaaaaccctaaacacaagcaaaaacaaggctag

SEQ ID NO: 1137 - protein, 37 aa, Thermoanaerobacter tengcongensis MB4
MKVRPSVKKMCEKCKIIKRKGRVMVICENPKHKQKQG

SEQ ID NO: 1138 - DNA, 114 bp, Streptomyces coelicolor A3(2)
  CDS (1)..(114): transl_table=11
atgaaggtcaagccgagcgtcaagaagatctgcgacaagtgcagggtgatccgccgtcacggtcgggtcatggtcatctgcgacaacccgcgccacaagcagcgccagggctga

SEQ ID NO: 1139 - protein, 37 aa, Streptomyces coelicolor A3(2)
MKVKPSVKKICDKCRVIRRHGRVMVICDNPRHKQRQG

SEQ ID NO: 1140 - DNA, 117 bp, Buchnera aphidicola str. Sg (Schizaphis graminum)
  CDS (1)..(117): transl_table=11
atgaaagtgaaagcttctgtaaaagttctttgtcgaaactgtaaaatagttcgaagaaagaatgttgttcgagtgatttgtactaatgatcctaaacataagcagcgtcaaggttaa

SEQ ID NO: 1141 - protein, 38 aa, Buchnera aphidicola str. Sg (Schizaphis graminum)
MKVKASVKVLCRNCKIVRRKNVVRVICTNDPKHKQRQG

SEQ ID NO: 1142 - DNA, 117 bp, Chlorobium tepidum TLS
  CDS (1)..(117): transl_table=11
atgaaaatatattcgtctatcaaaaaacgttgcgagcactgcaggattatcaagcgcaaaggaaaacgatttgtgatctgcaaggtgaatccaagccacaagcagcgccaagggtga

SEQ ID NO: 1143 - protein, 38 aa, Chlorobium tepidum TLS
MKIYSSIKKRCEHCRIIKRKGKRFVICKVNPSHKQRQG

SEQ ID NO: 1144 - DNA, 114 bp, Thermosynechococcus elongatus BP-1
  CDS (1)..(114): transl_table=11
atgaaagtaagagcatcggtacggcgtatttgtgaaaaatgccgcgtcattcggcgacgtggccgggttatggtgatctgcaccaatccgaaacacaagcagcgccaagggtaa

SEQ ID NO: 1145 - protein, 37 aa, Thermosynechococcus elongatus BP-1
MKVRASVRRICEKCRVIRRRGRVMVICTNPKHKQRQG

SEQ ID NO: 1146 - DNA, 114 bp, Chaetosphaeridium globosum
  CDS (1)..(114): transl_table=11
atgaaagttcaagcatctgtacgtaaaatttgtgaaaattgtcgattaataagaagaagaaggagagtaatggtagtttgtaaaaatccaaaacataaacaaagacaaggataa

SEQ ID NO: 1147 - protein, 37 aa, Chaetosphaeridium globosum
MKVQASVRKICENCRLIRRRRRVMVVCKNPKHKQRQG

SEQ ID NO: 1148 - DNA, 114 bp, Oceanobacillus iheyensis HTE831
  CDS (1)..(114): transl_table=11
atgaaggtaagagcatcagtaaaaccaatttgcgagaaatgcaaagtcatcaaacgcaaaggtaaagtaatggtgatttgtgaaaatccgaaacacaagcaaaaacaaggctaa

SEQ ID NO: 1149 - protein, 37 aa, Oceanobacillus iheyensis HTE831
MKVRASVKPICEKCKVIKRKGKVMVICENPKHKQKQG

SEQ ID NO: 1150 - DNA, 114 bp, Bifidobacterium longum NCC2705
  CDS (1)..(114): transl_table=11
atgaaggtcagccctagtgtgaagaggatctgcgagaactgccgcgtgatccgtcgtcacggccgcgtcatggtgatctgcgtcaacccgcgccataagcagcgtcagggctga

SEQ ID NO: 1151 - protein, 37 aa, Bifidobacterium longum NCC2705
MKVSPSVKRICENCRVIRRHGRVMVICVNPRHKQRQG

SEQ ID NO: 1152 - DNA, 114 bp, Shewanella oneidensis MR-1
  CDS (1)..(114): transl_table=11
atgaaagttcgagcttccgtgaagaagatctgccgtaactgcaagatcgtcaagcgtagtggcgttgtgcgcgttatctgtgttgaaccaaaacacaaacagcgtcaaggctaa

SEQ ID NO: 1153 - protein, 37 aa, Shewanella oneidensis MR-1
MKVRASVKKICRNCKIVKRSGVVRVICVEPKHKQRQG

SEQ ID NO: 1154 - DNA, 117 bp, Pseudomonas putida KT2440
  CDS (1)..(117): transl_table=11
atgaaagttcgtgcatcggtgaaaaagctgtgccgcaactgcaagatcatccgtcgcgaaggcgtcgtgcgagtgatctgcagcgcggaaccgcgtcacaaacagcgccaaggctga

SEQ ID NO: 1155 - protein, 38 aa, Pseudomonas putida KT2440
MKVRASVKKLCRNCKIIRREGVVRVICSAEPRHKQRQG

SEQ ID NO: 1156 - DNA, 114 bp, Anthoceros formosae
  CDS (1)..(114)
atgaagattcgtgcttctgttcgcaaaatttgtgagaattgtcgattaatccgtaggcgaagacgagtcatggtggtttgttccaatcctaaacataaacagaaacaaggataa

SEQ ID NO: 1157 - protein, 37 aa, Anthoceros formosae
MKIRASVRKICENCRLIRRRRRVMVVCSNPKHKQKQG

SEQ ID NO: 1158 - DNA, 117 bp, Buchnera aphidicola str. Bp (Baizongia pistaciae)
  CDS (1)..(117): transl_table=11
atgaaagtgcgtacttcagttaaaaagttatgtagaaattgtaaaatagttcgtagatataatgtagttcgcgtaatttgtaaatcagaaccgaaacataaacaacgtcaaggttaa

SEQ ID NO: 1159 - protein, 38 aa, Buchnera aphidicola str. Bp (Baizongia pistaciae)
MKVRTSVKKLCRNCKIVRRYNVVRVICKSEPKHKQRQG

SEQ ID NO: 1160 - DNA, 120 bp, Lactobacillus plantarum WCFS1
  CDS (1)..(120): transl_table=11
atgaaagtaagaccatctgtaaagccaatgtgcgaacactgcaaagttattcgtcgtaaaggccgcgtgatgattatctgctctgctaatccaaagcataagcaacgccaaggtaaataa

SEQ ID NO: 1161 - protein, 39 aa, Lactobacillus plantarum WCFS1
MKVRPSVKPMCEHCKVIRRKGRVMIICSANPKHKQRQGK

SEQ ID NO: 1162 - DNA, 120 bp, Tropheryma whipplei str. Twist
  CDS (1)..(120): transl_table=11
atgcttgtgaaggtaaagcctagcgtaaagaagatttgtggggtctgtaaggtaattcgcaggaatggtcgcgttgctgttttgtgttcgaatcccaggcataagcagcggcagggctaa

SEQ ID NO: 1163 - protein, 39 aa, Tropheryma whipplei str. Twist
MLVKVKPSVKKICGVCKVIRRNGRVAVLCSNPRHKQRQG

SEQ ID NO: 1164 - DNA, 114 bp, Bacillus cereus ATCC 14579
  CDS (1)..(114): transl_table=11
atgaaagtaagaccgtcagttaaaccaatctgcgaaaaatgtaaagttattcgtagacgtggaaaagtaatggttatttgtgaaaaccctaaacataaacaaaaacaaggttaa

SEQ ID NO: 1165 - protein, 37 aa, Bacillus cereus ATCC 14579
MKVRPSVKPICEKCKVIRRRGKVMVICENPKHKQKQG

SEQ ID NO: 1166 - DNA, 114 bp, Mycoplasma gallisepticum R
  CDS (1)..(114): transl_table=4
atgaaagtaagatcatcagtaaaaccaatttgcaaagattgcaaagttattagacgccaaagggttgtaagagttatctgcaaaacccctaagcacaagcaaagacaaggatag

SEQ ID NO: 1167 - protein, 37 aa, Mycoplasma gallisepticum R
MKVRSSVKPICKDCKVIRRQRVVRVICKTPKHKQRQG

SEQ ID NO: 1168 - DNA, 117 bp, Wigglesworthia glossinidia endosymbiont of Glossina brevipalpis
  CDS (1)..(117): transl_table=11
atgaaagttcgtacttctgtaagaaaattatgtagaaattgtaaaattgttaaacgcaatagagttataagagtattatgtagtgtggacgcaaagcataagcaaagacagggataa

SEQ ID NO: 1169 - protein, 38 aa, Wigglesworthia glossinidia endosymbiont of Glossina brevipalpis
MKVRTSVRKLCRNCKIVKRNRVIRVLCSVDAKHKQRQG

SEQ ID NO: 1170 - DNA, 114 bp, Haemophilus ducreyi 35000HP
  CDS (1)..(114): transl_table=11
atgaaagttcgtgcttcagttaagaaattatgccgtaactgtaaagttgttaaacgtgaaggtgttgttcgtgtaatttgcaccgatcctaaacataagcaacgtcaaggttaa

SEQ ID NO: 1171 - protein, 37 aa, Haemophilus ducreyi 35000HP
MKVRASVKKLCRNCKVVKREGVVRVICTDPKHKQRQG

SEQ ID NO: 1172 - DNA, 117 bp, Prochlorococcus marinus subsp. marinus str. CCMP1375
  CDS (1)..(117): transl_table=11
atgaaggtgcgagcctcagtcaaaaaaatgtgtgaaaagtgccgggtgattcgtcgccatggcagggtaatggtcatttgtactgctactcaaaaacacaaacaacgtcaggggtaa

SEQ ID NO: 1173 - protein, 38 aa, Prochlorococcus marinus subsp. marinus str. CCMP1375
MKVRASVKKMCEKCRVIRRHGRVMVICTATQKHKQRQG

SEQ ID NO: 1174 - DNA, 117 bp, Candidatus Blochmannia floridanus
  CDS (1)..(117): transl_table=11
atgaaagttcgggcatcagtaagaaaaatgtgtcaacattgttttattataaagcgacgtaatgtcattcgtgtagtttgtcgtgtaacacctaaacataaacaacgacaaggttaa

SEQ ID NO: 1175 - protein, 38 aa, Candidatus Blochmannia floridanus
MKVRASVRKMCQHCFIIKRRNVIRVVCRVTPKHKQRQG

SEQ ID NO: 1176 - DNA, 117 bp, Prochlorococcus marinus subsp. pastoris str. CCMP1986
  CDS (1)..(117): transl_table=11
atgaaggttagagcctcagtaaaaaaaatgtgtgacaaatgtcgcgttattcgtagacatggtagggtcatggttatttgtaccgcgagtcctagacacaaacaacgtcaaggttaa

SEQ ID NO: 1177 - protein, 38 aa, Prochlorococcus marinus subsp. pastoris str. CCMP1986
MKVRASVKKMCDKCRVIRRHGRVMVICTASPRHKQRQG

SEQ ID NO: 1178 - DNA, 114 bp, Unknown
  Unidentified
  CDS (1)..(114)
atgaaggtgcgtgcctcggtcaagaaaatgtgtgacaaatgccgggtgatccgccgccacggcagggtcatggtgatctgctccacccctaagcacaagcagcgtcagggataa

SEQ ID NO: 1179 - protein, 37 aa, Unknown
  Unidentified
MKVRASVKKMCDKCRVIRRHGRVMVICSTPKHKQRQG

SEQ ID NO: 1180 - DNA, 114 bp, Synechococcus sp. WH 8102
  CDS (1)..(114): transl_table=11
atgaaggtgcgcgcttcagtcaagaaaatgtgcgacaagtgccgggtgatccgtcgccacggccgggtcatggtgatctgcaccaacccgaagcacaagcagcgccagggctga

SEQ ID NO: 1181 - protein, 37 aa, Synechococcus sp. WH 8102
MKVRASVKKMCDKCRVIRRHGRVMVICTNPKHKQRQG

SEQ ID NO: 1182 - DNA, 114 bp, Chromobacterium violaceum ATCC 12472
  CDS (1)..(114): transl_table=11
atgcgagtacagccttctgtaaagaagatttgccgtaattgcaaaatcattcgtcgcaatcgcgtagttcgcgtgatctgcacggacccgcgtcacaagcaaaaacagggctaa

SEQ ID NO: 1183 - protein, 37 aa, Chromobacterium violaceum ATCC 12472
MRVQPSVKKICRNCKIIRRNRVVRVICTDPRHKQKQG

SEQ ID NO: 1184 - DNA, 114 bp, Physcomitrella patens subsp. patens
  CDS (1)..(114): transl_table=11
atgaaagttcgtgcttctgttaaaaaaatttgtgataattgtagattaattcgtagacgaaaacgaattatggtagtttgttctaatccaaaacataaacaaagacaaggataa

SEQ ID NO: 1185 - protein, 37 aa, Physcomitrella patens subsp. patens
MKVRASVKKICDNCRLIRRRKRIMVVCSNPKHKQRQG

SEQ ID NO: 1186 - DNA, 117 bp, Porphyromonas gingivalis W83
  CDS (1)..(117): transl_table=11
atgaaagtaagagcatcagtaaagaagcgtactcccgaatgcaagattgtcaggagaaaaggacgcttatatgtaatcaataagaagaatcccaaatacaagcagcgtcagggataa

SEQ ID NO: 1187 - protein, 38 aa, Porphyromonas gingivalis W83
MKVRASVKKRTPECKIVRRKGRLYVINKKNPKYKQRQG

SEQ ID NO: 1188 - DNA, 114 bp, Gloeobacter violaceus PCC 7421
  CDS (1)..(114): transl_table=11
atgaaagtccgtgcgtccgtcaaaccgatatgtgagaagtgccgggtgatccgccgcaaggggcgggtcatggtcatttgcgagaaccccaagcacaagcagcggcagggctag

SEQ ID NO: 1189 - protein, 37 aa, Gloeobacter violaceus PCC 7421
MKVRASVKPICEKCRVIRRKGRVMVICENPKHKQRQG

SEQ ID NO: 1190 - DNA, 114 bp, Chlamydomonas reinhardtii
  CDS (1)..(114): transl_table=11
atgaaagtacgtgcttcggttaaaaaaatgtgtgataattgtcgtgttatcaaacgtaaaggaaaagttatggtaatttgttcaaacgctaaacataaacaaagacaaggttaa

SEQ ID NO: 1191 - protein, 37 aa, Chlamydomonas reinhardtii
MKVRASVKKMCDNCRVIKRKGKVMVICSNAKHKQRQG

SEQ ID NO: 1192 - DNA, 114 bp, Mycobacterium avium subsp. paratuberculosis K-10
  CDS (1)..(114): transl_table=11
atgaaggtcaacccgagcgtcaagccaatctgtgacaagtgcagggtgatccgtcggcatgggcgggtcatggtgatctgctccgatccgcgccacaagcagcgacaaggctga

SEQ ID NO: 1193 - protein, 37 aa, Mycobacterium avium subsp. paratuberculosis K-10
MKVNPSVKPICDKCRVIRRHGRVMVICSDPRHKQRQG

SEQ ID NO: 1194 - DNA, 117 bp, Lactobacillus johnsonii NCC 533
  CDS (1)..(117): transl_table=11
atgaaagttagaccatctgttaaaccaatgtgtgaacattgcaagattatcaaaagacagggtcgtgttatggtgatttgctctgcaaaccctaagcacaaacaacgtcaaggttaa

SEQ ID NO: 1195 - protein, 38 aa, Lactobacillus johnsonii NCC 533
MKVRPSVKPMCEHCKIIKRQGRVMVICSANPKHKQRQG

SEQ ID NO: 1196 - DNA, 114 bp, Treponema denticola ATCC 35405
  CDS (1)..(114): transl_table=11
atgaaggttagaacaagtgtaaaacctatttgtgataaatgtaaggttattaagcgcaacggaatagtacggataatctgtacaaatcctaagcataaacagagacaaggttaa

SEQ ID NO: 1197 - protein, 37 aa, Treponema denticola ATCC 35405
MKVRTSVKPICDKCKVIKRNGIVRIICTNPKHKQRQG

SEQ ID NO: 1198 - DNA, 114 bp, Bdellovibrio bacteriovorus HD100
  CDS (1)..(114): transl_table=11
atgaaagtaagaccatcagttaaggctatctgtaacaagtgtaaagttattaaaagaaaaggcgttattcgcgttatctgcgagaaccctaaacataagcaaaggcagggttaa

SEQ ID NO: 1199 - protein, 37 aa, Bdellovibrio bacteriovorus HD100
MKVRPSVKAICNKCKVIKRKGVIRVICENPKHKQRQG

SEQ ID NO: 1200 - DNA, 243 bp, Ashbya gossypii ATCC 10895
  CDS (1)..(243)
atgttctcgactagaatttgctccttgttggcgcgtccatttatggtgccaatagtgccccgcttcggctctgctttgctgcagaagccgctaaacggcgtggtggtaccccagtttaccaggggattcaaggtcagaacttcggtgaagaagttctgtgcgcactgctacatcgttagacgcaagggaagagtgtacgtgtactgcaagtccaacaacaagcacaagcagcgccaggggtag

SEQ ID NO: 1201 - protein, 80 aa, Ashbya gossypii ATCC 10895
MFSTRICSLLARPFMVPIVPRFGSALLQKPLNGVVVPQFTRGFKVRTSVKKFCAHCYIVRRKGRVYVYCKSNNKHKQRQG

SEQ ID NO: 1202 - DNA, 354 bp, Aspergillus terreus NIH2624
  CDS (1)..(354)
atgctctccctccgctccgtcctggggtcttcgacccgcgccctgcgccacctcccgtccgcgtcccggccgacaacgacaacgacgacgacgagcggcttcttcttctcccggcaatactcctcgcagctgacaaaatccctgacgaacggtctgcagagactgcgcggcgcggcgcagggcaatgtcgcgagtctggggtcgagcgtgcgccagatcgagcaggtccgtgggatgaagacccgctcgtctgtgaagcggttgtgtgatgggtgcaagcctgtccggagaaagaacagagtgtatatcatctgctcgaaaaaccccaagcacaagcagcggcagggcaaatag

SEQ ID NO: 1203 - protein, 117 aa, Aspergillus terreus NIH2624
MLSLRSVLGSSTRALRHLPSASRPTTTTTTTSGFFFSRQYSSQLTKSLTNGLQRLRGAAQGNVASLGSSVRQIEQVRGMKTRSSVKRLCDGCKPVRRKNRVYIICSKNPKHKQRQGK

SEQ ID NO: 1204 - DNA, 249 bp, Pichia stipitis CBS 6054
  CDS (1)..(249): transl_table=12
atgttcgctttcacttctataataagaaagcagattgtcgcaccagctgcggttaaccttttcagagctactccaacggtggctgctccactttcgggtgccgccccagcttctctcggtttctatagaggcttcaaggtcagaacctccgtcaagaagttctgcaaggactgctacatggtcagaagaagaggaagagtgtatgtctactgcaagtcaaatggcaagcacaagcagagacaaggatag

SEQ ID NO: 1205 - protein, 82 aa, Pichia stipitis CBS 6054
MFAFTSIIRKQIVAPAAVNLFRATPTVAAPLSGAAPASLGFYRGFKVRTSVKKFCKDCYMVRRRGRVYVYCKSNGKHKQRQG

SEQ ID NO: 1206 - DNA, 138 bp, Malassezia globosa CBS 7966
  CDS (1)..(138)
atgcccgcgctggcgcgtgggatgaaggtccgctcatctgtcaagaggctttgcaatcactgtgcgcttgtgcgtcgaaaaggtcggctgtatgtgatttgcagtaagaacgcaaagcacaagcagcgtcaaggataa

SEQ ID NO: 1207 - protein, 45 aa, Malassezia globosa CBS 7966
MPALARGMKVRSSVKRLCNHCALVRRKGRLYVICSKNAKHKQRQG

SEQ ID NO: 1208 - DNA, 363 bp, Pyrenophora tritici-repentis Pt-1C-BFP
  CDS (1)..(363)
atgaacgcccgcgccctcatcccccttttccgcaccctcaccctccgcaccccactacgcaccacactccgcacgcccaaagtacacatccacacacccacctgcgcctgcttctccacgacacgcctgacgcgccccaccgccagcctcaccacgcacttcacaggcctcagcacgagcaatgcgaccccaatggcaagcggcaaagtggccagcggcatgcggatacaaacacgcgggatgaaagtgcgcagctcggtgaagaaactttgtgatgggtgtaagagtgtgaggaggaagggggggagatatgtttatattatctgcagcaagaatcctaagcataagcagaggcaaggatag

SEQ ID NO: 1209 - protein, 120 aa, Pyrenophora tritici-repentis Pt-1C-BFP
MNARALIPLFRTLTLRTPLRTTLRTPKVHIHTPTCACFSTTRLTRPTASLTTHFTGLSTSNATPMASGKVASGMRIQTRGMKVRSSVKKLCDGCKSVRRKGGRYVYIICSKNPKHKQRQG

SEQ ID NO: 1210 - DNA, 234 bp, Trichoplax adhaerens
  CDS (1)..(234)
atgttgagtagcatcgtgcaaactgccttacgactaagttgcaattatttagaaaggttctctgcatcacctttccgacaacagaattgggtaacgaataaactcaatgccagaaccttcaaagtgaaatcatcgttaaagcttatgtgctctggttgtaaatttgttcgaaggaaaggtcgattgtacgtcatctgcaagaaaaaacccaggcataagcaaaggcaaggataa

SEQ ID NO: 1211 - protein, 77 aa, Trichoplax adhaerens
MLSSIVQTALRLSCNYLERFSASPFRQQNWVTNKLNARTFKVKSSLKLMCSGCKFVRRKGRLYVICKKKPRHKQRQG

SEQ ID NO: 1212 - DNA, 351 bp, Penicillium marneffei ATCC 18224
  CDS (1)..(351)
atgtcgcccttacgctccgccctctccacggcctcccgatctctcctctccgtgcgccaattcgctgtcacatccttccgccagaacaatcatgtctcaagtccattttcacaattacggaagttctcaggtcttttgacccagagccgatggggcggtctattgcgatcgaagattgcaaacaatgcgaaacagctttcgtcgacatatattttttcgcaggctagtgggatgaagactagatcttctgtcaagaggctgtgtgatgggtgcaagcctgtgcgacggaagaatagagtctacattatctgctcgaagaatccaaaacataagcagcgtcaaggcaaatag

SEQ ID NO: 1213 - protein, 116 aa, Penicillium marneffei ATCC 18224
MSPLRSALSTASRSLLSVRQFAVTSFRQNNHVSSPFSQLRKFSGLLTQSRWGGLLRSKIANNAKQLSSTYIFSQASGMKTRSSVKRLCDGCKPVRRKNRVYIICSKNPKHKQRQGK

SEQ ID NO: 1214 - DNA, 252 bp, Debaryomyces hansenii CBS767
  CDS (1)..(252): transl_table=12
atgttcgccttgtcatccataataaaaagacaagtggttggtcctactgtcggaagagcgttatttaatgctacaccaaaattgactgttcctgcagtcaacaactcaccattactgttgaattcaatcagaggcttcaaggtaagaacatcggtcaagaagttctgcaaagattgctacatggtcagaaggaagggtagagtgtatgtttactgcaagagtaacggtaaacataaacaaagacaaggttag

SEQ ID NO: 1215 - protein, 83 aa, Debaryomyces hansenii CBS767
MFALSSIIKRQVVGPTVGRALFNATPKLTVPAVNNSPLLLNSIRGFKVRTSVKKFCKDCYMVRRKGRVYVYCKSNGKHKQRQG

SEQ ID NO: 1216 - DNA, 324 bp, Cryptococcus neoformans var. neoformans JEC21
  CDS (1)..(324)
atgctcgccatcctccgccgtatcccacagcttgcaagggctggcccttctaaccctacacaacgattctgctccacctgcccgccccgaccccttgcctccaccctccgaccatctgtcccttcattatccacccatctcgcctctcgacctactcttgcgtctcaggcaacaaatgtcggcaggggaaattttcaggtcaggggtatgaaagtgagaagtagcgtgaagaagttttgtgatggctgtttaatcgttaggaggaaagggagaatatatgtcatctgttcaaagaaccccaagcacaagcagcgacaaggatag

SEQ ID NO: 1217 - protein, 107 aa, Cryptococcus neoformans var. neoformans JEC21
MLAILRRIPQLARAGPSNPTQRFCSTCPPRPLASTLRPSVPSLSTHLASRPTLASQATNVGRGNFQVRGMKVRSSVKKFCDGCLIVRRKGRIYVICSKNPKHKQRQG

SEQ ID NO: 1218 - DNA, 114 bp, Halorhodospira halophila SL1
  CDS (1)..(114): transl_table=11
atgaaagtcagggcatcggtcaagcgggtttgccgcaactgcaaaatcgtgaagcggcgcgggaccgtgcgggtgatctgcacggaggcccggcacaaacagcgccagggctga

SEQ ID NO: 1219 - protein, 37 aa, Halorhodospira halophila SL1
MKVRASVKRVCRNCKIVKRRGTVRVICTEARHKQRQG

SEQ ID NO: 1220 - DNA, 114 bp, Prochlorococcus marinus str. MIT 9303
  CDS (1)..(114): transl_table=11
atgaaggtgcgtgcctcggtcaagaaaatgtgtgagaaatgccgggtgatccgccgccacggcagggtcatggtgatctgctccaaccctaagcacaagcagcgtcagggataa

SEQ ID NO: 1221 - protein, 37 aa, Prochlorococcus marinus str. MIT 9303
MKVRASVKKMCEKCRVIRRHGRVMVICSNPKHKQRQG

SEQ ID NO: 1222 - DNA, 114 bp, Chlorokybus atmophyticus
  CDS (1)..(114): transl_table=11
atgaaagttcgtgcttcagttcgtaaaatatgtgaagattgtcgtcttatccgtagacgaggaagattaatggttatatgctctaatcctaaacataaacaacgacaaggatag

SEQ ID NO: 1223 - protein, 37 aa, Chlorokybus atmophyticus
MKVRASVRKICEDCRLIRRRGRLMVICSNPKHKQRQG

SEQ ID NO: 1224 - DNA, 114 bp, Methylibium petroleiphilum PM1
  CDS (1)..(114): transl_table=11
atgaaggtagctgcatccgtcaagaagatgtgccgcaattgcaaggtcatccgtcgcaagggtgtggtgcgcgtgatttgcaccgacccgcgccacaagcagcgccagggctga

SEQ ID NO: 1225 - protein, 37 aa, Methylibium petroleiphilum PM1
MKVAASVKKMCRNCKVIRRKGVVRVICTDPRHKQRQG

SEQ ID NO: 1226 - DNA, 114 bp, Angiopteris evecta
  CDS (1)..(114): transl_table=11
atgaaaattcgtgcttctgttcgtaaaatttgtgaaaaatgtcgattgatccgtcgacgaagacggattatgataatttgtttgaatccgaaacataaacaacgacaaggataa

SEQ ID NO: 1227 - protein, 37 aa, Angiopteris evecta
MKIRASVRKICEKCRLIRRRRRIMIICLNPKHKQRQG

SEQ ID NO: 1228 - DNA, 114 bp, Clostridium thermocellum ATCC 27405
  CDS (1)..(114): transl_table=11
atgaaggtaagaccatctgtaaaggttatttgcgaaaaatgcaagataatcagaagaaaaggaagagtaatggtaatttgccagaatcccaaacataaacaaagacagggttaa

SEQ ID NO: 1229 - protein, 37 aa, Clostridium thermocellum ATCC 27405
MKVRPSVKVICEKCKIIRRKGRVMVICQNPKHKQRQG

SEQ ID NO: 1230 - DNA, 114 bp, Actinobacillus pleuropneumoniae L20
  CDS (1)..(114): transl_table=11
atgaaagttcgtgcttcagttaagaaattatgccgtaactgtaaagttgttaaacgtcaaggtgttgttcgcgtaatttgtagcgatcctaaacacaaacaacgtcaaggttaa

SEQ ID NO: 1231 - protein, 37 aa, Actinobacillus pleuropneumoniae L20
MKVRASVKKLCRNCKVVKRQGVVRVICSDPKHKQRQG

SEQ ID NO: 1232 - DNA, 114 bp, Saccharopolyspora erythraea NRRL 2338
  CDS (1)..(114): transl_table=11
atgaaggtccagccgagtgtgaagcgaatctgcgacaagtgccaggtcatccgccgccacgggcgcgtcctggtcatctgcgacaaccagcgccacaagcagcgccagggctga

SEQ ID NO: 1233 - protein, 37 aa, Saccharopolyspora erythraea NRRL 2338
MKVQPSVKRICDKCQVIRRHGRVLVICDNQRHKQRQG

SEQ ID NO: 1234 - DNA, 114 bp, Desulfotomaculum reducens MI-1
  CDS (1)..(114): transl_table=11
atgaaagtcagaccatcggttaaaccgatttgtgaaaaatgcaagatcatccgccgtgaaggtaaggttatggttatctgcgaaaaccccaagcacaagcaaaagcaagggtaa

SEQ ID NO: 1235 - protein, 37 aa, Desulfotomaculum reducens MI-1
MKVRPSVKPICEKCKIIRREGKVMVICENPKHKQKQG

SEQ ID NO: 1236 - DNA, 114 bp, Phaseolus vulgaris
  CDS (1)..(114): transl_table=11
atgaaaataaatgcctcggttcgtaaaatttgtgaaaaatgtcgattgattcgaagacggggacgaattatagtaatttgtttcaatccaaaacataaacaaagacaaggataa

SEQ ID NO: 1237 - protein, 37 aa, Phaseolus vulgaris
MKINASVRKICEKCRLIRRRGRIIVICFNPKHKQRQG

SEQ ID NO: 1238 - DNA, 117 bp, Prosthecochloris vibrioformis DSM 265
  CDS (1)..(117): transl_table=11
atgaaagtgtattcatcgatcaaaaaaagatgcgagcattgccgcatcatcaagcgcaaaggcaaacggtttgtcatctgcaaggtgaacccgagccacaaacagcgccagggttga

SEQ ID NO: 1239 - protein, 38 aa, Prosthecochloris vibrioformis DSM 265
MKVYSSIKKRCEHCRIIKRKGKRFVICKVNPSHKQRQG

SEQ ID NO: 1240 - DNA, 114 bp, Aeromonas salmonicida subsp. salmonicida A449
  CDS (1)..(114): transl_table=11
atgaaagttcgtgcttccgttaaggcaatctgccgtaactgcaaaatcatcaagcgtcacggtgtggtgcgtgtgatttgcagcgagccaaagcataaacagcgccaaggctaa

SEQ ID NO: 1241 - protein, 37 aa, Aeromonas salmonicida subsp. salmonicida A449
MKVRASVKAICRNCKIIKRHGVVRVICSEPKHKQRQG

SEQ ID NO: 1242 - DNA, 114 bp, Salinispora tropica CNB-440
  CDS (1)..(114): transl_table=11
atgaaggtcaagccgagcgtcaagcggatctgtaacaagtgccgggtgatccgccggcacggccgggtcatggtcatctgcgccgacccgcgccacaagcagcgtcagggctga

SEQ ID NO: 1243 - protein, 37 aa, Salinispora tropica CNB-440
MKVKPSVKRICNKCRVIRRHGRVMVICADPRHKQRQG

SEQ ID NO: 1244 - DNA, 117 bp, Pseudomonas stutzeri A1501
  CDS (1)..(117): transl_table=11
atgaaagttcgtgcatcggttaaaaagctgtgccgtaactgcaagatcatccgtcgcgacggtgtcgtgcgcgtgatctgcagcgcagaaccgcgtcacaagcagcgccaaggctga

SEQ ID NO: 1245 - protein, 38 aa, Pseudomonas stutzeri A1501
MKVRASVKKLCRNCKIIRRDGVVRVICSAEPRHKQRQG

SEQ ID NO: 1246 - DNA, 117 bp, Enterobacter sp. 638
  CDS (1)..(117): transl_table=11
atgaaagttcgtgcttccgtcaagaaattatgccgtaactgcaaaatcgttaagcgtgaaggtgttattcgcgtgatttgcagtgccgagccgaaacataaacagcgtcaaggctga

SEQ ID NO: 1247 - protein, 38 aa, Enterobacter sp. 638
MKVRASVKKLCRNCKIVKREGVIRVICSAEPKHKQRQG

SEQ ID NO: 1248 - DNA, 114 bp, Pelotomaculum thermopropionicum SI
  CDS (1)..(114): transl_table=11
atgaaagtgaggccatccgttaagccaatctgcgagaagtgcaagattatccgcaggaaaggcagaataatggtaatctgtgaaaatcccaagcacaagcaggcgcaggggtaa

SEQ ID NO: 1249 - protein, 37 aa, Pelotomaculum thermopropionicum SI
MKVRPSVKPICEKCKIIRRKGRIMVICENPKHKQAQG

SEQ ID NO: 1250 - DNA, 114 bp, Candidatus Vesicomyosocius okutanii HA
  CDS (1)..(114): transl_table=11
atgaaggtaagagcatcagttaagagaatttgtaacaattgtaaaattattaagcgtcatggagttgttcgtgttatttgtaaagaaccccgtcataagcaaagacaaggttaa

SEQ ID NO: 1251 - protein, 37 aa, Candidatus Vesicomyosocius okutanii HA
MKVRASVKRICNNCKIIKRHGVVRVICKEPRHKQRQG

SEQ ID NO: 1252 - DNA, 114 bp, Clavibacter michiganensis subsp. michiganensis NCPPB 382
  CDS (1)..(114): transl_table=11
atgaaggtcaaccccagcgtcaagaggatctgcgagaagtgcaaggtcatccgacgcaacggccgcgtgcgcgtcatctgcgacaacccccgccacaagcaggtccagggctag

SEQ ID NO: 1253 - protein, 37 aa, Clavibacter michiganensis subsp. michiganensis NCPPB 382
MKVNPSVKRICEKCKVIRRNGRVRVICDNPRHKQVQG

SEQ ID NO: 1254 - DNA, 114 bp, Synechococcus sp. WH 7803
  CDS (1)..(114): transl_table=11
atgaaggtgcgcgcctcggtcaagaaaatgtgtgacaaatgccgggtgattcgtcgccacggtcgcgtcatggtgatctgcgaaaaccctaagcacaagcagcgtcagggctga

SEQ ID NO: 1255 - protein, 37 aa, Synechococcus sp. WH 7803
MKVRASVKKMCDKCRVIRRHGRVMVICENPKHKQRQG

SEQ ID NO: 1256 - DNA, 114 bp, Synechococcus sp. RCC307
  CDS (1)..(114): transl_table=11
atgaaggtgcgcgcctcagtgaagcgcatgtgcgacaagtgccgggtgattcgtcgccacggccgcgtcatggtcatctgcgccaaccccaagcacaagcaacgccagggctga

SEQ ID NO: 1257 - protein, 37 aa, Synechococcus sp. RCC307
MKVRASVKRMCDKCRVIRRHGRVMVICANPKHKQRQG

SEQ ID NO: 1258 - DNA, 120 bp, Lactobacillus reuteri DSM 20016
  CDS (1)..(120): transl_table=11
atgaaagtaagaccatctgttaaaaagatgtgtgagcactgcaagatcgttaagcgtaatggtcgtgttatggttatttgctctgctaacccaaagcataagcaacgtcaaggtaagtaa

SEQ ID NO: 1259 - protein, 39 aa, Lactobacillus reuteri DSM 20016
MKVRPSVKKMCEHCKIVKRNGRVMVICSANPKHKQRQGK

SEQ ID NO: 1260 - DNA, 117 bp, Roseiflexus sp. RS-1
  CDS (1)..(117): transl_table=11
atgaaagttcgagcgtcggtcaagccgcgctgcgaatattgccgcgttatcaaacgcaagggtgtgctgcgcgtcatctgtagtcgccaacccaagcataagcagcgccagggatga

SEQ ID NO: 1261 - protein, 38 aa, Roseiflexus sp. RS-1
MKVRASVKPRCEYCRVIKRKGVLRVICSRQPKHKQRQG

SEQ ID NO: 1262 - DNA, 114 bp, Chloranthus spicatus
  CDS (1)..(114): transl_table=11
atgaaaataagggcctccgttcgtaaaatttgtgaaaaatgtcaactgatccgtaggcggggacgaattctagtaatttgttccaatccgagacataaacagaggcaagggtaa

SEQ ID NO: 1263 - protein, 37 aa, Chloranthus spicatus
MKIRASVRKICEKCQLIRRRGRILVICSNPRHKQRQG

SEQ ID NO: 1264 - DNA, 114 bp, Dioscorea elephantipes
  CDS (1)..(114): transl_table=11
atgaaaataagggcttccgttcgtaaaatttgtgagaaatgtcgactgattcgtaggcgtggacgaattatggtgatttgttccaatccgagacataaacagagacaagggtaa

SEQ ID NO: 1265 - protein, 37 aa, Dioscorea elephantipes
MKIRASVRKICEKCRLIRRRGRIMVICSNPRHKQRQG

SEQ ID NO: 1266 - DNA, 117 bp, Flavobacterium psychrophilum JIP02/86
  CDS (1)..(117): transl_table=11
atgaaagtaagagcatcagtaaaaaagagaagtcccgagtgcaaaattgtacgtagaaaagggagattgtacgttattaacaaaaagaatcctagatttaaacaaagacaaggataa

SEQ ID NO: 1267 - protein, 38 aa, Flavobacterium psychrophilum JIP02/86
MKVRASVKKRSPECKIVRRKGRLYVINKKNPRFKQRQG

SEQ ID NO: 1268 - DNA, 117 bp, Thermosipho melanesiensis BI429
  CDS (1)..(117): transl_table=11
atgaaagtacaatcatctgtaaagaaaagatgcgaacattgtaagataattaaaagaaaaggaagggtttatgttatttgtaaagtaaatccaaagcacaatcagaagcaaggttga

SEQ ID NO: 1269 - protein, 38 aa, Thermosipho melanesiensis BI429
MKVQSSVKKRCEHCKIIKRKGRVYVICKVNPKHNQKQG

SEQ ID NO: 1270 - DNA, 114 bp, Cycas taitungensis
  CDS (1)..(114): transl_table=11
atgaaaatccgcgcttctgttcgtaaaatttgtgaaaagtgtcgactaattcgtaggcggggacgagttatggtaatttgttccaatccgagacataaacagagacaggggtaa

SEQ ID NO: 1271 - protein, 37 aa, Cycas taitungensis
MKIRASVRKICEKCRLIRRRGRVMVICSNPRHKQRQG

SEQ ID NO: 1272 - DNA, 114 bp, Marinomonas sp. MWYL1
  CDS (1)..(114): transl_table=11
atgaaagtacgtgcatctgtaaagaaaatctgtcgtaactgcaaaatcgttcgtcgtaacggttcagttcgagtgatttgcgttgagcctcgtcacaaacagcgtcaaggttaa

SEQ ID NO: 1273 - protein, 37 aa, Marinomonas sp. MWYL1
MKVRASVKKICRNCKIVRRNGSVRVICVEPRHKQRQG

SEQ ID NO: 1274 - DNA, 114 bp, Actinobacillus succinogenes 130Z
  CDS (1)..(114): transl_table=11
atgaaagttcgtgcttccgtaaaaagaatctgtcgtaactgtaaaattgttaaacgtgaaggtgtcgtacgtgttttatgtaccgaccctaaacataaacaacgtcaaggttaa

SEQ ID NO: 1275 - protein, 37 aa, Actinobacillus succinogenes 130Z
MKVRASVKRICRNCKIVKREGVVRVLCTDPKHKQRQG

SEQ ID NO: 1276 - DNA, 114 bp, Janthinobacterium sp. Marseille
  CDS (1)..(114): transl_table=11
atgaaagtgctcgcatcagttaagcggatctgccgcaactgtaagatcatcaagcgcaagggcgtcgttcgagtaatttgcatcgaaccgcgtcataagcagcgccaaggttaa

SEQ ID NO: 1277 - protein, 37 aa, Janthinobacterium sp. Marseille
MKVLASVKRICRNCKIIKRKGVVRVICIEPRHKQRQG

SEQ ID NO: 1278 - DNA, 114 bp, Nitratiruptor sp. SB155-2
  CDS (1)..(114): transl_table=11
atgaaagttagaccatctgtaaaaaagatgtgtgaaaaatgcaagattatcaaacgcaaaggcgttgtacgagtaatctgtgtaaatccaaaacacaaacaaagacaaggatag

SEQ ID NO: 1279 - protein, 37 aa, Nitratiruptor sp. SB155-2
MKVRPSVKKMCEKCKIIKRKGVVRVICVNPKHKQRQG

SEQ ID NO: 1280 - DNA, 114 bp, Sulfurovum sp. NBC37-1
  CDS (1)..(114): transl_table=11
atgaaggttagaccatcagtaaagaagatgtgcgacgattgtaaagtgatcaagcgcaagggtatcgtacgcgtgatttgtaaaaatccaaaacataaacagagacaaggataa

SEQ ID NO: 1281 - protein, 37 aa, Sulfurovum sp. NBC37-1
MKVRPSVKKMCDDCKVIKRKGIVRVICKNPKHKQRQG

SEQ ID NO: 1282 - DNA, 114 bp, Kineococcus radiotolerans SRS30216
  CDS (1)..(114): transl_table=11
atgaaggtcaagccgagcgtcaagaagatctgcgacaagtgcaaggtgatccgccgtcacgggcgagtcatgatcatctgcgagaacctgcgccacaagcagcgccagggctga

SEQ ID NO: 1283 - protein, 37 aa, Kineococcus radiotolerans SRS30216
MKVKPSVKKICDKCKVIRRHGRVMIICENLRHKQRQG

SEQ ID NO: 1284 - DNA, 114 bp, Medicago truncatula
  CDS (1)..(114): transl_table=11
atgaaagtaggagcctctgttcgtaaaatttgtgaaaaatgtcgattgatacgcaggcgaggtcgaattatagtaatttgttccaacccaaaacataaacaaagacaaggataa

SEQ ID NO: 1285 - protein, 37 aa, Medicago truncatula
MKVGASVRKICEKCRLIRRRGRIIVICSNPKHKQRQG

SEQ ID NO: 1286 - DNA, 114 bp, Leptosira terrestris
  CDS (1)..(114): transl_table=11
atgaaagtacgtgcttctgttcgaaaaatttgtattaattgtcgtttaattcgacgaaaacgaaaaattatggttatttgttcaaatccaaagcataaacagcggcaaggttaa

SEQ ID NO: 1287 - protein, 37 aa, Leptosira terrestris
MKVRASVRKICINCRLIRRKRKIMVICSNPKHKQRQG

SEQ ID NO: 1288 - DNA, 117 bp, Fervidobacterium nodosum Rt17-B1
  CDS (1)..(117): transl_table=11
atgaaagtaaaggcatcagttggaaaaagatgcgaatattgtaaggttatccgtagaagaggaaaagtttacgttgtatgtaaagtaaacccaaaacataatcagagacaaggttaa

SEQ ID NO: 1289 - protein, 38 aa, Fervidobacterium nodosum Rt17-B1
MKVKASVGKRCEYCKVIRRRGKVYVVCKVNPKHNQRQG

SEQ ID NO: 1290 - DNA, 114 bp, Cuscuta gronovii
  CDS (1)..(114): transl_table=11
atgaaaaaaagagcctctgttcggaaaatctgtgataaatgtcgactaatccggcgaggaggacgaattttagtaatttgctctaacccgagacataaacaaggacagggataa

SEQ ID NO: 1291 - protein, 37 aa, Cuscuta gronovii
MKKRASVRKICDKCRLIRRGGRILVICSNPRHKQGQG

SEQ ID NO: 1292 - DNA, 114 bp, Cuscuta reflexa
  CDS (1)..(114): transl_table=11
atgaaaataagagcttctgttcgtcaaatttgtgacaaatgtcgactaatccgtagaagaggacgaattagagtaatttgttacaacccgagacataaacaacgacagggataa

SEQ ID NO: 1293 - protein, 37 aa, Cuscuta reflexa
MKIRASVRQICDKCRLIRRRGRIRVICYNPRHKQRQG

SEQ ID NO: 1294 - DNA, 117 bp, Roseiflexus castenholzii DSM 13941
  CDS (1)..(117): transl_table=11
atgaaagttcaggcgtcggtcaaaccgcgctgcgaatattgtcgcgtcatcaaacgcaaaggggtgctgcgcgttatctgtagccgccaacccaagcataagcagcgccagggatag

SEQ ID NO: 1295 - protein, 38 aa, Roseiflexus castenholzii DSM 13941
MKVQASVKPRCEYCRVIKRKGVLRVICSRQPKHKQRQG

SEQ ID NO: 1296 - DNA, 117 bp, Thermotoga lettingae TMO
  CDS (1)..(117): transl_table=11
atgaaagtcaggtcttctgtgaaaaaaagatgcgaacactgtcaggtaattaaaagacatgggcgagtattaataatctgtaaagcaaatccaaaacataaccagaaacagggttga

SEQ ID NO: 1297 - protein, 38 aa, Thermotoga lettingae TMO
MKVRSSVKKRCEHCQVIKRHGRVLIICKANPKHNQKQG

SEQ ID NO: 1298 - DNA, 114 bp, Arcobacter butzleri RM4018
  CDS (1)..(114): transl_table=11
atgaaagtaagagcttcagtaaaaaaaatgtgtgataaatgcaaagttatcaaaagaagaggtatcgtaagagtaatctgcgaaaacaaaaaacataaacaaagacaaggataa

SEQ ID NO: 1299 - protein, 37 aa, Arcobacter butzleri RM4018
MKVRASVKKMCDKCKVIKRRGIVRVICENKKHKQRQG

SEQ ID NO: 1300 - DNA, 114 bp, Alkaliphilus oremlandii OhILAs
  CDS (1)..(114): transl_table=11
atgaaggttagaccatcggtaaaaccaatttgcgaaaagtgcaaaatcattaaaagaggcggcagagttatggttatctgcgaaaatcctaagcacaagcaaaaacaaggttaa

SEQ ID NO: 1301 - protein, 37 aa, Alkaliphilus oremlandii OhILAs
MKVRPSVKPICEKCKIIKRGGRVMVICENPKHKQKQG

SEQ ID NO: 1302 - DNA, 114 bp, Salinispora arenicola CNS-205
  CDS (1)..(114): transl_table=11
atgaaggtcaagccgagcgtcaagcggatctgcaacaagtgccgggtgatccgtcggcacggccgggtcatggtcatctgcaccgacccgcgccacaagcagcgtcagggctga

SEQ ID NO: 1303 - protein, 37 aa, Salinispora arenicola CNS-205
MKVKPSVKRICNKCRVIRRHGRVMVICTDPRHKQRQG

SEQ ID NO: 1304 - DNA, 114 bp, Cuscuta exaltata
  CDS (1)..(114): transl_table=11
atgaaaataagagcttctgttcgtcaaatttgtgacaaatgtcgactaatccgtagaagaggacgaattctagtaatttgttacaacccgagacataaacaacgacagggataa

SEQ ID NO: 1305 - protein, 37 aa, Cuscuta exaltata
MKIRASVRQICDKCRLIRRRGRILVICYNPRHKQRQG

SEQ ID NO: 1306 - DNA, 114 bp, Clostridium phytofermentans ISDg
  CDS (1)..(114): transl_table=11
atgaaggttagatcttcagttaaaccaatttgcgagaaatgtaaaatcattaaaagaaagggcgcaatcagagttatctgtgagaacccaaaacacaaacaaagacaaggctaa

SEQ ID NO: 1307 - protein, 37 aa, Clostridium phytofermentans ISDg
MKVRSSVKPICEKCKIIKRKGAIRVICENPKHKQRQG

SEQ ID NO: 1308 - DNA, 117 bp, Petrotoga mobilis SJ95
  CDS (1)..(117): transl_table=11
atgaaggtcagggcttctgtaaaaaaacgatgtgagcactgtaaaatagtaaaaagaggcggaaaggtttgggttgtatgttcaaaaaatccaaagcacaagcaaagacaaggataa

SEQ ID NO: 1309 - protein, 38 aa, Petrotoga mobilis SJ95
MKVRASVKKRCEHCKIVKRGGKVWVVCSKNPKHKQRQG

SEQ ID NO: 1310 - DNA, 117 bp, Sorangium cellulosum 'So ce 56'
  CDS (1)..(117): transl_table=11
atgaaggtgcgcccgagcgtcaagaagatttgcgacaagtgcaaggtggtccggcggcgtggtgtcgttcggatcatctgcgagaacccccgccacaagcagcgccaggggaactag

SEQ ID NO: 1311 - protein, 38 aa, Sorangium cellulosum 'So ce 56'
MKVRPSVKKICDKCKVVRRRGVVRIICENPRHKQRQGN

SEQ ID NO: 1312 - DNA, 117 bp, Chloroflexus aurantiacus J-10-fl
  CDS (1)..(117): transl_table=11
atgaaagtgcgagcgtcggtaaagccgcgctgcgagtattgcaaggtgattaagcgcaagggcgtgatccgggtgatctgctcgcgtacaccgaagcataaacagcggcaaggataa

SEQ ID NO: 1313 - protein, 38 aa, Chloroflexus aurantiacus J-10-fl
MKVRASVKPRCEYCKVIKRKGVIRVICSRTPKHKQRQG

SEQ ID NO: 1314 - DNA, 114 bp, Actinobacillus pleuropneumoniae serovar 3 str. JL03
  CDS (1)..(114): transl_table=11
atgaaagttcgtgcttcagttaagaaattatgccgtaactgtaaagttgttaaacgtgaaggtgttgttcgcgtaatttgtagcgatcctaaacacaaacaacgtcaaggttaa

SEQ ID NO: 1315 - protein, 37 aa, Actinobacillus pleuropneumoniae serovar 3 str. JL03
MKVRASVKKLCRNCKVVKREGVVRVICSDPKHKQRQG

SEQ ID NO: 1316 - DNA, 141 bp, Thermoanaerobacter pseudethanolicus ATCC 33223
  CDS (1)..(141): transl_table=11
gtggaaagtgataaggaggtattgaagatgaaggtaagaccatctgtaaaacctatttgtgaaaaatgtaaagttataaaaagaaaaggtagagttatggtaatttgtgaaaatccaaagcataaacaaaaacaaggctag

SEQ ID NO: 1317 - protein, 46 aa, Thermoanaerobacter pseudethanolicus ATCC 33223
MESDKEVLKMKVRPSVKPICEKCKVIKRKGRVMVICENPKHKQKQG

SEQ ID NO: 1318 - DNA, 114 bp, Heliobacterium modesticaldum Ice1
  CDS (1)..(114): transl_table=11
atgaaagtgcggccttcagtgaagacgatctgtgacaagtgcaagatcatcaaacgcaaaggcaaagtcatggttatttgcgagaacccgaagcacaagcaaaaacaaggttaa

SEQ ID NO: 1319 - protein, 37 aa, Heliobacterium modesticaldum Ice1
MKVRPSVKTICDKCKIIKRKGKVMVICENPKHKQKQG

SEQ ID NO: 1320 - DNA, 114 bp, Aneura mirabilis
  CDS (1)..(114): transl_table=11
atgaagattcgtgcctccgttcgtaaaatttgtgagaattgtcgattaattcgtcgtcggaaacgggtgatggtggtttgttcgaatccgaaacacaaacagaaacagggttag

SEQ ID NO: 1321 - protein, 37 aa, Aneura mirabilis
MKIRASVRKICENCRLIRRRKRVMVVCSNPKHKQKQG

SEQ ID NO: 1322 - DNA, 114 bp, Mycobacterium abscessus
  CDS (1)..(114): transl_table=11
atgaaggtcaacccgagcgtcaagccgatctgcgacaagtgccgcgttattcgccggcacgggcgggtcatggtgatctgccaggacccccgccacaagcagcggcagggctaa

SEQ ID NO: 1323 - protein, 37 aa, Mycobacterium abscessus
MKVNPSVKPICDKCRVIRRHGRVMVICQDPRHKQRQG

SEQ ID NO: 1324 - DNA, 114 bp, Clavibacter michiganensis subsp. sepedonicus
  CDS (1)..(114): transl_table=11
atgaaggtcaatcccagcgtcaagaggatctgcgagaagtgcaaggtcatccgacgcaacgggcgcgtgcgcgtcatctgcgagaacccgcgccacaagcaggtccagggctag

SEQ ID NO: 1325 - protein, 37 aa, Clavibacter michiganensis subsp. sepedonicus
MKVNPSVKRICEKCKVIRRNGRVRVICENPRHKQVQG

SEQ ID NO: 1326 - DNA, 114 bp, Candidatus Desulforudis audaxviator MP104C
  CDS (1)..(114): transl_table=11
gtgaaggtcaaaccttccgtaaaaaccgtttgtgagaagtgtaaggtgattcgccgtaagggtaaagtcgtgattatttgttccaacgccaagcataaacaaaggcaaggataa

SEQ ID NO: 1327 - protein, 37 aa, Candidatus Desulforudis audaxviator MP104C
MKVKPSVKTVCEKCKVIRRKGKVVIICSNAKHKQRQG

SEQ ID NO: 1328 - DNA, 114 bp, Trachelium caeruleum
  CDS (1)..(114): transl_table=11
atgaaactaagagcctctattcgtaaaatttgtgaaaaatgtcgattaatacgccggcagaaccgaattctagtaatttgttccaacccaagacataaacaaagacaaggataa

SEQ ID NO: 1329 - protein, 37 aa, Trachelium caeruleum
MKLRASIRKICEKCRLIRRQNRILVICSNPRHKQRQG

SEQ ID NO: 1330 - DNA, 123 bp, Candidatus Cloacamonas acidaminovorans
  CDS (1)..(123): transl_table=11
atgataatgaaagtgaaagcttccgttaaaaaaatctgtaaggattgcaaaattattaaacgcaacggtattatccgggttatttgcagttcaaacccaaaacataaacagagacagggttaa

SEQ ID NO: 1331 - protein, 40 aa, Candidatus Cloacamonas acidaminovorans
MIMKVKASVKKICKDCKIIKRNGIIRVICSSNPKHKQRQG

SEQ ID NO: 1332 - DNA, 114 bp, Leptothrix cholodnii SP-6
  CDS (1)..(114): transl_table=11
atgaaagtctccgcatccgtcaagaagatctgccgcaattgcaagatcattcgtcgcaagggtgtggtccgtgtcatttgcaccgacccgcgccacaagcaacgccaaggctga

SEQ ID NO: 1333 - protein, 37 aa, Leptothrix cholodnii SP-6
MKVSASVKKICRNCKIIRRKGVVRVICTDPRHKQRQG

SEQ ID NO: 1334 - DNA, 117 bp, Polynucleobacter necessarius subsp. necessarius STIR1
  CDS (1)..(117): transl_table=11
atgaaagttttagcatccgttaagtgtatttgcagaaattgcaagatcattaagcgcaaacgcgttgtgcgtgtgatctgttcttcagacgcacgtcataagcagcgtcaaggctga

SEQ ID NO: 1335 - protein, 38 aa, Polynucleobacter necessarius subsp. necessarius STIR1
MKVLASVKCICRNCKIIKRKRVVRVICSSDARHKQRQG

SEQ ID NO: 1336 - DNA, 114 bp, Cryptomeria japonica
  CDS (1)..(114): transl_table=11
atgaaaatccgtgcttctgttcgcaaaatttgcgaaaagtgccgcctaattcgtagacggaaacgccttcttgtaatttgttacaatccgaggcataaacaaaaacagggctaa

SEQ ID NO: 1337 - protein, 37 aa, Cryptomeria japonica
MKIRASVRKICEKCRLIRRRKRLLVICYNPRHKQKQG

SEQ ID NO: 1338 - DNA, 117 bp, Lactobacillus fermentum IFO 3956
  CDS (1)..(117): transl_table=11
atgaaagtacgaccatcagtaaaacggatgtgcgatagctgcaagattgttaagcgtcgcggccgggttatggttatctgcattaacccaaagcacaagcaacgccaaggcaagtaa

SEQ ID NO: 1339 - protein, 38 aa, Lactobacillus fermentum IFO 3956
MKVRPSVKRMCDSCKIVKRRGRVMVICINPKHKQRQGK

SEQ ID NO: 1340 - DNA, 114 bp, Kocuria rhizophila DC2201
  CDS (1)..(114): transl_table=11
atgaaggtccaaccgagcgtcaagcagatctgcgacaagtgcaaggtgatccgccgcaacggccgggtcatggtgatctgcgagaacccccggcacaagcagcgccagggctga

SEQ ID NO: 1341 - protein, 37 aa, Kocuria rhizophila DC2201
MKVQPSVKQICDKCKVIRRNGRVMVICENPRHKQRQG

SEQ ID NO: 1342 - DNA, 114 bp, Nostoc punctiforme PCC 73102
  CDS (1)..(114): transl_table=11
atgaaagttagagcctcagtcaagaaaatttgtgaaaagtgtagcgtgatcaaacgtcgtggtcgcgtcatggtgatctgcgtgaaccccaagcacaagcaacgtcaaggataa

SEQ ID NO: 1343 - protein, 37 aa, Nostoc punctiforme PCC 73102
MKVRASVKKICEKCSVIKRRGRVMVICVNPKHKQRQG

SEQ ID NO: 1344 - DNA, 114 bp, Elusimicrobium minutum Pei191
  CDS (1)..(114): transl_table=11
atgaaagtcagagctagtgtaaaaaagatatgtcaaaaatgcaaagttattaaacgtaacggcgtattgcgtgttgtgtgcgatgttaaaaagcacaaacaacgccaaggttaa

SEQ ID NO: 1345 - protein, 37 aa, Elusimicrobium minutum Pei191
MKVRASVKKICQKCKVIKRNGVLRVVCDVKKHKQRQG

SEQ ID NO: 1346 - DNA, 114 bp, Welwitschia mirabilis
  CDS (1)..(114): transl_table=11
atgaaactgcgcgcttctgttcgaaaaatttgttccaaatgtcgactaattcgtagaggaaaacgtctttatgtcttttgtgtcaatgcaagacataagcaaaaacagggttaa

SEQ ID NO: 1347 - protein, 37 aa, Welwitschia mirabilis
MKLRASVRKICSKCRLIRRGKRLYVFCVNARHKQKQG

SEQ ID NO: 1348 - DNA, 114 bp, Francisella tularensis subsp. mediasiatica FSC147
  CDS (1)..(114): transl_table=11
atgaaagttagagcttcagttaaaaaaatgtgtaggaactgtaaagttatcaagcgcaatagagtagttcgtgtgatatgtgcagatcctagacataagcaaagacaaggatag

SEQ ID NO: 1349 - protein, 37 aa, Francisella tularensis subsp. mediasiatica FSC147
MKVRASVKKMCRNCKVIKRNRVVRVICADPRHKQRQG

SEQ ID NO: 1350 - DNA, 117 bp, Erwinia tasmaniensis Et1/99
  CDS (1)..(117): transl_table=11
atgaaagttcgtgcttccgtcaagaaattatgtcgtaactgcaaaatcattcgtcgcgacggcgttgtgcgtgtgatttgtagtgccgagccaaagcataaacagcgccaaggctga

SEQ ID NO: 1351 - protein, 38 aa, Erwinia tasmaniensis Et1/99
MKVRASVKKLCRNCKIIRRDGVVRVICSAEPKHKQRQG

SEQ ID NO: 1352 - DNA, 117 bp, Natranaerobius thermophilus JW/NM-WN-LF
  CDS (1)..(117): transl_table=11
atgatgaaaaccaggccttcagtaaaaccaatttgcgagcgttgtaaagtgattaaacgaagaggaaaagttatggttatatgctctaatcccaaacacaaacagaaacaggggtaa

SEQ ID NO: 1353 - protein, 38 aa, Natranaerobius thermophilus JW/NM-WN-LF
MMKTRPSVKPICERCKVIKRRGKVMVICSNPKHKQKQG

SEQ ID NO: 1354 - DNA, 114 bp, Sulfurihydrogenibium sp. YO3AOP1
  CDS (1)..(114): transl_table=11
atgaaaattaaagcatctgttaaaccaagatgtgaaaaatgcaggattataagaagaaacggtagagttatggttatctgtgaaaatccaaagcataagcaaaaacaaggttaa

SEQ ID NO: 1355 - protein, 37 aa, Sulfurihydrogenibium sp. YO3AOP1
MKIKASVKPRCEKCRIIRRNGRVMVICENPKHKQKQG

SEQ ID NO: 1356 - DNA, 114 bp, Geobacter lovleyi SZ
  CDS (1)..(114): transl_table=11
atgaaagttcgggcatctgtcaaaaagatctgcgataagtgcaagatcatcaagcgcaaaggtgttgtgcgtgttatttgtgacacacccaagcattctcaacgtcaagggtaa

SEQ ID NO: 1357 - protein, 37 aa, Geobacter lovleyi SZ
MKVRASVKKICDKCKIIKRKGVVRVICDTPKHSQRQG

SEQ ID NO: 1358 - DNA, 117 bp, Candidatus Amoebophilus asiaticus 5a2
  CDS (1)..(117): transl_table=11
atgaagataagatcatctattaaaaaacgtagtagcggatgccagatagtacgtaggaaaggagtactttatgttattaataaaaaaaatccaagatttaaacaaagacaaggataa

SEQ ID NO: 1359 - protein, 38 aa, Candidatus Amoebophilus asiaticus 5a2
MKIRSSIKKRSSGCQIVRRKGVLYVINKKNPRFKQRQG

SEQ ID NO: 1360 - DNA, 117 bp, Chlorobium phaeobacteroides BS1
  CDS (1)..(117): transl_table=11
atgaaagtttattcatctattaaaaaacgctgtgagcactgccggattatcaggcgcaaagggaagcgttttgtgatttgcagggtgaatccgagtcacaagcagcgccagggctga

SEQ ID NO: 1361 - protein, 38 aa, Chlorobium phaeobacteroides BS1
MKVYSSIKKRCEHCRIIRRKGKRFVICRVNPSHKQRQG

SEQ ID NO: 1362 - DNA, 114 bp, Leptospira biflexa serovar Patoc strain 'Patoc 1 (Ames)'
  CDS (1)..(114): transl_table=11
atgaaagttagagcatcagtcaaaaaaatctgtccggaatgcaaagtcattcgcagaaaaggtgtaatccgagtgatttgcacgaacccaaaacacaaacaaaggcaaagatag

SEQ ID NO: 1363 - protein, 37 aa, Leptospira biflexa serovar Patoc strain 'Patoc 1 (Ames)'
MKVRASVKKICPECKVIRRKGVIRVICTNPKHKQRQR

SEQ ID NO: 1364 - DNA, 117 bp, Cellvibrio japonicus Ueda107
  CDS (1)..(117): transl_table=11
atgaaagttcgtgcttctgttaaaaaaatttgtcgcaattgcaagatggtgcgtcgcaacggtgttctgcgtgtaatttgcagtgttgagccgcgtcacaagcagcgtcaaggctga

SEQ ID NO: 1365 - protein, 38 aa, Cellvibrio japonicus Ueda107
MKVRASVKKICRNCKMVRRNGVLRVICSVEPRHKQRQG

SEQ ID NO: 1366 - DNA, 117 bp, Chloroherpeton thalassium ATCC 35110
  CDS (1)..(117): transl_table=11
atgaaagtctcatcgtcggtcggaaagcgctgcgaaagttgcaaaatcatcagaagaaaaggtaaaatttatgtgatttgcaaaaaaaatccgaatcataagcagcgtcagggataa

SEQ ID NO: 1367 - protein, 38 aa, Chloroherpeton thalassium ATCC 35110
MKVSSSVGKRCESCKIIRRKGKIYVICKKNPNHKQRQG

SEQ ID NO: 1368 - DNA, 117 bp, Chlorobaculum parvum NCIB 8327
  CDS (1)..(117): transl_table=11
atgaaagtttattcgtctatcaaaaaacgttgcgagcactgcaggattatcaagcgcaaaggaaaacggtatgtgatctgcaaggtgaatccaagccataagcagcgccaagggtga

SEQ ID NO: 1369 - protein, 38 aa, Chlorobaculum parvum NCIB 8327
MKVYSSIKKRCEHCRIIKRKGKRYVICKVNPSHKQRQG

SEQ ID NO: 1370 - DNA, 114 bp, Mycoplasma arthritidis 158L3-1
  CDS (1)..(114): transl_table=4
atgaaagtaagagcttcaatcaaacgcatttgccgtgaatgcaagctaattaaaagacacggtgtaaatcgtattatttgtgtaaacccaaaacacaaacaaagacaaggatag

SEQ ID NO: 1371 - protein, 37 aa, Mycoplasma arthritidis 158L3-1
MKVRASIKRICRECKLIKRHGVNRIICVNPKHKQRQG

SEQ ID NO: 1372 - DNA, 114 bp, Oedogonium cardiacum
  CDS (1)..(114): transl_table=11
atgaaagttcgagcttctgtaaaaaaaatttgtacaaattgtcgcttaattcgacgaagacgacaaattttagtaatttgtacaaatcctaaacataaacaaagacaaggttaa

SEQ ID NO: 1373 - protein, 37 aa, Oedogonium cardiacum
MKVRASVKKICTNCRLIRRRRQILVICTNPKHKQRQG

SEQ ID NO: 1374 - DNA, 114 bp, Hydrogenobaculum sp. Y04AAS1
  CDS (1)..(114): transl_table=11
atgaaggtaagaccatctgtaaaaccgatatgtccaaagtgtaaaattataagaaggaaaaaacgtgttatggtgatttgtgaaaatcctaagcataagcaaaggcaaggttaa

SEQ ID NO: 1375 - protein, 37 aa, Hydrogenobaculum sp. Y04AAS1
MKVRPSVKPICPKCKIIRRKKRVMVICENPKHKQRQG

SEQ ID NO: 1376 - DNA, 117 bp, Alteromonas macleodii 'Deep ecotype'
  CDS (1)..(117): transl_table=11
atgaaagttcgtgcatcagtaaaaaagatttgccgtaactgtaaagttatcaagcgcaacggtgttgtgcgtgtaatttgcagttctgacccaaagcataagcagcgtcagggctaa

SEQ ID NO: 1377 - protein, 38 aa, Alteromonas macleodii 'Deep ecotype'
MKVRASVKKICRNCKVIKRNGVVRVICSSDPKHKQRQG

SEQ ID NO: 1378 - DNA, 114 bp, Geobacter bemidjiensis Bem
  CDS (1)..(114): transl_table=11
atgaaggttcgggcatcggttaagaagatctgtgttaaatgcaaaatagtcaagcgcaagggcatcgtccgcgttatctgcgagactcccaagcattcacagagacagggttaa

SEQ ID NO: 1379 - protein, 37 aa, Geobacter bemidjiensis Bem
MKVRASVKKICVKCKIVKRKGIVRVICETPKHSQRQG

SEQ ID NO: 1380 - DNA, 114 bp, Cicer arietinum
  CDS (1)..(114): transl_table=11
atgaaagtagcagcctctgttcgtaaaatttgtgaaaaatgtagattgatccgcaggagaggtcgaattatcgtaatttgttccaatccaaaacataaacaaagacaaggataa

SEQ ID NO: 1381 - protein, 37 aa, Cicer arietinum
MKVAASVRKICEKCRLIRRRGRIIVICSNPKHKQRQG

SEQ ID NO: 1382 - DNA, 117 bp, Proteus mirabilis HI4320
  CDS (1)..(117): transl_table=11
atgaaagttcgtgcttccgtcaagaaaatgtgccgtaactgcaaaatcgttagacgtcacggccacgtgcgtgtaatttgcagtgttgaccctaagcataaacagcgtcaaggctaa

SEQ ID NO: 1383 - protein, 38 aa, Proteus mirabilis HI4320
MKVRASVKKMCRNCKIVRRHGHVRVICSVDPKHKQRQG

SEQ ID NO: 1384 - DNA, 114 bp, Fusobacterium nucleatum subsp. polymorphum ATCC 10953
  CDS (1)..(114): transl_table=11
atgaaagtaagagtatcaataaaacctatttgtgacaagtgtaagattattaaaagacatggaaaaataagagtaatctgtgaaaatcctaaacataaacaagttcaaggataa

SEQ ID NO: 1385 - protein, 37 aa, Fusobacterium nucleatum subsp. polymorphum ATCC 10953
MKVRVSIKPICDKCKIIKRHGKIRVICENPKHKQVQG

SEQ ID NO: 1386 - DNA, 114 bp, Mannheimia haemolytica PHL213
  CDS (1)..(114): transl_table=11
atgaaagttcgtgcttcagtaaaaagaatgtgccgtaattgtaaagtaatcaaacgtgaaggtgtggttcgtgtaatttgtagcgatcctaaacacaaacaacgtcaaggttaa

SEQ ID NO: 1387 - protein, 37 aa, Mannheimia haemolytica PHL213
MKVRASVKRMCRNCKVIKREGVVRVICSDPKHKQRQG

SEQ ID NO: 1388 - DNA, 114 bp, Streptomyces sviceus ATCC 29083
  CDS (1)..(114): transl_table=11
atgaaggtcaagccgagcgtcaagaagatctgcgacaagtgcagggtgatccgccgtcacggtcgggtcatggtcatctgcgagaacccgcgccacaagcagcgccagggctga

SEQ ID NO: 1389 - protein, 37 aa, Streptomyces sviceus ATCC 29083
MKVKPSVKKICDKCRVIRRHGRVMVICENPRHKQRQG

SEQ ID NO: 1390 - DNA, 114 bp, Acidithiobacillus ferrooxidans ATCC 53993
  CDS (1)..(114): transl_table=11
atgaaggttcgcgcatctgttaaaaagctttgtcgtaactgcaaaattgttcgtcgtaacggtgtggttcgggtgatttgtgtcgagccgcgccataaacagcgccagggttaa

SEQ ID NO: 1391 - protein, 37 aa, Acidithiobacillus ferrooxidans ATCC 53993
MKVRASVKKLCRNCKIVRRNGVVRVICVEPRHKQRQG

SEQ ID NO: 1392 - DNA, 114 bp, Dictyoglomus thermophilum H-6-12
  CDS (1)..(114): transl_table=11
atgaaggttagatcttctgtgaaaaaaatatgtgagaaatgtaaaatagtaagaagaggcggtcgtgtttttgtgatatgtgaaaatccaagacacaagcagaaacaaggatag

SEQ ID NO: 1393 - protein, 37 aa, Dictyoglomus thermophilum H-6-12
MKVRSSVKKICEKCKIVRRGGRVFVICENPRHKQKQG

SEQ ID NO: 1394 - DNA, 114 bp, Ureaplasma urealyticum serovar 10 str. ATCC 33699
  CDS (1)..(114): transl_table=4
atgaaagttagagcttcagttaaagcaatttgcaaagattgcaaaatcgtaaaacgatcaggtgttgtgcgtgttatttgtgctaatccaaaacacaaacaacgtcaaggttaa

SEQ ID NO: 1395 - protein, 37 aa, Ureaplasma urealyticum serovar 10 str. ATCC 33699
MKVRASVKAICKDCKIVKRSGVVRVICANPKHKQRQG

SEQ ID NO: 1396 - DNA, 114 bp, Cyanothece sp. PCC 8801
  CDS (1)..(114): transl_table=11
atgaaagttagagcatccgtcaaaaaaatgtgtgagaaatgtcgcgtaatccgacgaaggggtcgggtgatggtgatttgttctaatcctaaacacaagcaacgtcaaggttag

SEQ ID NO: 1397 - protein, 37 aa, Cyanothece sp. PCC 8801
MKVRASVKKMCEKCRVIRRRGRVMVICSNPKHKQRQG

SEQ ID NO: 1398 - DNA, 114 bp, Cyanothece sp. PCC 7424
  CDS (1)..(114): transl_table=11
atgaaagttagaccatctgtcaaaaaaatgtgtgaaaaatgtcgcgttattcgtcgtcgcggcagagttatggtgatttgttctaatcccaagcataaacaacgtcaaggatag

SEQ ID NO: 1399 - protein, 37 aa, Cyanothece sp. PCC 7424
MKVRPSVKKMCEKCRVIRRRGRVMVICSNPKHKQRQG

SEQ ID NO: 1400 - DNA, 114 bp, Desulfovibrio vulgaris str. 'Miyazaki F'
  CDS (1)..(114): transl_table=11
atgaaagtcaggccttccgtcaagaagatgtgccccaagtgcaaggttatccgccgccggggcattctcagggtcatttgcgacaacccccggcacaagcagcgccagggctaa

SEQ ID NO: 1401 - protein, 37 aa, Desulfovibrio vulgaris str. 'Miyazaki F'
MKVRPSVKKMCPKCKVIRRRGILRVICDNPRHKQRQG

SEQ ID NO: 1402 - DNA, 114 bp, Trifolium subterraneum
  CDS (1)..(114): transl_table=11
atgaaagtaagagcctcggttcgtaaaatttgtgaaaaatgtcgattgatccgcaggcgaggtcgaattatagtaatttgttccaatccaaaacataaacaaagacaaggataa

SEQ ID NO: 1403 - protein, 37 aa, Trifolium subterraneum
MKVRASVRKICEKCRLIRRRGRIIVICSNPKHKQRQG

SEQ ID NO: 1404 - DNA, 114 bp, Haemophilus parasuis SH0165
  CDS (1)..(114): transl_table=11
atgaaagttcgtgcttcagttaaaagaatgtgtcgtaactgcaaagttgttaaacgtgaaggtgttgtacgcgtaatttgtagcgaccctaaacataaacaacgtcaaggttaa

SEQ ID NO: 1405 - protein, 37 aa, Haemophilus parasuis SH0165
MKVRASVKRMCRNCKVVKREGVVRVICSDPKHKQRQG

SEQ ID NO: 1406 - DNA, 114 bp, Leptospira interrogans serovar Copenhageni str. Fiocruz L1-130
  CDS (1)..(114): transl_table=11
atgaaagtaagaacatcagtcaaaaaaatctgctctagctgtaaagttatcagaagaaaaggtgtaatcagagtaatttgcaccaatcctaaacacaaacaaaggcaagcataa

SEQ ID NO: 1407 - protein, 37 aa, Leptospira interrogans serovar Copenhageni str. Fiocruz L1-130
MKVRTSVKKICSSCKVIRRKGVIRVICTNPKHKQRQA

SEQ ID NO: 1408 - DNA, 114 bp, Thermus thermophilus HB27
  CDS (1)..(114): transl_table=11
atgaaggtgcgcgcgtcggtcaagaggatctgcgacaagtgcaaggtgatccgccggcacgggcgggtctacgtcatctgcgagaaccccaagcataagcagcggcagggttag

SEQ ID NO: 1409 - protein, 37 aa, Thermus thermophilus HB27
MKVRASVKRICDKCKVIRRHGRVYVICENPKHKQRQG

SEQ ID NO: 1410 - DNA, 114 bp, Unknown
  Unidentified
  CDS (1)..(114)
atgaaagttaggccttccgtcaagaaaatctgccccaagtgcaaggtgatccggcgccggggcgtgctgagagtcatctgcgaaaacccccggcacaagcagcgccagggctaa

SEQ ID NO: 1411 - protein, 37 aa, Unknown
  Unidentified
MKVRPSVKKICPKCKVIRRRGVLRVICENPRHKQRQG

SEQ ID NO: 1412 - DNA, 117 bp, Mycoplasma mobile 163K
  CDS (1)..(117): transl_table=4
atgaaagtcagagcatcagttaaacctatgtgtaaagattgtaaaattattaaacgaaagggagctgttagggtaatttgtaaaacaagcccaaaacataaacagcgtcaagggtaa

SEQ ID NO: 1413 - protein, 38 aa, Mycoplasma mobile 163K
MKVRASVKPMCKDCKIIKRKGAVRVICKTSPKHKQRQG

SEQ ID NO: 1414 - DNA, 117 bp, Acinetobacter sp. ADP1
  CDS (1)..(117): transl_table=11
atgaaagtacaagcttctgtaaagaaaatttgtggtagctgtaaagttatccgtcgtaatggggttattcgcgtaatttgtagcgcagaacctcgtcataagcagcgtcaaggttaa

SEQ ID NO: 1415 - protein, 38 aa, Acinetobacter sp. ADP1
MKVQASVKKICGSCKVIRRNGVIRVICSAEPRHKQRQG

SEQ ID NO: 1416 - DNA, 114 bp, Nymphaea alba
  CDS (1)..(114): transl_table=11
atgaaaataagagcttccgttcgtaagatttgtgaaaaatgtcgactgatccgtaggcgaggacgaattatagtaatttgttctaatccgaaacataaacagagacagggataa

SEQ ID NO: 1417 - protein, 37 aa, Nymphaea alba
MKIRASVRKICEKCRLIRRRGRIIVICSNPKHKQRQG

SEQ ID NO: 1418 - DNA, 114 bp, Mesoplasma florum L1
  CDS (1)..(114): transl_table=4
atgaaagtaagatcatcagtcaaaaaaatttgcgacaaatgtcgtgttattagacgtaaaggccgcgtaatgattatttgtgcacaaccaaagcacaaacaaagacaaggttaa

SEQ ID NO: 1419 - protein, 37 aa, Mesoplasma florum L1
MKVRSSVKKICDKCRVIRRKGRVMIICAQPKHKQRQG

SEQ ID NO: 1420 - DNA, 114 bp, Propionibacterium acnes KPA171202
  CDS (1)..(114): transl_table=11
atgaaggttcagccgagcgtcaagaagatctgcgataagtgcaaggtcattcgtcgccacggccgcgtgatggtcatctgcgataacccgcgccacaagcagcgtcagggctga

SEQ ID NO: 1421 - protein, 37 aa, Propionibacterium acnes KPA171202
MKVQPSVKKICDKCKVIRRHGRVMVICDNPRHKQRQG

SEQ ID NO: 1422 - DNA, 114 bp, Leifsonia xyli subsp. xyli str. CTCB07
  CDS (1)..(114): transl_table=11
atgaaggtcaacccctccgtcaagaagatctgcgacaaatgcaaggtcatccgccgaaacggccgggtcatggtcatctgcgagaacccgcgccacaaacagcgccagggctga

SEQ ID NO: 1423 - protein, 37 aa, Leifsonia xyli subsp. xyli str. CTCB07
MKVNPSVKKICDKCKVIRRNGRVMVICENPRHKQRQG

SEQ ID NO: 1424 - DNA, 123 bp, Desulfotalea psychrophila LSv54
  CDS (1)..(123): transl_table=11
ttgtttatcatgaaagtacgcgcatctgttaaaaaaatttgcagtgactgtaaggtttataagcgcaatggtgtagttcgcgtatcctgtaaagttaaaaaacataagcagaggcagggataa

SEQ ID NO: 1425 - protein, 40 aa, Desulfotalea psychrophila LSv54
MFIMKVRASVKKICSDCKVYKRNGVVRVSCKVKKHKQRQG

SEQ ID NO: 1426 - DNA, 114 bp, Borrelia garinii PBi
  CDS (1)..(114): transl_table=11
atgaaagttagggcaagtgtaaagccaatttgtgaaaaatgtaaagttataaaaagaaaaggtgtattaaggattatttgtgataatttaaagcacaaacaaagacaaaagtaa

SEQ ID NO: 1427 - protein, 37 aa, Borrelia garinii PBi
MKVRASVKPICEKCKVIKRKGVLRIICDNLKHKQRQK

SEQ ID NO: 1428 - DNA, 114 bp, Symbiobacterium thermophilum IAM 14863
  CDS (1)..(114): transl_table=11
atgaaggttcgcccgtcggtgaagccgatttgcgagaagtgcaaggtcatcaagcgtcacggtcacgtgatggtgatctgcgagaatccgaagcacaagcagaagcagggatag

SEQ ID NO: 1429 - protein, 37 aa, Symbiobacterium thermophilum IAM 14863
MKVRPSVKPICEKCKVIKRHGHVMVICENPKHKQKQG

SEQ ID NO: 1430 - DNA, 114 bp, Mannheimia succiniciproducens MBEL55E
  CDS (1)..(114): transl_table=11
atgaaagttcgtgcttctgtaaagaaaatctgtcgtaactgtaaaattgttaaacgtgaaggtgtcgttcgtgttttatgcagcgatcctaaacataaacaacgtcaaggttaa

SEQ ID NO: 1431 - protein, 37 aa, Mannheimia succiniciproducens MBEL55E
MKVRASVKKICRNCKIVKREGVVRVLCSDPKHKQRQG

SEQ ID NO: 1432 - DNA, 114 bp, Legionella pneumophila subsp. pneumophila str. Philadelphia 1
  CDS (1)..(114): transl_table=11
atgaaagtaagagcatcagtaaagcgaatatgtcgcaattgtaaaataataaaaagaagtggcactatacgagtaatttgtaaggatgcccgtcataaacaaaagcaagggtaa

SEQ ID NO: 1433 - protein, 37 aa, Legionella pneumophila subsp. pneumophila str. Philadelphia 1
MKVRASVKRICRNCKIIKRSGTIRVICKDARHKQKQG

SEQ ID NO: 1434 - DNA, 117 bp, Bacteroides fragilis YCH46
  CDS (1)..(117): transl_table=11
atgaaagtaagagcatcattaaagaaacgtacgccagaatgtaagatcgttagacgtaatggccgtttgtatgttattaacaagaaaaatcctaagtataaacaacgtcaaggataa

SEQ ID NO: 1435 - protein, 38 aa, Bacteroides fragilis YCH46
MKVRASLKKRTPECKIVRRNGRLYVINKKNPKYKQRQG

SEQ ID NO: 1436 - DNA, 117 bp, Burkholderia pseudomallei K96243
  CDS (1)..(117): transl_table=11
atgaaagtgatggcatcggttaagcgcatttgccgcaattgcaagatcatcaagcgcaaaggcgtcgttcgcgtgatctgcagctcggatccgcgtcacaagcagcgccaaggctga

SEQ ID NO: 1437 - protein, 38 aa, Burkholderia pseudomallei K96243
MKVMASVKRICRNCKIIKRKGVVRVICSSDPRHKQRQG

SEQ ID NO: 1438 - DNA, 114 bp, Methylococcus capsulatus str. Bath
  CDS (1)..(114): transl_table=11
atgaaagttagagcatcagttaagcgcatctgccggaactgtaaggtcctgaagaggaatggtatcgtccggatcatttgtaaggatgcccgccacaagcagcggcagggttga

SEQ ID NO: 1439 - protein, 37 aa, Methylococcus capsulatus str. Bath
MKVRASVKRICRNCKVLKRNGIVRIICKDARHKQRQG

SEQ ID NO: 1440 - DNA, 114 bp, Nocardia farcinica IFM 10152
  CDS (1)..(114): transl_table=11
atgaaggttcagccgagcgtcaagaagatctgcgagaagtgcaaggtgatccgccgccacgggcgggtcatggtgatctgcgacaacctgcgccacaagcagcgccagggctga

SEQ ID NO: 1441 - protein, 37 aa, Nocardia farcinica IFM 10152
MKVQPSVKKICEKCKVIRRHGRVMVICDNLRHKQRQG

SEQ ID NO: 1442 - DNA, 114 bp, Photobacterium profundum SS9
  CDS (1)..(114): transl_table=11
atgaaagttcgtgcttccgttaagaaaatctgccgtaactgtaaagttattaagcgcaacggtgttgtgcgtataatttgcattgagccgaagcataagcaacgccaaggctaa

SEQ ID NO: 1443 - protein, 37 aa, Photobacterium profundum SS9
MKVRASVKKICRNCKVIKRNGVVRIICIEPKHKQRQG

SEQ ID NO: 1444 - DNA, 114 bp, Geobacillus kaustophilus HTA426
  CDS (1)..(114): transl_table=11
atgaaagtaagaccatctgtcaaaccgatttgcgaaaagtgcaaagttattcgcagacgcggcaaagttatgatcatttgtgaaaatccgaagcataaacaacgccaagggtaa

SEQ ID NO: 1445 - protein, 37 aa, Geobacillus kaustophilus HTA426
MKVRPSVKPICEKCKVIRRRGKVMIICENPKHKQRQG

SEQ ID NO: 1446 - DNA, 114 bp, Idiomarina loihiensis L2TR
  CDS (1)..(114): transl_table=11
atgaaagttcgtgcttccgtgaagaaaatctgtcgtaactgcaaaatcatcaagcgtaacggtgtagttcgcgttatttgcactgatgctaagcataagcaacgacaaggttga

SEQ ID NO: 1447 - protein, 37 aa, Idiomarina loihiensis L2TR
MKVRASVKKICRNCKIIKRNGVVRVICTDAKHKQRQG

SEQ ID NO: 1448 - DNA, 114 bp, Aromatoleum aromaticum EbN1
  CDS (1)..(114): transl_table=11
atgagagttcaggcttcggtaaagcggctttgccgcaactgcaaaatcgtgcgtcgtaaaggcgtggttcgcgtgatctgcatcgacccgcgtcacaagcagcgccagggttga

SEQ ID NO: 1449 - protein, 37 aa, Aromatoleum aromaticum EbN1
MRVQASVKRLCRNCKIVRRKGVVRVICIDPRHKQRQG

SEQ ID NO: 1450 - DNA, 114 bp, Francisella tularensis subsp. tularensis SCHU S4
  CDS (1)..(114): transl_table=11
atgaaagttagagcttcagttaaaaaaatgtgtagaaactgtaaagttatcaagcgcaatagagtagttcgtgtgatatgtacagatcctagacataagcaaagacaaggatag

SEQ ID NO: 1451 - protein, 37 aa, Francisella tularensis subsp. tularensis SCHU S4
MKVRASVKKMCRNCKVIKRNRVVRVICTDPRHKQRQG

SEQ ID NO: 1452 - DNA, 114 bp, Synechococcus elongatus PCC 6301
  CDS (1)..(114): transl_table=11
atgaaagtaagagcttctgttcgcaaaatctgcgaaaaatgccgcgtcatcaaacgtcgcggtcgtgtgatggtcatctgtgctaaccccaagcataagcaacgccaaggctag

SEQ ID NO: 1453 - protein, 37 aa, Synechococcus elongatus PCC 6301
MKVRASVRKICEKCRVIKRRGRVMVICANPKHKQRQG

SEQ ID NO: 1454 - DNA, 114 bp, Bacillus clausii KSM-K16
  CDS (1)..(114): transl_table=11
atgaaggtaagaccatcagtcaaaccgatttgcgaaaaatgcaaggttattcgccgcaaaggcaatgttatggtaatttgtgaaaacccgaaacacaaacaaaaacaaggttaa

SEQ ID NO: 1455 - protein, 37 aa, Bacillus clausii KSM-K16
MKVRPSVKPICEKCKVIRRKGNVMVICENPKHKQKQG

SEQ ID NO: 1456 - DNA, 114 bp, Dehalococcoides ethenogenes 195
  CDS (1)..(114): transl_table=11
atgaaggttagagcttcggtaaagacaatgtgcgaaaagtgcaaaatagtgaaacgtaacggggtggttagaaatatttgcaccaaccccaaacataaacagaggcagggttaa

SEQ ID NO: 1457 - protein, 37 aa, Dehalococcoides ethenogenes 195
MKVRASVKTMCEKCKIVKRNGVVRNICTNPKHKQRQG

SEQ ID NO: 1458 - DNA, 117 bp, Lactobacillus acidophilus NCFM
  CDS (1)..(117): transl_table=11
atgaaggttagaccatctgttaaaccaatgtgtgaacattgtaaagttattaagagacatggccgtgttatggtaatttgcccagcaaatccaaaacacaagcaacgtcaaggttaa

SEQ ID NO: 1459 - protein, 38 aa, Lactobacillus acidophilus NCFM
MKVRPSVKPMCEHCKVIKRHGRVMVICPANPKHKQRQG

SEQ ID NO: 1460 - DNA, 114 bp, Vibrio fischeri ES114
  CDS (1)..(114): transl_table=11
atgaaagttcgtgcttccgttaaaaaaatctgccgcaactgtaaagttattaagcgcaacggtgttgtgcgtgtaatttgcgttgaaccaaagcataagcaacgccaaggttaa

SEQ ID NO: 1461 - protein, 37 aa, Vibrio fischeri ES114
MKVRASVKKICRNCKVIKRNGVVRVICVEPKHKQRQG

SEQ ID NO: 1462 - DNA, 114 bp, Cucumis sativus
  CDS (1)..(114): transl_table=11
atgaaaataagggcctccattcgtaaaatttgtgaaaaatgtcgcttgatccgtaggcggagacgaattatggtaatttgttccaatccgagacataaacaaagacaaggataa

SEQ ID NO: 1463 - protein, 37 aa, Cucumis sativus
MKIRASIRKICEKCRLIRRRRRIMVICSNPRHKQRQG

SEQ ID NO: 1464 - DNA, 117 bp, Psychrobacter arcticus 273-4
  CDS (1)..(117): transl_table=11
atgaaagttcaagcatcagttaagaagatttgtggtagctgtaaagttgtgcgccgtaaaggccgtgtacatgtaatttgtaccgcagaacctcgccacaagcaacgtcaaggttaa

SEQ ID NO: 1465 - protein, 38 aa, Psychrobacter arcticus 273-4
MKVQASVKKICGSCKVVRRKGRVHVICTAEPRHKQRQG

SEQ ID NO: 1466 - DNA, 114 bp, Colwellia psychrerythraea 34H
  CDS (1)..(114): transl_table=11
atgaaagtacgtgcatccgtaaaaaagatttgtcgtaattgtaaagtggtaaagcgtaaaggcgtaattcgcgttctttgtgttgaaccaaagcacaaacaaagacaaggttaa

SEQ ID NO: 1467 - protein, 37 aa, Colwellia psychrerythraea 34H
MKVRASVKKICRNCKVVKRKGVIRVLCVEPKHKQRQG

SEQ ID NO: 1468 - DNA, 117 bp, Candidatus Blochmannia pennsylvanicus str. BPEN
  CDS (1)..(117): transl_table=11
atgaaagtacgtacgtcagtgaaaaaattatgtcgttattgtgaaattgtgaagagacataacgttattcgtgtagtttgtcgtgcggatccaaagcataagcaacgacaaggataa

SEQ ID NO: 1469 - protein, 38 aa, Candidatus Blochmannia pennsylvanicus str. BPEN
MKVRTSVKKLCRYCEIVKRHNVIRVVCRADPKHKQRQG

SEQ ID NO: 1470 - DNA, 114 bp, Mycoplasma synoviae 53
  CDS (1)..(114): transl_table=4
atgaaagttagatcaggtgtaaaaaaaatctgtaaaaaatgcacaattattaaaagaaaaggagtaaatcgcgttatttgtgaaatcccaaaacacaaacaaagacaaggataa

SEQ ID NO: 1471 - protein, 37 aa, Mycoplasma synoviae 53
MKVRSGVKKICKKCTIIKRKGVNRVICEIPKHKQRQG

SEQ ID NO: 1472 - DNA, 114 bp, Mycoplasma hyopneumoniae J
  CDS (1)..(114): transl_table=4
atgaaagttcgtgcaagtattaaaaaaatttgcaaagattgtaaaattattaaacgacgctcaattaatcgtgttatttgtttaataaaaaagcataagcaaagacaaggttag

SEQ ID NO: 1473 - protein, 37 aa, Mycoplasma hyopneumoniae J
MKVRASIKKICKDCKIIKRRSINRVICLIKKHKQRQG

SEQ ID NO: 1474 - DNA, 114 bp, Dechloromonas aromatica RCB
  CDS (1)..(114): transl_table=11
atgaaagtccaaccttcagtgaagcgcatctgccgcaactgcaaagttatccgccgcaaaggtgtcgtgcgcatcatttgcaaggatccgcgtcacaaacagcgccagggttaa

SEQ ID NO: 1475 - protein, 37 aa, Dechloromonas aromatica RCB
MKVQPSVKRICRNCKVIRRKGVVRIICKDPRHKQRQG

SEQ ID NO: 1476 - DNA, 114 bp, Thermobifida fusca YX
  CDS (1)..(114): transl_table=11
atgaaggttaagccgagcgttaagagaatctgcgcgaagtgccgagtgatccgccgtcacggcaagatcagggtgatctgcgaggacccgcggcacaagcagcgccagggttaa

SEQ ID NO: 1477 - protein, 37 aa, Thermobifida fusca YX
MKVKPSVKRICAKCRVIRRHGKIRVICEDPRHKQRQG

SEQ ID NO: 1478 - DNA, 117 bp, Ralstonia eutropha JMP134
  CDS (1)..(117): transl_table=11
atgaaagtgctggcttctgttaagcgcatttgccgcaactgcaaaatcatcaagcgcaacggtgtcgtgcgcgtgatctgctcgtcggatccccgccacaagcaacgccaaggctaa

SEQ ID NO: 1479 - protein, 38 aa, Ralstonia eutropha JMP134
MKVLASVKRICRNCKIIKRNGVVRVICSSDPRHKQRQG

SEQ ID NO: 1480 - DNA, 114 bp, Staphylococcus saprophyticus subsp. saprophyticus ATCC 15305
  CDS (1)..(114): transl_table=11
atgaaagtaagaccatcagtaaaaccaatttgcgaaaaatgtaaagtcattaaacgtaaaggtaaagtaatggtaatttgtagcaacccaaaacataaacaaagacaaggttaa

SEQ ID NO: 1481 - protein, 37 aa, Staphylococcus saprophyticus subsp. saprophyticus ATCC 15305
MKVRPSVKPICEKCKVIKRKGKVMVICSNPKHKQRQG

SEQ ID NO: 1482 - DNA, 114 bp, Acorus calamus
  CDS (1)..(114): transl_table=11
atgaaaataagagcctctgttcgtaaaatttgcgaaaaatgtcgactaatccgtaggcggggacgaattatagttatttgttataatccgaaacataaacaaagacaggggtaa

SEQ ID NO: 1483 - protein, 37 aa, Acorus calamus
MKIRASVRKICEKCRLIRRRGRIIVICYNPKHKQRQG

SEQ ID NO: 1484 - DNA, 123 bp, Coxiella burnetii RSA 493
  CDS (1)..(123): transl_table=11
atgaaagtaagagcatcagtaaaacgaatgtgtcgaaattgtaaagtaattcgacgtaatggggttgtgcgcgtcatttgtagcgacgctcgacataaacaacgccagaaaggtgggaaataa

SEQ ID NO: 1485 - protein, 40 aa, Coxiella burnetii RSA 493
MKVRASVKRMCRNCKVIRRNGVVRVICSDARHKQRQKGGK

SEQ ID NO: 1486 - DNA, 114 bp, Nitrosococcus oceani ATCC 19707
  CDS (1)..(114): transl_table=11
atgaaggttcgtgcttcggtaaaaaaggtttgccgtcattgcaaagttgtgcgccggaagggcgtagtgcgggttatatgtaaagatgcccggcataagcaacgtcagggatga

SEQ ID NO: 1487 - protein, 37 aa, Nitrosococcus oceani ATCC 19707
MKVRASVKKVCRHCKVVRRKGVVRVICKDARHKQRQG

SEQ ID NO: 1488 - DNA, 114 bp, Pelobacter carbinolicus DSM 2380
  CDS (1)..(114): transl_table=11
atgaaagttcgagcttcggtcaagccgatttgttccaagtgtaaagtagtcagacgcaagggaattgtcaggatcatctgcgaaaaccccaagcataagcagaaacagggataa

SEQ ID NO: 1489 - protein, 37 aa, Pelobacter carbinolicus DSM 2380
MKVRASVKPICSKCKVVRRKGIVRIICENPKHKQKQG

SEQ ID NO: 1490 - DNA, 114 bp, Phalaenopsis aphrodite subsp. formosana
  CDS (1)..(114): transl_table=11
atgaagataagggcttctgttcgtaaaatttgtgaaaaatgtcgcttgattcgtaggcaggggcgaattatagttatttgttccaatccgagacataaacagagacaggggtaa

SEQ ID NO: 1491 - protein, 37 aa, Phalaenopsis aphrodite subsp. formosana
MKIRASVRKICEKCRLIRRQGRIIVICSNPRHKQRQG

SEQ ID NO: 1492 - DNA, 114 bp, Carboxydothermus hydrogenoformans Z-2901
  CDS (1)..(114): transl_table=11
atgaaagtcagacccagcgttaaaccgatctgcgaaaaatgtaagattatccgccggaaagggcgagtaagggttatttgtgaaaatcccaagcataagcagaagcagggataa

SEQ ID NO: 1493 - protein, 37 aa, Carboxydothermus hydrogenoformans Z-2901
MKVRPSVKPICEKCKIIRRKGRVRVICENPKHKQKQG

SEQ ID NO: 1494 - DNA, 117 bp, Chlorobium chlorochromatii CaD3
  CDS (1)..(117): transl_table=11
atgaaaatatattcgtcgattaaaaagcgttgtgagcattgccgtattgtaaaacgtaaaggcaagcgttatgtgatttgcaaggtaaatcccagccacaagcaacgccaaggttga

SEQ ID NO: 1495 - protein, 38 aa, Chlorobium chlorochromatii CaD3
MKIYSSIKKRCEHCRIVKRKGKRYVICKVNPSHKQRQG

SEQ ID NO: 1496 - DNA, 114 bp, Synechococcus sp. CC9605
  CDS (1)..(114): transl_table=11
atgaaggtgcgcagctcagtgaaaaaaatgtgtgacaagtgccgggtgatccgtcgccacggcaaggtcatggtcatttgcgccaaccccaagcacaaacagcgccagggctga

SEQ ID NO: 1497 - protein, 37 aa, Synechococcus sp. CC9605
MKVRSSVKKMCDKCRVIRRHGKVMVICANPKHKQRQG

SEQ ID NO: 1498 - DNA, 114 bp, Geobacter metallireducens GS-15
  CDS (1)..(114): transl_table=11
atgaaagtaagggcatcagtaaaaaaaatttgtgacaaatgcaagataatcaagcgcaagggaattgttcgtgtaatttgcgaaacgcccaagcatacccagagacaaggctaa

SEQ ID NO: 1499 - protein, 37 aa, Geobacter metallireducens GS-15
MKVRASVKKICDKCKIIKRKGIVRVICETPKHTQRQG

SEQ ID NO: 1500 - DNA, 114 bp, Unknown
  Unidentified
  CDS (1)..(114)
atgaaagtcaggccttctgtgaagaaagtatgccccaaatgcaaggtcatccgacgcaagggcgttttgagagtgatctgcgaaaaccccaggcacaagcagcgccagggataa

SEQ ID NO: 1501 - protein, 37 aa, Unknown
  Unidentified
MKVRPSVKKVCPKCKVIRRKGVLRVICENPRHKQRQG

SEQ ID NO: 1502 - DNA, 114 bp, Sulfurimonas denitrificans DSM 1251
  CDS (1)..(114): transl_table=11
atgaaagtaagagcttcagttaagaagatgtgtgatgactgtaaagttgtcaaaagaaaaggcattgtaagagtaatctgcaaagttaaaaaacataaacagagacaaggataa

SEQ ID NO: 1503 - protein, 37 aa, Sulfurimonas denitrificans DSM 1251
MKVRASVKKMCDDCKVVKRKGIVRVICKVKKHKQRQG

SEQ ID NO: 1504 - DNA, 117 bp, Lactobacillus sakei subsp. sakei 23K
  CDS (1)..(117): transl_table=11
atgaaagtaagaccatcagtaaaaccaatgtgcgaacattgtaaagttattaaacgaaaaggccgcgttatgattatctgcgcagctaatccaaaacataaacaacgtcaaggttaa

SEQ ID NO: 1505 - protein, 38 aa, Lactobacillus sakei subsp. sakei 23K
MKVRPSVKPMCEHCKVIKRKGRVMIICAANPKHKQRQG

SEQ ID NO: 1506 - DNA, 114 bp, Lactuca sativa
  CDS (1)..(114): transl_table=11
atgaaaataagagcttctgttcgtaaaatttgtgaaaaatgtcgattaatccgtcgtcggggacgaattagagtaatttgttccaacccaagacataaacaaagacaaggataa

SEQ ID NO: 1507 - protein, 37 aa, Lactuca sativa
MKIRASVRKICEKCRLIRRRGRIRVICSNPRHKQRQG

SEQ ID NO: 1508 - DNA, 114 bp, Nicotiana tomentosiformis
  CDS (1)..(114): transl_table=11
atgaaaataagagcttccattcgtaaaatttgtgaaaaatgtcgactaatccgtaggcggggacgaattatagtaatttgttccaacccgagacataaacaaagacagggataa

SEQ ID NO: 1509 - protein, 37 aa, Nicotiana tomentosiformis
MKIRASIRKICEKCRLIRRRGRIIVICSNPRHKQRQG

SEQ ID NO: 1510 - DNA, 114 bp, Mycoplasma capricolum subsp. capricolum ATCC 27343
  CDS (1)..(114): transl_table=4
atgaaagttagatcatcagtcaagcaaatttgtgacaaatgccgtgtaattagacgtaaaggccgtgtaatgatcatttgtgttacaccaaaacacaaacaaagacaaggataa

SEQ ID NO: 1511 - protein, 37 aa, Mycoplasma capricolum subsp. capricolum ATCC 27343
MKVRSSVKQICDKCRVIRRKGRVMIICVTPKHKQRQG

SEQ ID NO: 1512 - DNA, 114 bp, Moorella thermoacetica ATCC 39073
  CDS (1)..(114): transl_table=11
ttgaaagttaagccttcggtaaagccgatttgcgaaaaatgcaaggtgataaagcgcaaaggcaaagttatggtcatctgcgagaatcccaagcataagcaaaaacaggggtag

SEQ ID NO: 1513 - protein, 37 aa, Moorella thermoacetica ATCC 39073
MKVKPSVKPICEKCKVIKRKGKVMVICENPKHKQKQG

SEQ ID NO: 1514 - DNA, 117 bp, Hahella chejuensis KCTC 2396
  CDS (1)..(117): transl_table=11
atgaaagttagagcatcagttaagaaaatgtgtcgtgggtgcaaaattatccgtcgtaatggtgcggtaatggtaatctgcagcacagaaccaagacacaaacagaaacaaggctaa

SEQ ID NO: 1515 - protein, 38 aa, Hahella chejuensis KCTC 2396
MKVRASVKKMCRGCKIIRRNGAVMVICSTEPRHKQKQG

SEQ ID NO: 1516 - DNA, 117 bp, Anaeromyxobacter dehalogenans 2CP-C
  CDS (1)..(117): transl_table=11
atgaaggtccgcgcgtcggtcaagaagatttgcgacaagtgcaaggtcatcaagcgcaagggcaccgtgcggatcatctgcccggcgaacccccgccacaagcagcgccagggctag

SEQ ID NO: 1517 - protein, 38 aa, Anaeromyxobacter dehalogenans 2CP-C
MKVRASVKKICDKCKVIKRKGTVRIICPANPRHKQRQG

SEQ ID NO: 1518 - DNA, 117 bp, Synechococcus sp. JA-3-3Ab
  CDS (1)..(117): transl_table=11
atgaaggtgcggccctccgtccgtcgaatctgcgaaaagtgccgagtcatccgccgccatggccgggtgatggtgatttgccctgccaaccccaagcacaagcagcggcaggggtag

SEQ ID NO: 1519 - protein, 38 aa, Synechococcus sp. JA-3-3Ab
MKVRPSVRRICEKCRVIRRHGRVMVICPANPKHKQRQG

SEQ ID NO: 1520 - DNA, 117 bp, Synechococcus sp. JA-2-3B'a(2-13)
  CDS (1)..(117): transl_table=11
atgaaggtgcggccttccgtccgtcggatctgcgaaaaatgccgggtcatccgccgccacggtcgggtgatggtcatttgttcttccaaccccaagcacaagcagcggcagggctag

SEQ ID NO: 1521 - protein, 38 aa, Synechococcus sp. JA-2-3B'a(2-13)
MKVRPSVRRICEKCRVIRRHGRVMVICSSNPKHKQRQG

SEQ ID NO: 1522 - DNA, 114 bp, Frankia sp. CcI3
  CDS (1)..(114): transl_table=11
atgaaggtcaagcccagcgtcaagaagatctgtgacaagtgcaaggtgatccgccgccacgggcgcgtcatggtcatctgcgacaaccttcgtcacaagcagcgtcagggctga

SEQ ID NO: 1523 - protein, 37 aa, Frankia sp. CcI3
MKVKPSVKKICDKCKVIRRHGRVMVICDNLRHKQRQG

SEQ ID NO: 1524 - DNA, 132 bp, Rhodoferax ferrireducens T118
  CDS (1)..(132): transl_table=11
ttgtttaaggaaaacgaaatgaaagtttctgcttcggtcaagaaaatttgccgtaactgcaaggtaattcggcgcaagggcgttgtgcgcgtgatctgtaccgatccgcgtcacaagcagcgtcaaggttaa

SEQ ID NO: 1525 - protein, 43 aa, Rhodoferax ferrireducens T118
MFKENEMKVSASVKKICRNCKVIRRKGVVRVICTDPRHKQRQG

SEQ ID NO: 1526 - DNA, 117 bp, Saccharophagus degradans 2-40
  CDS (1)..(117): transl_table=11
atgaaagttcgtgcttcaattaaaaaaatgtgtcgcaattgcaaattagttcgtcgtaagggcgtattaagagttatttgctccgcagagccacgtcataagcagcgtcaaggctaa

SEQ ID NO: 1527 - protein, 38 aa, Saccharophagus degradans 2-40
MKVRASIKKMCRNCKLVRRKGVLRVICSAEPRHKQRQG

SEQ ID NO: 1528 - DNA, 114 bp, Lactobacillus salivarius UCC118
  CDS (1)..(114): transl_table=11
atgaaagtaagaccatcagttaaaccaatgtgtgaacactgtaaagtaattaagcgtaaaggtcgcgttatggttatttgcagtaatccaaagcacaaacaacgtcaaggataa

SEQ ID NO: 1529 - protein, 37 aa, Lactobacillus salivarius UCC118
MKVRPSVKPMCEHCKVIKRKGRVMVICSNPKHKQRQG

SEQ ID NO: 1530 - DNA, 114 bp, Gossypium hirsutum
  CDS (1)..(114): transl_table=11
atgaaaataagggcttccgttcgtaaaatttgtgaaaaatgtcgcctaatccgtaggaggggacgaattatcgtaatttgttttaacccgagacataaacaaagacaaggataa

SEQ ID NO: 1531 - protein, 37 aa, Gossypium hirsutum
MKIRASVRKICEKCRLIRRRGRIIVICFNPRHKQRQG

SEQ ID NO: 1532 - DNA, 114 bp, Methylobacillus flagellatus KT
  CDS (1)..(114): transl_table=11
atgagagttcgtgcatcagtgaagacattgtgccgtaattgcaaggtggttcgccgccgtggtgtcgtgcgtgttatttgtactgacccgcgtcataagcaacgccagggttaa

SEQ ID NO: 1533 - protein, 37 aa, Methylobacillus flagellatus KT
MRVRASVKTLCRNCKVVRRRGVVRVICTDPRHKQRQG

SEQ ID NO: 1534 - DNA, 114 bp, Polaromonas sp. JS666
  CDS (1)..(114): transl_table=11
atgagagtttcagcttcggtcaagaaaatttgccgcaactgtaaaatcatccgccgcaagggcgttgtacgcgtgatctgcacggatccgcgtcacaagcagcgccaaggctga

SEQ ID NO: 1535 - protein, 37 aa, Polaromonas sp. JS666
MRVSASVKKICRNCKIIRRKGVVRVICTDPRHKQRQG

SEQ ID NO: 1536 - DNA, 114 bp, Vitis vinifera
  CDS (1)..(114): transl_table=11
atgaaaataagggcttctgttcgtaaaatttgcgaaaaatgtcgactgatccgtagacggggacgaattatagtaatttgtcccaacccgagacataaacaaagacaaggataa

SEQ ID NO: 1537 - protein, 37 aa, Vitis vinifera
MKIRASVRKICEKCRLIRRRGRIIVICPNPRHKQRQG

SEQ ID NO: 1538 - DNA, 126 bp, Chromohalobacter salexigens DSM 3043
  CDS (1)..(126): transl_table=11
ttggagagaacgatgaaagttcgagcttccgtcaagaaaatgtgccgtaactgcaagatcattcggcgcaatggcgcgattcgtgtcatctgtaccgagccgcggcataaacagcgtcagggctga

SEQ ID NO: 1539 - protein, 41 aa, Chromohalobacter salexigens DSM 3043
MERTMKVRASVKKMCRNCKIIRRNGAIRVICTEPRHKQRQG

SEQ ID NO: 1540 - DNA, 117 bp, Psychrobacter cryohalolentis K5
  CDS (1)..(117): transl_table=11
atgaaagttcaagcatcagttaaaaagatttgtggtagctgtaaagttgtgcgccgtaaaggccgtgtacatatcatttgtaccgcagaacctcgccacaagcaacgccaaggttaa

SEQ ID NO: 1541 - protein, 38 aa, Psychrobacter cryohalolentis K5
MKVQASVKKICGSCKVVRRKGRVHIICTAEPRHKQRQG

SEQ ID NO: 1542 - DNA, 117 bp, Baumannia cicadellinicola str. Hc (Homalodisca coagulata)
  CDS (1)..(117): transl_table=11
atgaaagtacgtacttccgtcaaaacattgtgtcgtaactgcaaaattgttaagcgtcatggtattattcgtgtaatttgtagttctgatcctaaacataaacaacgtcaaggttaa

SEQ ID NO: 1543 - protein, 38 aa, Baumannia cicadellinicola str. Hc (Homalodisca coagulata)
MKVRTSVKTLCRNCKIVKRHGIIRVICSSDPKHKQRQG

SEQ ID NO: 1544 - DNA, 126 bp, Acidobacteria bacterium Ellin345
  CDS (1)..(126): transl_table=11
ttggaaaaggcaatgaaggttcgggcatcggtaaagaaaatctgtgacaagtgcaaggtgatccgtcgccacggtgtggtgcgggtaatctgcgaaaacgcgaagcacaagcagcgtcaaggctaa

SEQ ID NO: 1545 - protein, 41 aa, Acidobacteria bacterium Ellin345
MEKAMKVRASVKKICDKCKVIRRHGVVRVICENAKHKQRQG

SEQ ID NO: 1546 - DNA, 114 bp, Deinococcus geothermalis DSM 11300
  CDS (1)..(114): transl_table=11
atgaaagttcgcagcagtgtcaagagaatgtgcgacaactgcaaggtgatccgccgccatgggcgcgtgctggtcatttgcaccaatgtgaagcacaagcagaggcagggttaa

SEQ ID NO: 1547 - protein, 37 aa, Deinococcus geothermalis DSM 11300
MKVRSSVKRMCDNCKVIRRHGRVLVICTNVKHKQRQG

SEQ ID NO: 1548 - DNA, 117 bp, Pseudomonas entomophila L48
  CDS (1)..(117): transl_table=11
atgaaagttcgtgcatcggtgaaaaagctgtgccgtaactgcaagatcattcgtcgcgaaggtatcgtgcgcgtgatctgcagcgcggaaccgcgtcacaagcagcgccaaggctga

SEQ ID NO: 1549 - protein, 38 aa, Pseudomonas entomophila L48
MKVRASVKKLCRNCKIIRREGIVRVICSAEPRHKQRQG

SEQ ID NO: 1550 - DNA, 117 bp, Myxococcus xanthus DK 1622
  CDS (1)..(117): transl_table=11
atgaaggtacgggcgtccgtcaagaagatctgcgacaagtgcaagattgttcgccgtaagggaatcgtgcgcatcatttgcgcctccaacccccggcacaagcagcgccagggctaa

SEQ ID NO: 1551 - protein, 38 aa, Myxococcus xanthus DK 1622
MKVRASVKKICDKCKIVRRKGIVRIICASNPRHKQRQG

SEQ ID NO: 1552 - DNA, 114 bp, Chara vulgaris
  CDS (1)..(114): transl_table=11
atgaaagtacgtgcatccgttcgaaaaatatgtgaacattgtagacttattagaagacgaagaaaagttatgataatatgttttaatccaaaacataaacaaagacaaggataa

SEQ ID NO: 1553 - protein, 37 aa, Chara vulgaris
MKVRASVRKICEHCRLIRRRRKVMIICFNPKHKQRQG

SEQ ID NO: 1554 - DNA, 114 bp, Oltmannsiellopsis viridis
  CDS (1)..(114): transl_table=11
atgaaagttcgtgcatctgttcgtaaaatttgtaaagactgtcgattaattcgacgtaagcgtcgtgttatggttatctgttctaacccaaaacacaagcaacgtcaaggttag

SEQ ID NO: 1555 - protein, 37 aa, Oltmannsiellopsis viridis
MKVRASVRKICKDCRLIRRKRRVMVICSNPKHKQRQG

SEQ ID NO: 1556 - DNA, 114 bp, Helicosporidium sp. ex Simulium jonesii
  CDS (1)..(114): transl_table=11
atgaaagtatatccgtctattcgaataatgtgtaataagtgtcgaataattcgtcgaaaaggtattatacgtgttatatgcccaaattctaaacataagcaacgccaaaaataa

SEQ ID NO: 1557 - protein, 37 aa, Helicosporidium sp. ex Simulium jonesii
MKVYPSIRIMCNKCRIIRRKGIIRVICPNSKHKQRQK

SEQ ID NO: 1558 - DNA, 114 bp, Scenedesmus obliquus
  CDS (1)..(114): transl_table=11
atgaaagttcgttcttcagttaaaaaaatttgtactaaatgtcgtttaattcgtcgaaaaggtacagtaatggttatttgtacaaatcctaaacataaacaacgtcaaggataa

SEQ ID NO: 1559 - protein, 37 aa, Scenedesmus obliquus
MKVRSSVKKICTKCRLIRRKGTVMVICTNPKHKQRQG

SEQ ID NO: 1560 - DNA, 114 bp, Pseudendoclonium akinetum
  CDS (1)..(114): transl_table=11
atgaaagtacgtccatcagttcgtaaaatttgtgaaaattgccgtttaattcgtcgtaaaagaaaaattttagttatttgcacaaaccctaaacataaacaacgtcaaggttaa

SEQ ID NO: 1561 - protein, 37 aa, Pseudendoclonium akinetum
MKVRPSVRKICENCRLIRRKRKILVICTNPKHKQRQG

SEQ ID NO: 1562 - DNA, 114 bp, Staurastrum punctulatum
  CDS (1)..(114)
atgaaagtaagagcttcagttcgcaaaatatgtgaaaattgtcgtatgattcgtagacgtgggaaagtaatggtagtttgttcaaatcctaaacataaacaacgtcaaggataa

SEQ ID NO: 1563 - protein, 37 aa, Staurastrum punctulatum
MKVRASVRKICENCRMIRRRGKVMVVCSNPKHKQRQG

SEQ ID NO: 1564 - DNA, 228 bp, Zygnema circumcarinatum
  CDS (1)..(228): transl_table=11
atggaaattattttgttcaagatttctgtttttattacatattccaaaacagcacattatagctttaaaattaaaaaaattgtaaataaatatttatttggaggtaaaatcacaatgaaagtacgagcttcagtgcgtaaaatatgtactaattgtcgaatgattcgtagacgagggaaagttatggtagtatgtactaatcctaaacataaacaacgtcaaggataa

SEQ ID NO: 1565 - protein, 75 aa, Zygnema circumcarinatum
MEIILFKISVFITYSKTAHYSFKIKKIVNKYLFGGKITMKVRASVRKICTNCRMIRRRGKVMVVCTNPKHKQRQG

SEQ ID NO: 1566 - DNA, 117 bp, Pseudoalteromonas atlantica T6c
  CDS (1)..(117): transl_table=11
atgaaagttcgtgcatccgtcaagcggatttgccgtaactgtaaagtcattaagcgcaacggtgttgtgcgtgtgatttgcagttctgaccctaagcataagcaaaggcaaggttaa

SEQ ID NO: 1567 - protein, 38 aa, Pseudoalteromonas atlantica T6c
MKVRASVKRICRNCKVIKRNGVVRVICSSDPKHKQRQG

SEQ ID NO: 1568 - DNA, 114 bp, Populus alba
  CDS (1)..(114): transl_table=11
atgaagataagggcttccgctcgtaaaatttgtgaaaaatgtcgactaatacgtcgacggggacgaattctaataatttgctccaacccgagacataaacaaagacaaggataa

SEQ ID NO: 1569 - protein, 37 aa, Populus alba
MKIRASARKICEKCRLIRRRGRILIICSNPRHKQRQG

SEQ ID NO: 1570 - DNA, 117 bp, Alcanivorax borkumensis SK2
  CDS (1)..(117): transl_table=11
atgaaagttcaggcttctgtaaagaagatctgccgtaactgcaaagtgatccgtcgtaaggggcgtgtcatggtaatctgcagtgccgaaccccggcacaagcagcgccaaggttaa

SEQ ID NO: 1571 - protein, 38 aa, Alcanivorax borkumensis SK2
MKVQASVKKICRNCKVIRRKGRVMVICSAEPRHKQRQG

SEQ ID NO: 1572 - DNA, 114 bp, Rhodococcus jostii RHA1
  CDS (1)..(114): transl_table=11
atgaaggttcagccgagcgtcaagaagatctgcgaaaagtgcaaggtgatccgtcgtaacggccgggtcatggtgatctgcgagaacctgcgccacaagcagcgtcagggctag

SEQ ID NO: 1573 - protein, 37 aa, Rhodococcus jostii RHA1
MKVQPSVKKICEKCKVIRRNGRVMVICENLRHKQRQG

SEQ ID NO: 1574 - DNA, 114 bp, Ostreococcus tauri
  CDS (1)..(114): transl_table=11
atgaaagttcgtgcatctgtaaagaaaatgtgtcctaagtgtcgtgttattcgccgtcatgggaaagtaatggtaatctgtagtaaccctaagcacaaacagcgtcaaggataa

SEQ ID NO: 1575 - protein, 37 aa, Ostreococcus tauri
MKVRASVKKMCPKCRVIRRHGKVMVICSNPKHKQRQG

SEQ ID NO: 1576 - DNA, 114 bp, Trichodesmium erythraeum IMS101
  CDS (1)..(114): transl_table=11
atgaaagttagagcatccgtcaaaaaaatttgtgaaaagtgtcgtgtcattcgtcgtagaggacgagtaatggtgatatgtgttaaccccaaacacaaacaacgtcaaggttaa

SEQ ID NO: 1577 - protein, 37 aa, Trichodesmium erythraeum IMS101
MKVRASVKKICEKCRVIRRRGRVMVICVNPKHKQRQG

SEQ ID NO: 1578 - DNA, 114 bp, Synechococcus sp. CC9311
  CDS (1)..(114): transl_table=11
atgaaggtgcgcgcctcggtcaagaaaatgtgtgaaaagtgccgggtgattcgtcgccacggccgggtaatggtgatttgcccaaaccccaagcacaagcagcgccagggatga

SEQ ID NO: 1579 - protein, 37 aa, Synechococcus sp. CC9311
MKVRASVKKMCEKCRVIRRHGRVMVICPNPKHKQRQG

SEQ ID NO: 1580 - DNA, 114 bp, Alkalilimnicola ehrlichei MLHE-1
  CDS (1)..(114): transl_table=11
atgaaagtacgtgcgtcggtcaaaaagatctgccgtaactgcaagatcgttcgccgcaacggtgtggtgcgggtgatctgctccgacggccggcataagcagcgtcagggctga

SEQ ID NO: 1581 - protein, 37 aa, Alkalilimnicola ehrlichei MLHE-1
MKVRASVKKICRNCKIVRRNGVVRVICSDGRHKQRQG

SEQ ID NO: 1582 - DNA, 114 bp, Shewanella frigidimarina NCIMB 400
  CDS (1)..(114): transl_table=11
atgaaagttcgagcttccgttaagaagatctgccgtaattgcaagatcgtcaagcgtagtggtgttgttcgtgttatttgtattgaacctaaacacaaacagcgtcaaggctag

SEQ ID NO: 1583 - protein, 37 aa, Shewanella frigidimarina NCIMB 400
MKVRASVKKICRNCKIVKRSGVVRVICIEPKHKQRQG

SEQ ID NO: 1584 - DNA, 114 bp, Syntrophomonas wolfei subsp. wolfei str. Goettingen
  CDS (1)..(114): transl_table=11
ttgaaggtaaaaccgtcagtaaagcctatctgtgaaaaatgtaagattatcaaacgcaagggaaaagtcatggttatctgtgaaaaccccaagcataaacaagttcagggttaa

SEQ ID NO: 1585 - protein, 37 aa, Syntrophomonas wolfei subsp. wolfei str. Goettingen
MKVKPSVKPICEKCKIIKRKGKVMVICENPKHKQVQG

SEQ ID NO: 1586 - DNA, 114 bp, Stigeoclonium helveticum
  CDS (1)..(114): transl_table=11
atgaaagttcgtgcttcagtaaaaaaaatttgtgccaattgtcgtttaattcgtagaaaacgaaaaattttagtgatttgtgtgaatccaaaacataaacagcgtcaaggttaa

SEQ ID NO: 1587 - protein, 37 aa, Stigeoclonium helveticum
MKVRASVKKICANCRLIRRKRKILVICVNPKHKQRQG

SEQ ID NO: 1588 - DNA, 114 bp, Jasminum nudiflorum
  CDS (1)..(114): transl_table=11
atgaaaaaaagagcttctgttcgtaaaatttgtcaaaaatgtcgcctaacccggaggcggggacgcattagagtaatttgttccaacccgagacataaaaaaagacaaggataa

SEQ ID NO: 1589 - protein, 37 aa, Jasminum nudiflorum
MKKRASVRKICQKCRLTRRRGRIRVICSNPRHKKRQG

SEQ ID NO: 1590 - DNA, 114 bp, Pelargonium x hortorum
  CDS (1)..(114): transl_table=11
atgaaaataagggcctccgttcgtaaaatttgtacaaagtgtcagttgatccgtaggaaagggcgaattagagtcatttgttccaatccacgacataaacaaagacaacgataa

SEQ ID NO: 1591 - protein, 37 aa, Pelargonium x hortorum
MKIRASVRKICTKCQLIRRKGRIRVICSNPRHKQRQR

SEQ ID NO: 1592 - DNA, 114 bp, Piper cenocladum
  CDS (1)..(114): transl_table=11
atgaaaataagagcctctgctcgtaaaatttgtgaaaaatgtcgtttgattcgtagacgtggacgaattttagtaatttgttccaacccgagacataaacagagacaaggataa

SEQ ID NO: 1593 - protein, 37 aa, Piper cenocladum
MKIRASARKICEKCRLIRRRGRILVICSNPRHKQRQG

SEQ ID NO: 1594 - DNA, 120 bp, Lactobacillus brevis ATCC 367
  CDS (1)..(120): transl_table=11
atgaaagtaagaccatcagttaagccaatgtgcgaacactgcaaggttatcaagcgtaagggccgagtaatggttatttgctcagctaaccctaagcataaacaacgccagggtaagtaa

SEQ ID NO: 1595 - protein, 39 aa, Lactobacillus brevis ATCC 367
MKVRPSVKPMCEHCKVIKRKGRVMVICSANPKHKQRQGK

SEQ ID NO: 1596 - DNA, 117 bp, Buchnera aphidicola str. Cc (Cinara cedri)
  CDS (1)..(117): transl_table=11
atgaaagttcgagcttcagtaaaaaagatatgtcgtaattgtaagattattcgtagaaaaaatataattcgtgttatttgtagtaatgatccaaaacataaacaaagacaaggataa

SEQ ID NO: 1597 - protein, 38 aa, Buchnera aphidicola str. Cc (Cinara cedri)
MKVRASVKKICRNCKIIRRKNIIRVICSNDPKHKQRQG

SEQ ID NO: 1598 - DNA, 120 bp, Pediococcus pentosaceus ATCC 25745
  CDS (1)..(120): transl_table=11
atgaaggtacgtccatcagttaagacaatgtgtgaacattgcaaaatcattagacgtaaagggcgcgttatggtaatttgctcagcaaatcctaagcacaaacagcgtcaaggaaaataa

SEQ ID NO: 1599 - protein, 39 aa, Pediococcus pentosaceus ATCC 25745
MKVRPSVKTMCEHCKIIRRKGRVMVICSANPKHKQRQGK

SEQ ID NO: 1600 - DNA, 117 bp, Lactobacillus casei ATCC 334
  CDS (1)..(117): transl_table=11
atgaaagtacgtccatctgttaaaaagatgtgcgagcactgcaaagtggtccgtcgtaaaggccgggtcatgattatctgctctgcaaacccaaagcataagcaacgtcagggataa

SEQ ID NO: 1601 - protein, 38 aa, Lactobacillus casei ATCC 334
MKVRPSVKKMCEHCKVVRRKGRVMIICSANPKHKQRQG

SEQ ID NO: 1602 - DNA, 120 bp, Oenococcus oeni PSU-1
  CDS (1)..(120): transl_table=11
gtgaaagtacgtccatctgtaaaaccaatgtgtgatcaatgccgtgttattaagcggaatggtcgcgttatggtaatttgctcggcaaatcccaaacacaagcaacgccagggcaagtaa

SEQ ID NO: 1603 - protein, 39 aa, Oenococcus oeni PSU-1
MKVRPSVKPMCDQCRVIKRNGRVMVICSANPKHKQRQGK

SEQ ID NO: 1604 - DNA, 117 bp, Lactobacillus gasseri ATCC 33323
  CDS (1)..(117): transl_table=11
atgaaagttagaccatctgttaaaccaatgtgtgaacattgcaagattatcaaaagacatggtcgtgttatggtgatttgctctgcaaaccctaagcacaaacaacgtcaaggttaa

SEQ ID NO: 1605 - protein, 38 aa, Lactobacillus gasseri ATCC 33323
MKVRPSVKPMCEHCKIIKRHGRVMVICSANPKHKQRQG

SEQ ID NO: 1606 - DNA, 114 bp, Coffea arabica
  CDS (1)..(114): transl_table=11
atgaaaataagagcttctgttcgtaaaatttgtgacaaatgtcgactaatccgcaggcgagggcgaattatagtaatttgttccaacccgagacataaacaaagacagggataa

SEQ ID NO: 1607 - protein, 37 aa, Coffea arabica
MKIRASVRKICDKCRLIRRRGRIIVICSNPRHKQRQG

SEQ ID NO: 1608 - DNA, 120 bp, Leuconostoc mesenteroides subsp. mesenteroides ATCC 8293
  CDS (1)..(120): transl_table=11
atgaaagtacgcccatcagttaaaaagatgtgtgatgcttgccgtgttatcaagcgtaatggtcgaacaatgatcatttgttctgctaaccccaagcataagcaacgcgctggaaagtaa

SEQ ID NO: 1609 - protein, 39 aa, Leuconostoc mesenteroides subsp. mesenteroides ATCC 8293
MKVRPSVKKMCDACRVIKRNGRTMIICSANPKHKQRAGK

SEQ ID NO: 1610 - DNA, 114 bp, Solibacter usitatus Ellin6076
  CDS (1)..(114): transl_table=11
atgaaagtgcgagcgtcggttaagaagatttgcgacaagtgcaaggtgatccaccgcgaaggcgtggtgcgggtcatttgcacgaacccgaaacacaaacagagacaagggtaa

SEQ ID NO: 1611 - protein, 37 aa, Solibacter usitatus Ellin6076
MKVRASVKKICDKCKVIHREGVVRVICTNPKHKQRQG

SEQ ID NO: 1612 - DNA, 114 bp, Arthrobacter sp. FB24
  CDS (1)..(114): transl_table=11
atgaaggtcaagccgagcgtcaagcagatctgcgaaaagtgcaaagtgatccgccgtaatggccgggtcatggtgatctgcgagaacccgcgccacaagcagcgccagggctaa

SEQ ID NO: 1613 - protein, 37 aa, Arthrobacter sp. FB24
MKVKPSVKQICEKCKVIRRNGRVMVICENPRHKQRQG

SEQ ID NO: 1614 - DNA, 114 bp, Magnetococcus sp. MC-1
  CDS (1)..(114): transl_table=11
atgaaagtacgtgcatcggtaaagtcaatttgtaaggactgcaaggtaattcgccgcaatggtagcgtgcgtgtgatttgcaaaaaccctcgtcacaagcaacgtcaaggctaa

SEQ ID NO: 1615 - protein, 37 aa, Magnetococcus sp. MC-1
MKVRASVKSICKDCKVIRRNGSVRVICKNPRHKQRQG

SEQ ID NO: 1616 - DNA, 114 bp, Acidothermus cellulolyticus 11B
  CDS (1)..(114): transl_table=11
atgaaggttaagccgagcgtcaagaagatttgtgacaagtgcaaggtgatccggcgacacggccgggtcatggtgatttgccagaatctgcggcacaagcagcgtcaggggtag

SEQ ID NO: 1617 - protein, 37 aa, Acidothermus cellulolyticus 11B
MKVKPSVKKICDKCKVIRRHGRVMVICQNLRHKQRQG

SEQ ID NO: 1618 - DNA, 114 bp, Phaeodactylum tricornutum
  CDS (1)..(114)
atgaaagttcgtccttcagtcaaaaaaatgtgtgataaatgtcgagtaattaaacgacatggtaaaattatggtaatttgttcaaatccaaaacataaacaacgtcaaggataa

SEQ ID NO: 1619 - protein, 37 aa, Phaeodactylum tricornutum
MKVRPSVKKMCDKCRVIKRHGKIMVICSNPKHKQRQG

SEQ ID NO: 1620 - DNA, 114 bp, Candidatus Ruthia magnifica str. Cm (Calyptogena magnifica)
  CDS (1)..(114): transl_table=11
atgaaagtaagagcatcagttaagaaaatttgtaacaattgtaaaattattaaacgtcatggtgtagttcgtgttatttgtaaagaacctcgtcataagcaaagacaaggttaa

SEQ ID NO: 1621 - protein, 37 aa, Candidatus Ruthia magnifica str. Cm (Calyptogena magnifica)
MKVRASVKKICNNCKIIKRHGVVRVICKEPRHKQRQG

SEQ ID NO: 1622 - DNA, 114 bp, Nocardioides sp. JS614
  CDS (1)..(114): transl_table=11
atgaaggtcaagccgagcgtcaagccgatctgtgacaagtgcaaggtgatccgtcgccacggccgcgtcatggtcatctgcgagaacccgcgccacaagcagcgtcagggctga

SEQ ID NO: 1623 - protein, 37 aa, Nocardioides sp. JS614
MKVKPSVKPICDKCKVIRRHGRVMVICENPRHKQRQG

SEQ ID NO: 1624 - DNA, 114 bp, Shewanella amazonensis SB2B
  CDS (1)..(114): transl_table=11
atgaaagttcgagcttccgtgaagaagatctgccgtaactgcaagatcatcaagcgtagcggcgttgtacgcgttatctgtgttgaaccaaaacacaaacagcgtcaaggctaa

SEQ ID NO: 1625 - protein, 37 aa, Shewanella amazonensis SB2B
MKVRASVKKICRNCKIIKRSGVVRVICVEPKHKQRQG

SEQ ID NO: 1626 - DNA, 114 bp, Azoarcus sp. BH72
  CDS (1)..(114): transl_table=11
atgagagtccaggcttccgtgaagcggatctgccgcaactgcaagatcattcgtcgtaagggtgtggtgcgcgtcatttgcaccgatccgcggcacaaacaacgccagggttga

SEQ ID NO: 1627 - protein, 37 aa, Azoarcus sp. BH72
MRVQASVKRICRNCKIIRRKGVVRVICTDPRHKQRQG

SEQ ID NO: 1628 - DNA, 114 bp, Psychromonas ingrahamii 37
  CDS (1)..(114): transl_table=11
atgaaagttcgtgcatccgttaaaaaaatctgtcgtaactgcaaagttatcaagcgccacggtgtggtgcgtgttatctgtgtagagccaaagcataaacagcgccaaggctaa

SEQ ID NO: 1629 - protein, 37 aa, Psychromonas ingrahamii 37
MKVRASVKKICRNCKVIKRHGVVRVICVEPKHKQRQG

SEQ ID NO: 1630 - DNA, 114 bp, Borrelia turicatae 91E135
  CDS (1)..(114): transl_table=11
atgaaagttagggtaagtgtaaagccaatttgtgaaaaatgtaaagtgataaagagaaaaggtgttttaagaattatttgtgataatcttaaacataaacaaagacaaaaataa

SEQ ID NO: 1631 - protein, 37 aa, Borrelia turicatae 91E135
MKVRVSVKPICEKCKVIKRKGVLRIICDNLKHKQRQK

SEQ ID NO: 1632 - DNA, 114 bp, Arthrobacter aurescens TC1
  CDS (1)..(114): transl_table=11
atgaaggtcaagccgagcgtcaagcagatctgcgacaagtgcaaagtgatccgccgtaacggccgggtcatggtgatctgcgagaacccgcgccacaagcagcgccagggctaa

SEQ ID NO: 1633 - protein, 37 aa, Arthrobacter aurescens TC1
MKVKPSVKQICDKCKVIRRNGRVMVICENPRHKQRQG

SEQ ID NO: 1634 - DNA, 114 bp, Marinobacter aquaeolei VT8
  CDS (1)..(114): transl_table=11
atgaaagtacgcgcttcggtaaagaaaatttgccgtaactgcaaagtaattcgacgcaatggctcagttcgagtcatctgctcggagcctcgtcacaagcagcgccagggctga

SEQ ID NO: 1635 - protein, 37 aa, Marinobacter aquaeolei VT8
MKVRASVKKICRNCKVIRRNGSVRVICSEPRHKQRQG

SEQ ID NO: 1636 - DNA, 114 bp, Acidovorax avenae subsp. citrulli AAC00-1
  CDS (1)..(114): transl_table=11
atgagagtttcggcttcggtcaagaaaatctgccgcaactgcaagatcatccgccgcaagggtgtcgtgcgggtcatctgcaccgacatgcgccacaagcagcgccaaggttga

SEQ ID NO: 1637 - protein, 37 aa, Acidovorax avenae subsp. citrulli AAC00-1
MRVSASVKKICRNCKIIRRKGVVRVICTDMRHKQRQG

SEQ ID NO: 1638 - DNA, 114 bp, Acidovorax sp. JS42
  CDS (1)..(114): transl_table=11
atgagggtttcggcttcggtcaagaaaatttgccgtaactgcaaaatcatccgccgtaagggcgttgtgcgcgtgatctgcacggatcagcgccataagcagcgccaaggttga

SEQ ID NO: 1639 - protein, 37 aa, Acidovorax sp. JS42
MRVSASVKKICRNCKIIRRKGVVRVICTDQRHKQRQG

SEQ ID NO: 1640 - DNA, 114 bp, Alteromonadales bacterium TW-7
  CDS (1)..(114): transl_table=11
atgaaagtacgtgcttccgttaagaaaatatgccgtaactgtaaagttattaaacgtgctggtgtagtacgcgtaatttgcagtgagcctaagcataagcaaaggcaaggctaa

SEQ ID NO: 1641 - protein, 37 aa, Alteromonadales bacterium TW-7
MKVRASVKKICRNCKVIKRAGVVRVICSEPKHKQRQG

SEQ ID NO: 1642 - DNA, 114 bp, Nodularia spumigena CCY 9414
  CDS (1)..(114): transl_table=11
atgaaagttcgagcctcagtcaagaaaatgtgtgaaaaatgtaacgtgatccgccgtcgcggtcgcgttatggtgatttgcgtgaaccccaaacacaaacaacgccaaggctaa

SEQ ID NO: 1643 - protein, 37 aa, Nodularia spumigena CCY 9414
MKVRASVKKMCEKCNVIRRRGRVMVICVNPKHKQRQG

SEQ ID NO: 1644 - DNA, 114 bp, Thermosinus carboxydivorans Nor1
  CDS (1)..(114): transl_table=11
atgaaagtcagaccgtcggtcaagcccatctgtgaaaaatgcaaagtcattaaacgcaaaggccatgtcatggtaatttgcgaaaatcccaaacataaacaaaagcaaggctaa

SEQ ID NO: 1645 - protein, 37 aa, Thermosinus carboxydivorans Nor1
MKVRPSVKPICEKCKVIKRKGHVMVICENPKHKQKQG

SEQ ID NO: 1646 - DNA, 117 bp, Microscilla marina ATCC 23134
  CDS (1)..(117): transl_table=11
atgaaagttaaagcatcagtaaaaaaacgtagcgctgattgcaaaattatcagacgcaaaggtaaagtttacgtgattaataaaaagaatccgaggtttaaacaacgacaaggataa

SEQ ID NO: 1647 - protein, 38 aa, Microscilla marina ATCC 23134
MKVKASVKKRSADCKIIRRKGKVYVINKKNPRFKQRQG

SEQ ID NO: 1648 - DNA, 114 bp, Cyanothece sp. CCY 0110
  CDS (1)..(114): transl_table=11
atgaaagtcagaccatcagtaaaaaaaatgtgtgaaaaatgtcgcgtcatacggcgacgggggaaagtcatggtactgtgtactaacccaaaacacaagcaacgtcagggttag

SEQ ID NO: 1649 - protein, 37 aa, Cyanothece sp. CCY 0110
MKVRPSVKKMCEKCRVIRRRGKVMVLCTNPKHKQRQG

SEQ ID NO: 1650 - DNA, 114 bp, Marinobacter sp. ELB17
  CDS (1)..(114): transl_table=11
atgaaagtacgcgcttcggtaaagaaaatttgccgtaactgcaaagtaattcgtcgcaatggcgccgtaagggtcatttgctcggagcctcgccacaagcaacgtcagggttaa

SEQ ID NO: 1651 - protein, 37 aa, Marinobacter sp. ELB17
MKVRASVKKICRNCKVIRRNGAVRVICSEPRHKQRQG

SEQ ID NO: 1652 - DNA, 114 bp, Janibacter sp. HTCC2649
  CDS (1)..(114): transl_table=11
atgaaggttcagccgagcgtcaagaagatctgtgacaagtgcaaggtgatccgccgcaacggtcgggtcatggtcatctgcgagaacccgcgccacaagcagcgccagggttaa

SEQ ID NO: 1653 - protein, 37 aa, Janibacter sp. HTCC2649
MKVQPSVKKICDKCKVIRRNGRVMVICENPRHKQRQG

SEQ ID NO: 1654 - DNA, 117 bp, Croceibacter atlanticus HTCC2559
  CDS (1)..(117): transl_table=11
atgaaagttagagcatccattaaaaagagaagtgccgactgcaaaattgtacgcagaaaaggcagattgtacgtgattaacaaaaagaatcctagattcaaacaaagacaaggataa

SEQ ID NO: 1655 - protein, 38 aa, Croceibacter atlanticus HTCC2559
MKVRASIKKRSADCKIVRRKGRLYVINKKNPRFKQRQG

SEQ ID NO: 1656 - DNA, 117 bp, Leeuwenhoekiella blandensis MED217
  CDS (1)..(117): transl_table=11
atgaaagtaagagcatcagtaaagaaaagaagtgcagactgcaagattgtacgtcgcaaaggaagattatacgtaattaacaaaaagaaccctaagttcaaacaaagacaaggttaa

SEQ ID NO: 1657 - protein, 38 aa, Leeuwenhoekiella blandensis MED217
MKVRASVKKRSADCKIVRRKGRLYVINKKNPKFKQRQG

SEQ ID NO: 1658 - DNA, 114 bp, Synechococcus sp. RS9917
  CDS (1)..(114): transl_table=11
atgaaggtgcgcgcctcggtcaagaaaatgtgtgagaagtgccgtgtgattcgccgccacggccgggtcatggtgatctgcaccaaccccaagcacaagcagcgtcagggctga

SEQ ID NO: 1659 - protein, 37 aa, Synechococcus sp. RS9917
MKVRASVKKMCEKCRVIRRHGRVMVICTNPKHKQRQG

SEQ ID NO: 1660 - DNA, 114 bp, Blastopirellula marina DSM 3645
  CDS (1)..(114): transl_table=11
atgaaagttcgagcaagcgtaaaacgcatctgcgataagtgcaaagtggtccgccgccgcggccggattttcgtgatctgcgagaatccccgccataagcaacgtcagggctag

SEQ ID NO: 1661 - protein, 37 aa, Blastopirellula marina DSM 3645
MKVRASVKRICDKCKVVRRRGRIFVICENPRHKQRQG

SEQ ID NO: 1662 - DNA, 114 bp, Reinekea sp. MED297
  CDS (1)..(114): transl_table=11
atgaaagtacgtgcatcggttaaaaaaatatgccgtaactgcaagattattcgacgcaacggttcagtgcgcgtgatctgttctgatcccaagcacaagcagcgccaagggtaa

SEQ ID NO: 1663 - protein, 37 aa, Reinekea sp. MED297
MKVRASVKKICRNCKIIRRNGSVRVICSDPKHKQRQG

SEQ ID NO: 1664 - DNA, 114 bp, Nitrococcus mobilis Nb-231
  CDS (1)..(114): transl_table=11
atgaaggtgcgtgcgtcggtcaaaaaaatgtgccgaaactgtaaggtgattcgccgcagagggacgatacgggttatctgtatcgaggcccggcacaagcagcggcaaggctaa

SEQ ID NO: 1665 - protein, 37 aa, Nitrococcus mobilis Nb-231
MKVRASVKKMCRNCKVIRRRGTIRVICIEARHKQRQG

SEQ ID NO: 1666 - DNA, 117 bp, Polaribacter irgensii 23-P
  CDS (1)..(117): transl_table=11
atgaaagttagagcatcagttaaaaaaagaagtgccgactgcaaaatagtgcgcaggaaaggtagattatatgtgattaataaacaaaatcctagatttaaacaaagacaagggtaa

SEQ ID NO: 1667 - protein, 38 aa, Polaribacter irgensii 23-P
MKVRASVKKRSADCKIVRRKGRLYVINKQNPRFKQRQG

SEQ ID NO: 1668 - DNA, 114 bp, Pseudoalteromonas tunicata D2
  CDS (1)..(114): transl_table=11
atgaaagtacgtgcttccgttaagaaaatttgccgtaactgcaaagttgttaaacgtgccggtgttgtacgtgtaatttgtagtgagccaaagcacaagcaaaggcaaggctaa

SEQ ID NO: 1669 - protein, 37 aa, Pseudoalteromonas tunicata D2
MKVRASVKKICRNCKVVKRAGVVRVICSEPKHKQRQG

SEQ ID NO: 1670 - DNA, 117 bp, Robiginitalea biformata HTCC2501
  CDS (1)..(117): transl_table=11
atgaaagtaagagcatccataaagaaacgcagcgccgaatgcaagatcgtacggcgcaaagggcgactgtacgtaatcaacaagaagaatcctagatttaaacaaagacaagggtaa

SEQ ID NO: 1671 - protein, 38 aa, Robiginitalea biformata HTCC2501
MKVRASIKKRSAECKIVRRKGRLYVINKKNPRFKQRQG

SEQ ID NO: 1672 - DNA, 303 bp, Vitis vinifera
  CDS (1)..(303)
  misc_feature (188)..(188): r is g or a
  misc_feature (296)..(296): k is g or t
atgaaggtgcgatcatcagtgaagaaaatgtgtgagtattgtagaacagtcaaacgtcgtgggcgagtatatgtactatgcacagccaatcccaagcacaagcaacgacaaggcatgtcaacatttgcccatgaaggccctcttcctccaatgtcctcagagatgaatgccaagcaggagatctcacrgaaccacaggttgcagggaggtctggcatctattatacccaagaagcctgagccatctatgatgtatggatggagagcatctctggcatctctcctgttcaagcaggkgaattag

SEQ ID NO: 1673 - protein, 100 aa, Vitis vinifera
  misc_feature (63)..(63): The Xaa at location 63 stands for Arg, or Gln.
  misc_feature (99)..(99): The Xaa at location 99 stands for Gly, or Val.
MKVRSSVKKMCEYCRTVKRRGRVYVLCTANPKHKQRQGMSTFAHEGPLPPMSSEMNAKQEISXNHRLQGGLASIIPKKPEPSMMYGWRASLASLLFKQXN

SEQ ID NO: 1674 - DNA, 114 bp, Ruminococcus obeum ATCC 29174
  CDS (1)..(114): transl_table=11
atgaaagtaagatcatctgtaaagccgatctgcgaaaaatgcaagatcatcaaaagaaaaggatctatcagagtaatctgtgaaaatccaaaacacaaacagcgtcagggttaa

SEQ ID NO: 1675 - protein, 37 aa, Ruminococcus obeum ATCC 29174
MKVRSSVKPICEKCKIIKRKGSIRVICENPKHKQRQG

SEQ ID NO: 1676 - DNA, 117 bp, Planctomyces maris DSM 8797
  CDS (1)..(117): transl_table=11
atgaaagtccgagccagtgttaagcggatttgtgaaaactgtaaagtcattcggcgaaaagggcgggtctatgtgatctgctcttccaacccgcgccataaacagcgtcagggttaa

SEQ ID NO: 1677 - protein, 38 aa, Planctomyces maris DSM 8797
MKVRASVKRICENCKVIRRKGRVYVICSSNPRHKQRQG

SEQ ID NO: 1678 - DNA, 114 bp, Caminibacter mediatlanticus TB-2
  CDS (1)..(114): transl_table=11
atgaaagttagagcatcagttaaaaaaatttgccctaaatgcaaaatagtaaaaagaaaaggcattgttagggttatttgtgaaaatccaagacataaacaaagacaaggataa

SEQ ID NO: 1679 - protein, 37 aa, Caminibacter mediatlanticus TB-2
MKVRASVKKICPKCKIVKRKGIVRVICENPRHKQRQG

SEQ ID NO: 1680 - DNA, 117 bp, Pedobacter sp. BAL39
  CDS (1)..(117): transl_table=11
atgaaagttaggtcatcaattaaaaaacgcagtgctgactgcaaggttattcgtcgtaagggtaagctttacgtaattaacaaaaagaaccctaagtttaaacagcgtcaaggttaa

SEQ ID NO: 1681 - protein, 38 aa, Pedobacter sp. BAL39
MKVRSSIKKRSADCKVIRRKGKLYVINKKNPKFKQRQG

SEQ ID NO: 1682 - DNA, 126 bp, Marinobacter algicola DG893
  CDS (1)..(126): transl_table=11
ctggagtcgacaatgaaagtacgcgcttcggtaaagaaaatttgccgtaactgcaaagtaattcgtcgcaatggctcggtacgagtcatttgctcggagcctcgccacaagcagcgtcagggttaa

SEQ ID NO: 1683 - protein, 41 aa, Marinobacter algicola DG893
MESTMKVRASVKKICRNCKVIRRNGSVRVICSEPRHKQRQG

SEQ ID NO: 1684 - DNA, 114 bp, Limnobacter sp. MED105
  CDS (1)..(114): transl_table=11
atgaaagttcaggcatctgtaaaaaagatttgtagaaaatgcaaagtgatcaagcgcaaaggcgttgttcgcgtgatttgttctgagccgcgccacaagcagcgtcaaggttaa

SEQ ID NO: 1685 - protein, 37 aa, Limnobacter sp. MED105
MKVQASVKKICRKCKVIKRKGVVRVICSEPRHKQRQG

SEQ ID NO: 1686 - DNA, 291 bp, Oryza sativa subsp. indica
  CDS (1)..(291)
atgaaggttcgcgcgtcggtgaagcggctgtgcgcgtactgcaaggtggtgaagcgcaggggcatcgtgttcatccagtgcaaggccaacgccaagcacaagcagcgccagggcttctccacgctcgccgaggccgccgccgcctgccaccccccacctccgccgctgctcaccaacacatccccggctgtcgccgccgccgttgcggaggcctcgaaggttgctaagcaagagccgtctatgaagtttaattggcctctgggtttagctgctctgctcaagaacagctaa

SEQ ID NO: 1687 - protein, 96 aa, Oryza sativa subsp. indica
MKVRASVKRLCAYCKVVKRRGIVFIQCKANAKHKQRQGFSTLAEAAAACHPPPPPLLTNTSPAVAAAVAEASKVAKQEPSMKFNWPLGLAALLKNS

SEQ ID NO: 1688 - DNA, 114 bp, Bacteroides capillosus ATCC 29799
  CDS (1)..(114): transl_table=11
atgaaagtaagaccgtccgtgaagcccatgtgcgagaagtgcaagatcatcaagcgcaagggcaaagtcatggtcatttgcgagaaccccaagcacaagcagagacaaggttaa

SEQ ID NO: 1689 - protein, 37 aa, Bacteroides capillosus ATCC 29799
MKVRPSVKPMCEKCKIIKRKGKVMVICENPKHKQRQG

SEQ ID NO: 1690 - DNA, 114 bp, Actinomyces odontolyticus ATCC 17982
  CDS (1)..(114): transl_table=11
atgaaggtcaagccgagtgtcaagaagatctgtgacaagtgcaaggtgattcgtcgccacggcaacgtcatggtcatctgcgacaaccccaggcacaagcagcgccagggctga

SEQ ID NO: 1691 - protein, 37 aa, Actinomyces odontolyticus ATCC 17982
MKVKPSVKKICDKCKVIRRHGNVMVICDNPRHKQRQG

SEQ ID NO: 1692 - DNA, 303 bp, Vitis vinifera
  CDS (1)..(303)
atgaaggtgcgatcatcagtgaagaaaatgtgtgagtattgtagaacagtcaaacgtcgtgggcgagtatatgtactatgcacagccaatcccaagcacaagcaacgacaaggcatgtcaacatttgcccatgaaggccctcttcctccaatgtcctcagagatgaatgccaagcaggagatctcacggaaccacaggttgcagggaggtctggcatctattatacccaagaagcctgagccatctatgatgtatggatggagagcatctctggcatctctcctgttcaagcaggtgaattag

SEQ ID NO: 1693 - protein, 100 aa, Vitis vinifera
MKVRSSVKKMCEYCRTVKRRGRVYVLCTANPKHKQRQGMSTFAHEGPLPPMSSEMNAKQEISRNHRLQGGLASIIPKKPEPSMMYGWRASLASLLFKQVN

SEQ ID NO: 1694 - DNA, 114 bp, Vitis vinifera
  CDS (1)..(114)
atgaaaataagggcttatgttcgtaaaatttgcgaaaaatgtcgactgatccgtagatggggacgaattatagtaatttgtcccaacccgagacataaacaaagacaaggataa

SEQ ID NO: 1695 - protein, 37 aa, Vitis vinifera
MKIRAYVRKICEKCRLIRRWGRIIVICPNPRHKQRQG

SEQ ID NO: 1696 - DNA, 114 bp, Clostridium leptum DSM 753
  CDS (1)..(114): transl_table=11
atgaaagtcagaccttctgtcaagaaaatctgcgaaaagtgcaaggtcatcaagcgcaagggaaaagttatggtgatctgcgacaatccgaagcataagcagcgccagggctaa

SEQ ID NO: 1697 - protein, 37 aa, Clostridium leptum DSM 753
MKVRPSVKKICEKCKVIKRKGKVMVICDNPKHKQRQG

SEQ ID NO: 1698 - DNA, 117 bp, Rickettsiella grylli
  CDS (1)..(117): transl_table=11
atgaaggttagagcatcgattaaaaaaatttgtcgaaattgtaagattattaaacgaaaaggaaaactaagggtaatttgttctgctgaagcacgtcataagcaacgacaaggttaa

SEQ ID NO: 1699 - protein, 38 aa, Rickettsiella grylli
MKVRASIKKICRNCKIIKRKGKLRVICSAEARHKQRQG

SEQ ID NO: 1700 - DNA, 114 bp, Faecalibacterium prausnitzii M21/2
  CDS (1)..(114): transl_table=11
atgaaggtcaagccttccgtgaaacccatctgcgaaaagtgcaaggtcatccgccgcaaaggccgcgtgatggtcatctgccagaaccccaagcacaagcagcgccagggctaa

SEQ ID NO: 1701 - protein, 37 aa, Faecalibacterium prausnitzii M21/2
MKVKPSVKPICEKCKVIRRKGRVMVICQNPKHKQRQG

SEQ ID NO: 1702 - DNA, 114 bp, Parvimonas micra ATCC 33270
  CDS (1)..(114): transl_table=11
atgaaagtaagaccatcagtgaaaaaaatgtgcgaaaagtgtaaaatcatcagaagaaaaggtagagtaatggtgatttgtgaaaatccaaagcacaaacaaaaacaaggttaa

SEQ ID NO: 1703 - protein, 37 aa, Parvimonas micra ATCC 33270
MKVRPSVKKMCEKCKIIRRKGRVMVICENPKHKQKQG

SEQ ID NO: 1704 - DNA, 114 bp, Carnobacterium sp. AT7
  CDS (1)..(114): transl_table=11
atgaaagtaagaccatcagtaaagaaaatttgtgacaaatgcaaagttatccgtcgtaaaggacgtgttatggtgatttgcgaaaaccctaaacacaaacaacgtcaaggataa

SEQ ID NO: 1705 - protein, 37 aa, Carnobacterium sp. AT7
MKVRPSVKKICDKCKVIRRKGRVMVICENPKHKQRQG

SEQ ID NO: 1706 - DNA, 117 bp, Flavobacteriales bacterium ALC-1
  CDS (1)..(117): transl_table=11
atgaaagtaagagcatcagtaaagaaaagaagcgcagactgtaaattagtgcgcagaaaaggtagactttacgtcattaacaaaaagaatcctagattcaaacaaagacaaggataa

SEQ ID NO: 1707 - protein, 38 aa, Flavobacteriales bacterium ALC-1
MKVRASVKKRSADCKLVRRKGRLYVINKKNPRFKQRQG

SEQ ID NO: 1708 - DNA, 114 bp, Hydrogenivirga sp. 128-5-R1-1
  CDS (1)..(114): transl_table=11
atgagagttagggcatcggttaagaagaggtgtgccaagtgcaagataatccgcaggaagggaaaggtttacgttatatgtgagaaccccaagcacaagcaaaagcaaggatga

SEQ ID NO: 1709 - protein, 37 aa, Hydrogenivirga sp. 128-5-R1-1
MRVRASVKKRCAKCKIIRRKGKVYVICENPKHKQKQG

SEQ ID NO: 1710 - DNA, 117 bp, Kordia algicida OT-1
  CDS (1)..(117): transl_table=11
atgaaagtaagagcatcaataaaaaagagaagtcccgagtgcaaaattgtgcgtcgtaaggggagattatacgtaatcaataaaaagaatcctagatttaaacaaagacaaggatag

SEQ ID NO: 1711 - protein, 38 aa, Kordia algicida OT-1
MKVRASIKKRSPECKIVRRKGRLYVINKKNPRFKQRQG

SEQ ID NO: 1712 - DNA, 237 bp, Picea sitchensis
  CDS (1)..(237)
atgaaggtgaggtcatcagtgaagaagctgtgtgagttctgcagatccgtgaaacgtcgtggaaaggtttatatcttatgcacctccaatcccaaacacaagcagcgccaaggaatttcgacatttgcatatcaaggtccactgtctcctacgtctttggaaagtaactgcaagaaagaaatttctggtgctgaaagtggtggcgtaggtctagcttcaattctttcaaattcatga

SEQ ID NO: 1713 - protein, 78 aa, Picea sitchensis
MKVRSSVKKLCEFCRSVKRRGKVYILCTSNPKHKQRQGISTFAYQGPLSPTSLESNCKKEISGAESGGVGLASILSNS

SEQ ID NO: 1714 - DNA, 294 bp, Populus trichocarpa
  CDS (1)..(294)
atgaaggtgaggtcatcagtgaaaaagatgtgtgagttttgtcagatagttaagcgtcgtggacggatatatgtaatctgtagttcaaatcccaagcacaagcaacgtcaaggctttgcaacatttgcttacagtggcctcatatctgcggagaccactgccccaccgagaattgtacccagtcaaagcatgggaataggcctggcttctctcttacctaaaaagtatgaaccatcaaccatgtatggatggagggctggcctttcatctttcctcttcaaacaagggaattag

SEQ ID NO: 1715 - protein, 97 aa, Populus trichocarpa
MKVRSSVKKMCEFCQIVKRRGRIYVICSSNPKHKQRQGFATFAYSGLISAETTAPPRIVPSQSMGIGLASLLPKKYEPSTMYGWRAGLSSFLFKQGN

SEQ ID NO: 1716 - DNA, 132 bp, Clostridium scindens ATCC 35704
  CDS (1)..(132): transl_table=11
atgaaaggaggatttgacgtgaaggttagatcatcagtaaaaccaatttgcgaaaaatgcaaagtaattaagagaaaaggaagcgttcgtataatctgcgaaaatccaaagcataaacagcgtcagggctaa

SEQ ID NO: 1717 - protein, 43 aa, Clostridium scindens ATCC 35704
MKGGFDVKVRSSVKPICEKCKVIKRKGSVRIICENPKHKQRQG

SEQ ID NO: 1718 - DNA, 114 bp, Micrococcus luteus NCTC 2665
  CDS (1)..(114): transl_table=11
atgaaggttcagccgagcgtgaagcggatttgtgacaagtgccaggtcgtgcgccgtaagggccgcgtgctggtgatctgctcgaacccgcgccacaagcagcgccagggctga

SEQ ID NO: 1719 - protein, 37 aa, Micrococcus luteus NCTC 2665
MKVQPSVKRICDKCQVVRRKGRVLVICSNPRHKQRQG

SEQ ID NO: 1720 - DNA, 114 bp, Bifidobacterium animalis subsp. lactis HN019
  CDS (1)..(114): transl_table=11
atgaaggttagcccaagtgtgaagaggatctgcgaaaactgccgcgtgatccgtcgtcacggtcgcgtcatggtgatctgcaccaacccacgccacaagcagcgtcagggctga

SEQ ID NO: 1721 - protein, 37 aa, Bifidobacterium animalis subsp. lactis HN019
MKVSPSVKRICENCRVIRRHGRVMVICTNPRHKQRQG

SEQ ID NO: 1722 - DNA, 165 bp, Floydiella terrestris
  CDS (1)..(165)
atgcttataaattcttgctattatgcgattctaaacaaaaacaaaatgaatatgaaagtacgtgcttctgttaaaaaaatttgtgcaaattgccgtttaattcgccgaaaaagagtaattttagttatttgtgtaaatcctaaacataaacaacgccaaggttaa

SEQ ID NO: 1723 - protein, 54 aa, Floydiella terrestris
MLINSCYYAILNKNKMNMKVRASVKKICANCRLIRRKRVILVICVNPKHKQRQG

SEQ ID NO: 1724 - DNA, 114 bp, Chlamydomonas moewusii
  CDS (1)..(114)
atgaaagtacgtgcttcagtaaaaaaaatttgtgataactgtcgtgttattagaagaaaaggaacaattatggtaatttgtacaaatccaaagcataaacaacgtcaaggctag

SEQ ID NO: 1725 - protein, 37 aa, Chlamydomonas moewusii
MKVRASVKKICDNCRVIRRKGTIMVICTNPKHKQRQG

SEQ ID NO: 1726 - DNA, 114 bp, Geobacillus sp. G11MC16
  CDS (1)..(114): transl_table=11
atgaaagtgagaccatctgtcaaaccaatttgcgaaaaatgcaaagtcattcgcagacatggcaaagtaatggtcatttgtgaaaatccgaagcataaacaacgtcaagggtaa

SEQ ID NO: 1727 - protein, 37 aa, Geobacillus sp. G11MC16
MKVRPSVKPICEKCKVIRRHGKVMVICENPKHKQRQG

SEQ ID NO: 1728 - DNA, 249 bp, Candida glabrata
  CDS (1)..(249)
atgttcccattccagctcctcaatagatcaatatcaagtgtagtacgcaatagcgtgctgagacccctacctatgatggcagccactaagccattgatggccccaaggatgctattactattcaaccgtgggtttaaagtcagaacatctgtgaagaagatgtgcagtgattgttatattgtaagaagaaaaggtagagtgtatgtctactgtaagtccaacaagaagcataaacaacgccaaggataa

SEQ ID NO: 1729 - protein, 82 aa, Candida glabrata
MFPFQLLNRSISSVVRNSVLRPLPMMAATKPLMAPRMLLLFNRGFKVRTSVKKMCSDCYIVRRKGRVYVYCKSNKKHKQRQG

SEQ ID NO: 1730 - DNA, 114 bp, Leptospirillum sp. Group II '5-way CG'
  CDS (1)..(114): transl_table=11
atgaaggttagggcttctgttaaaccgatttgttctaaatgcaagattattcggcgaaagggaattttacgcgttaagtgtgaaaacccacgtcacaaacaaagacaaggataa

SEQ ID NO: 1731 - protein, 37 aa, Leptospirillum sp. Group II '5-way CG'
MKVRASVKPICSKCKIIRRKGILRVKCENPRHKQRQG

SEQ ID NO: 1732 - DNA, 114 bp, Campylobacterales bacterium GD 1
  CDS (1)..(114): transl_table=11
atgaaagtacgtgcttcagtgaagaagatgtgtgatgactgtaaagttatcaaaagaaaaggcattgtaagagtaatctgcaaagttaaaaaacataaacagagacaaggataa

SEQ ID NO: 1733 - protein, 37 aa, Campylobacterales bacterium GD 1
MKVRASVKKMCDDCKVIKRKGIVRVICKVKKHKQRQG

SEQ ID NO: 1734 - DNA, 297 bp, Zea mays
  CDS (1)..(297)
atgaaggtccgtgcggcggtgaagcgcctgtgccggttctgcaaggtggtgaagcgccggggaatcgtcttcgtccaatgcacggccaacgccaagcacaagcagcgccaaggcttctccaccatcgccgaagcagccgccgtctcgtgcgttcacctgcctccgccgccgcccgctagcggttccgcctccgccgcagcgttcgcagaggcttcgaaggtggcgaggcaagagatgtctatgaagttcaattggcggctgggtttagctgccctgttcaagaatggagaaaaataa

SEQ ID NO: 1735 - protein, 98 aa, Zea mays
MKVRAAVKRLCRFCKVVKRRGIVFVQCTANAKHKQRQGFSTIAEAAAVSCVHLPPPPPASGSASAAAFAEASKVARQEMSMKFNWRLGLAALFKNGEK

SEQ ID NO: 1736 - DNA, 297 bp, Zea mays
  CDS (1)..(297)
atgaaggtccgtgcggcggtgaagcgcctgtgccggttctgcaaggtggtgaagcgccggggaatcgtcttcgtccaatgcacggccaatgccaagcacaagcagcgccagggcttctccaccatcgccgaagcagccgccgtctcgtgcgttcacctgcctccgccgccgcccgctagcggttccgcctccgccgcagcgttcgcagagacttcgaaggtggcgaggcaagagatgtctatgaagttcaattggcggctgggtttagctgccctgttcaagaatggagaaaaataa

SEQ ID NO: 1737 - protein, 98 aa, Zea mays
MKVRAAVKRLCRFCKVVKRRGIVFVQCTANAKHKQRQGFSTIAEAAAVSCVHLPPPPPASGSASAAAFAETSKVARQEMSMKFNWRLGLAALFKNGEK

SEQ ID NO: 1738 - DNA, 114 bp, Synechococcus sp. RS9916
  CDS (1)..(114): transl_table=11
atgaaggtgcgcgcctcggtcaagaaaatgtgcgaaaagtgccgcgtgattcgccgtcacggccgggtcatggtcatttgcgccaaccccaagcacaagcagcgccagggttga

SEQ ID NO: 1739 - protein, 37 aa, Synechococcus sp. RS9916
MKVRASVKKMCEKCRVIRRHGRVMVICANPKHKQRQG

SEQ ID NO: 1740 - DNA, 117 bp, Stigmatella aurantiaca DW4/3-1
  CDS (1)..(117): transl_table=11
atgaaggttcgggcgtccgtcaagaagatttgcgacaagtgcaaggtgattcgccgtaagggcatcgtgcgcgtcatctgcgcctccaacccccggcacaagcagcgccagggctaa

SEQ ID NO: 1741 - protein, 38 aa, Stigmatella aurantiaca DW4/3-1
MKVRASVKKICDKCKVIRRKGIVRVICASNPRHKQRQG

SEQ ID NO: 1742 - DNA, 114 bp, Spiroplasma citri
  CDS (1)..(114): transl_table=4
atgaaagtaagatcatcagttaaaaaaatctgcgacaaatgtcgtgtaattagaagaaaagagcgtgtgatgataatttgttcacagccaaaacataaacaacgacaaggttaa

SEQ ID NO: 1743 - protein, 37 aa, Spiroplasma citri
MKVRSSVKKICDKCRVIRRKERVMIICSQPKHKQRQG

SEQ ID NO: 1744 - DNA, 114 bp, Oceanobacter sp. RED65
  CDS (1)..(114): transl_table=11
atgaaagtacgcgcttcagtaaagaaaatctgccgtaattgtaagacaattcgtcgcaatggcagtgtgcgtgtgatctgtactgatcctaagcacaaacaacgtcaaggctaa

SEQ ID NO: 1745 - protein, 37 aa, Oceanobacter sp. RED65
MKVRASVKKICRNCKTIRRNGSVRVICTDPKHKQRQG

SEQ ID NO: 1746 - DNA, 117 bp, Psychroflexus torquis ATCC 700755
  CDS (1)..(117): transl_table=11
atgaaagttagagcatcaataaagaaaagaagttctgattgtaagatagttcgtagaaaaggacgtctttatgtcatcaataagaaaaatcctaaattcaaacaaagacaaggttaa

SEQ ID NO: 1747 - protein, 38 aa, Psychroflexus torquis ATCC 700755
MKVRASIKKRSSDCKIVRRKGRLYVINKKNPKFKQRQG

SEQ ID NO: 1748 - DNA, 114 bp, Thinopyrum intermedium
  CDS (1)..(114)
atgaaaataagagcttccgttcgtaaaatttgtacaaaatgtcgactgattcgtaggcatggacgaattagagtcatttgctctaatccgaagcataaacaaagacaggggtaa

SEQ ID NO: 1749 - protein, 37 aa, Thinopyrum intermedium
MKIRASVRKICTKCRLIRRHGRIRVICSNPKHKQRQG

SEQ ID NO: 1750 - DNA, 114 bp, Elymus dahuricus
  CDS (1)..(114)
atgaaaataagagcttccgttcgtaaaatttgtacaaaatgtcgaccgattcgtaggcgtggacgaattagagtcatttgctctaatccgaagcataaacaaagacaggggtaa

SEQ ID NO: 1751 - protein, 37 aa, Elymus dahuricus
MKIRASVRKICTKCRPIRRRGRIRVICSNPKHKQRQG

SEQ ID NO: 1752 - DNA, 117 bp, Neptuniibacter caesariensis
  CDS (1)..(117): transl_table=11
atgaaagtacgtgcatctgttaagaagatctgccgtaactgcaaaatcgttcgtcgtaacggttcagtacgtgtgatctgtaaagtagagccgcgtcacaagcagcgtcagggttaa

SEQ ID NO: 1753 - protein, 38 aa, Neptuniibacter caesariensis
MKVRASVKKICRNCKIVRRNGSVRVICKVEPRHKQRQG

SEQ ID NO: 1754 - DNA, 114 bp, Spiroplasma kunkelii
  CDS (1)..(114): transl_table=4
atgaaagtaagatcatcagttaaaaaaatctgcgacaaatgtcgtgtaattaaaagaaaaaagcgtgtgatgataatttgttcacagccaaaacataaacaacgacaaggttaa

SEQ ID NO: 1755 - protein, 37 aa, Spiroplasma kunkelii
MKVRSSVKKICDKCRVIKRKKRVMIICSQPKHKQRQG

SEQ ID NO: 1756 - DNA, 117 bp, Coprinopsis cinerea
  CDS (1)..(117)
atgaaggttcgcgcatcggtcaaggtgatgtgcgacgggtgcagcgttgtccgacggaaggggagggtatatgttgtgtgctccagaaacccaaaacataagcagcgccaaggctaa

SEQ ID NO: 1757 - protein, 38 aa, Coprinopsis cinerea
MKVRASVKVMCDGCSVVRRKGRVYVVCSRNPKHKQRQG

SEQ ID NO: 1758 - DNA, 114 bp, Gnetum parvifolium
  CDS (1)..(114)
atgaaagtgcgtgcttctgttcgaaaaatttgttccaagtgccaacttatttggagaggtaaacgcctgtctgtagtttgtgtaaatcccagacataaacaaaaacagggttaa

SEQ ID NO: 1759 - protein, 37 aa, Gnetum parvifolium
MKVRASVRKICSKCQLIWRGKRLSVVCVNPRHKQKQG

SEQ ID NO: 1760 - DNA, 114 bp, Pisum sativum
  CDS (1)..(114)
atgaaagtggcggcctctgttcgtaaaatttgtgaaaaatgtcgattgatccgtaggcgaggtcgacttctagtaatttgttccaatccaaaacataaacaaagacaaggataa

SEQ ID NO: 1761 - protein, 37 aa, Pisum sativum
MKVAASVRKICEKCRLIRRRGRLLVICSNPKHKQRQG

SEQ ID NO: 1762 - DNA, 114 bp, Spirogyra maxima
  CDS (1)..(114)
atgaaagtaagagcttcagttcgtaaaatttgtgataattgtcgtctaattcgtagacgaggaaaagttatggtcgtatgctcaaatcctaaacataaacaatgtcaaggatag

SEQ ID NO: 1763 - protein, 37 aa, Spirogyra maxima
MKVRASVRKICDNCRLIRRRGKVMVVCSNPKHKQCQG

SEQ ID NO: 1764 - DNA, 114 bp, Zygnema circumcarinatum
  CDS (1)..(114)
atgaaagtacgagcttcagtgcgtaaaatatgtactaattgtcgaatgattcgtagacgagggaaagttatggtagtatgtactaatcctaaacataaacaacgtcaaggataa

SEQ ID NO: 1765 - protein, 37 aa, Zygnema circumcarinatum
MKVRASVRKICTNCRMIRRRGKVMVVCTNPKHKQRQG

SEQ ID NO: 1766 - DNA, 126 bp, Chromohalobacter salexigens (strain DSM 3043 / ATCC BAA-138 / NCIMB 13768); identical to SEQ ID NO: 1538
  CDS (13)..(126): transl_table=11

SEQ ID NO: 1767 - protein, 37 aa, Chromohalobacter salexigens (strain DSM 3043 / ATCC BAA-138 / NCIMB 13768)
MKVRASVKKMCRNCKIIRRNGAIRVICTEPRHKQRQG

SEQ ID NO: 1768 - DNA, 123 bp, Desulfotalea psychrophila; identical to SEQ ID NO: 1424
  CDS (10)..(123): transl_table=11

SEQ ID NO: 1769 - protein, 37 aa, Desulfotalea psychrophila
MKVRASVKKICSDCKVYKRNGVVRVSCKVKKHKQRQG

SEQ ID NO: 1770 - DNA, 114 bp, Leptospira interrogans
  CDS (1)..(114): transl_table=11
atgaaagtaagaacatcagtcaaaaaaatctgctctagctgtaaagttatcagaagaaaaggtgtaatcggagtaatttgcaccaatcctaaacacaaacaaaggcaagcataa

SEQ ID NO: 1771 - protein, 37 aa, Leptospira interrogans
MKVRTSVKKICSSCKVIRRKGVIGVICTNPKHKQRQA

SEQ ID NO: 1772 - DNA, 114 bp, Mycoplasma sp
  CDS (1)..(114)
atgaaagttagagcatcgattaaacgtatttgcaaagactgtaaaataattaaaagacatggtgttaatagagtaatctgtattaactttaaacataaacaaagacaaggataa

SEQ ID NO: 1773 - protein, 37 aa, Mycoplasma sp
MKVRASIKRICKDCKIIKRHGVNRVICINFKHKQRQG

SEQ ID NO: 1774 - DNA, 117 bp, Natranaerobius thermophilus (strain ATCC BAA-1301 / DSM 18059 / JW/NM-WN-LF); identical to SEQ ID NO: 1352
  CDS (4)..(117): transl_table=11

SEQ ID NO: 1775 - protein, 37 aa, Natranaerobius thermophilus (strain ATCC BAA-1301 / DSM 18059 / JW/NM-WN-LF)
MKTRPSVKPICERCKVIKRRGKVMVICSNPKHKQKQG

SEQ ID NO: 1776 - DNA, 132 bp, Rhodoferax ferrireducens (strain DSM 15236 / ATCC BAA-621 / T118); identical to SEQ ID NO: 1524
  CDS (19)..(132): transl_table=11

SEQ ID NO: 1777 - protein, 37 aa, Rhodoferax ferrireducens (strain DSM 15236 / ATCC BAA-621 / T118)
MKVSASVKKICRNCKVIRRKGVVRVICTDPRHKQRQG

SEQ ID NO: 1778 - DNA, 21 bp, Artificial sequence
  primer
atgaaagttcgtgcatcggtg

SEQ ID NO: 1779 - DNA, 21 bp, Artificial sequence
  primer
atgaaagttcgtgcatcggtg

SEQ ID NO: 1780 - protein, 41 aa, Artificial sequence
  consensus sequence
  Variant (4)..(5): Xaa in position 4 to 5 is any amino acid
  Variant (9)..(10): Xaa in position 9 to 10 is any amino acid
  Variant (12)..(13): Xaa in position 12 to 13 is any amino acid
  Variant (15)..(18): Xaa in position 15 to 18 is any amino acid
  Variant (20)..(20): Xaa in position 20 is any amino acid
  Variant (22)..(24): Xaa in position 22 to 24 is any amino acid
  Variant (25)..(26): Xaa in position 25 to 26 is any or no amino acid
  Variant (30)..(31): Xaa in position 30 to 31 is any amino acid
  Variant (32)..(32): Xaa in position 32 is any or no amino acid
  Variant (34)..(34): Xaa in position 34 is any amino acid
  Variant (40)..(40): Xaa in position 40 is any amino acid
MKVXXSVKXXCXXCXXXXRXGXXXXXVICXXXPXHKQRQXG

SEQ ID NO: 1781 - protein, 20 aa, Artificial sequence
  protein pattern
  Variant (3)..(3): Xaa in position 3 is Ile or Val
  Variant (4)..(4): Xaa in position 4 is any amino acid
  Variant (5)..(5): Xaa in position 5 is Ala, Pro, Ser or Thr
  Variant (8)..(8): Xaa in position 8 is any or no amino acid
  Variant (10)..(10): Xaa in position 10 is any amino acid
  Variant (11)..(11): Xaa in position 11 is any or no amino acid
  Variant (13)..(14): Xaa in position 13 to 14 is any amino acid
  Variant (16)..(17): Xaa in position 16 to 17 is any amino acid
  Variant (18)..(18): Xaa in position 18 is Ile or Val
  Variant (19)..(19): Xaa in position 19 is His, Lys or Arg
MKXXXSVXKXXCXXCXXXXR

SEQ ID NO: 1782 - protein, 8 aa, Artificial sequence
  protein pattern
  Variant (2)..(2): Xaa in position 2 is Lys or Arg
  Variant (3)..(3): Xaa in position 3 is Phe, His or Tyr
  Variant (6)..(6): Xaa in position 6 is any amino acid
PXXKQXQG

SEQ ID NO: 1783 - DNA, 777 bp, Escherichia coli
  CDS (1)..(777): transl_table=11
atgagattgagcatggaaaatataatgaacaatccggttatcggtgtcgtaatgtgcaggaacaggcttaagggtcatgcgacccagactctgcaagaaaagtacctgaatgccatcatccatgcaggcggcttgcctattgcgctaccacatgcgctggcggaaccgtcattacttgaacaacttttgccgaaactcgatggcatttatcttcctggtagtcccagcaatgtgcagccgcacctatatggtgaaaacggcgatgagcctgacgccgatcccgggcgtgatcttctgagcatggcgataattaatgccgcactcgaaaggcgcatccccattttcgccatctgccggggtttacaagaactggtggtggcaaccggtggttcgttgcatcgcaagctgtgcgaacagcctgaattgctggaacatcgggaagatcccgaactgccggtggaacagcaatatgcaccgtcgcatgaagttcaggttgaagaggggggattactgtctgcgttgttacctgaatgtagcaacttttgggtaaactctctacatggacaaggggcgaaggtcgttagcccacggttgcgtgttgaagctcgctcgccggatggcttagttgaggcggttagcgtcatcaatcatccttttgcgctgggcgtacagtggcacccggaatggaacagtagcgagtacgcgctttcgcgtatattgttcgagggctttatcaccgcttgtcagcaccatatcgctgaaaaacagcgactctaa

SEQ ID NO: 1784 - protein, 258 aa, Escherichia coli
MRLSMENIMNNPVIGVVMCRNRLKGHATQTLQEKYLNAIIHAGGLPIALPHALAEPSLLEQLLPKLDGIYLPGSPSNVQPHLYGENGDEPDADPGRDLLSMAIINAALERRIPIFAICRGLQELVVATGGSLHRKLCEQPELLEHREDPELPVEQQYAPSHEVQVEEGGLLSALLPECSNFWVNSLHGQGAKVVSPRLRVEARSPDGLVEAVSVINHPFALGVQWHPEWNSSEYALSRILFEGFITACQHHIAEKQRL

SEQ ID NO: 1785 - DNA, 765 bp, Escherichia coli str. K-12 substr. W3110
  CDS (1)..(765): transl_table=11
atggaaaatataatgaacaatccggttatcggtgtcgtaatgtgcaggaacaggcttaagggtcatgcgacccagactctgcaagaaaagtacctgaatgccatcatccatgcaggcggcttgcctattgcgctaccacatgcgctggcggaaccgtcattacttgaacaacttttgccgaaactcgatggcatttatcttcctggtagtcccagcaatgtgcagccgcacctatatggtgaaaacggcgatgagcctgacgccgatcccgggcgtgatcttctgagcatggcgataattaatgccgcactcgaaaggcgcatccccattttcgccatctgccggggtttacaagaactggtggtggcaaccggtggttcgttgcatcgcaagctgtgcgaacagcctgaattgctggaacatcgggaagatcccgaactgccggtggaacagcaatatgcaccgtcgcatgaagttcaggttgaagaggggggattactgtctgcgttgttacctgaatgtagcaacttttgggtaaactctctacatggacaaggggcgaaggtcgttagcccacggttgcgtgttgaagctcgctcgccggatggcttagttgaggcggttagcgtcatcaatcatccttttgcgctgggcgtacagtggcacccggaatggaacagtagcgagtacgcgctttcgcgtatattgttcgagggctttatcaccgcttgtcagcaccatatcgctgaaaaacagcgactctga

SEQ ID NO: 1786 - protein, 254 aa, Escherichia coli str. K-12 substr. W3110
MENIMNNPVIGVVMCRNRLKGHATQTLQEKYLNAIIHAGGLPIALPHALAEPSLLEQLLPKLDGIYLPGSPSNVQPHLYGENGDEPDADPGRDLLSMAIINAALERRIPIFAICRGLQELVVATGGSLHRKLCEQPELLEHREDPELPVEQQYAPSHEVQVEEGGLLSALLPECSNFWVNSLHGQGAKVVSPRLRVEARSPDGLVEAVSVINHPFALGVQWHPEWNSSEYALSRILFEGFITACQHHIAEKQRL

SEQ ID NO: 1787 - DNA, 753 bp, Pseudomonas aeruginosa PAO1
  CDS (1)..(753): transl_table=11
atgtctcgcctgccgttaatcggcgtcaccgcctgcaccaagcagatcggtcttcatccctaccatattgccggcgacaaatatctgcgtgccgtcgtcaacggcgctggcggtctcccgctgatcattcctgcgctgggcgagtcgatcgaccaggcagccctgctggacagcgtcgacggcttgctcttcactggctcgccgtcgaacgtcgagccccgtcattatagtggaccggcgagcgagcccggcaccctccacgactccgaccgcgacgccactacgttgccgctggtccgcgccgccatcgacgccggcattccggtcctcggcatctgccgcggtttccaggaaatgaacgtggctttcggcggcagcctgcaccagaaggtgcacgaggtcggaaccttcatggaccaccgcgagccggccgaccagccgctcgaggttcagtacgcgccgcgccatgccatgcatgtgcagccgggcggagtgctcgccggtatcggcttgccgagcgagttccaggtcaattccatccatggccagggcgttgatcgtctggcgccgggccttcgagtagaagcactggcgcctgacgggttggtcgaagccatctccgtagaaggtgcaaaagccttcgctcttggtgtgcaatggcacccggagtggcaggttctgacgaaccccaactatctcgctatcttccaggctttcggtaaggcctgcagcaagagggcggggcaacgttga

SEQ ID NO: 1788 - protein, 250 aa, Pseudomonas aeruginosa PAO1
MSRLPLIGVTACTKQIGLHPYHIAGDKYLRAVVNGAGGLPLIIPALGESIDQAALLDSVDGLLFTGSPSNVEPRHYSGPASEPGTLHDSDRDATTLPLVRAAIDAGIPVLGICRGFQEMNVAFGGSLHQKVHEVGTFMDHREPADQPLEVQYAPRHAMHVQPGGVLAGIGLPSEFQVNSIHGQGVDRLAPGLRVEALAPDGLVEAISVEGAKAFALGVQWHPEWQVLTNPNYLAIFQAFGKACSKRAGQR

SEQ ID NO: 1789 - DNA, 777 bp, Escherichia coli O157:H7 EDL933
  CDS (1)..(777): transl_table=11
atgagattgagaatggaaaatataatgaacaatccggttatcggtgtcgtaatgtgcaggaacaggcttaaggggcatgcgacccagactctgcaagaaaagtacctgaatgccatcatccacgcaggcggcttgccaattgcgctgccacatgcgctggcggaaccgtcgttacttgaacaacttttgccgaaactcgatggcatttaccttcctggtagtcccagcaatgtgcagccgcacctatatggtgaaaacggcgatgagcctgacgccgatcccgagcgtgatcttctgagcatggcgttaattaatgccgcactcgaaaggcgcatccccattttcgccatctgccggggtttacaggaactggtggtggcaaccggtggttcgttgcatcgcaagctgtgcgaacagcctgaattgctggaacatcgggaagatcccgaactgccggtggaacagcaatatgcaccgtcgcatgaagttcaggttgaagaggggggattgctgtctgcattgttacctgaatgtagcaacttttgggtaaactctctgcatggacaaggggcgaaggtcgttagcccacggttgcgtgttgaagctcgctcgccggatggcttagttgaggcggttagtgtcatcaatcatccttttgcgctgggcgtacagtggcacccggaatggaacagtagcgagtacgcgctttcgcgtatattgttcgagggctttatcaccgcttgtcagcaccatatcgctgaaaaacagcgactctga

SEQ ID NO: 1790 - protein, 258 aa, Escherichia coli O157:H7 EDL933
MRLRMENIMNNPVIGVVMCRNRLKGHATQTLQEKYLNAIIHAGGLPIALPHALAEPSLLEQLLPKLDGIYLPGSPSNVQPHLYGENGDEPDADPERDLLSMALINAALERRIPIFAICRGLQELVVATGGSLHRKLCEQPELLEHREDPELPVEQQYAPSHEVQVEEGGLLSALLPECSNFWVNSLHGQGAKVVSPRLRVEARSPDGLVEAVSVINHPFALGVQWHPEWNSSEYALSRILFEGFITACQHHIAEKQRL

SEQ ID NO: 1791 - DNA, 777 bp, Escherichia coli O157:H7 str. Sakai
  CDS (13)..(777): transl_table=11
  misc_feature (699)..(699): r is g or a
  misc_feature (726)..(726): r is g or a
gtgagattgagaatggaaaatataatgaacaatccggttatcggtgtcgtaatgtgcaggaacaggcttaaggggcatgcgacccagactctgcaagaaaagtacctgaatgccatcatccacgcaggcggcttgccaattgcgctgccacatgcgctggcggaaccgtcgttacttgaacaacttttgccgaaactcgatggcatttaccttcctggtagtcccagcaatgtgcagccgcacctatatggtgaaaacggcgatgagcctgacgccgatcccgagcgtgatcttctgagcatggcgttaattaatgccgcactcgaaaggcgcatccccattttcgccatctgccggggtttacaggaactggtggtggcaaccggtggttcgttgcatcgcaagctgtgcgaacagcctgaattgctggaacatcgggaagatcccgaactgccggtggaacagcaatatgcaccgtcgcatgaagttcaggttgaagaggggggattgctgtctgcattgttacctgaatgtagcaacttttgggtaaactctctgcatggacaaggggcgaaggtcgttagcccacggttgcgtgttgaagctcgctcgccggatggcttagttgaggcggttagtgtcatcaatcatccttttgcgctgggcgtacagtggcacccggaatggaacagtagcgartacgcgctttcgcgtatattgttcgarggctttatcaccgcttgtcagcaccatatcgctgaaaaacagcgactctga

SEQ ID NO: 1792 - protein, 254 aa, Escherichia coli O157:H7 str. Sakai
MENIMNNPVIGVVMCRNRLKGHATQTLQEKYLNAIIHAGGLPIALPHALAEPSLLEQLLPKLDGIYLPGSPSNVQPHLYGENGDEPDADPERDLLSMALINAALERRIPIFAICRGLQELVVATGGSLHRKLCEQPELLEHREDPELPVEQQYAPSHEVQVEEGGLLSALLPECSNFWVNSLHGQGAKVVSPRLRVEARSPDGLVEAVSVINHPFALGVQWHPEWNSSEYALSRILFEGFITACQHHIAEKQRL

SEQ ID NO: 1793 - DNA, 756 bp, Xanthomonas campestris pv. campestris str. ATCC 33913
  CDS (1)..(756): transl_table=11
atgaccatggttcccctggtcgggttgccgaccgaccgcagcctgcacgggccgcatccgttcctggcagcgggcgagaagtacgtgcgcgcggtggtggaagcggccggtgcacagccggtgctgttgcccagcctgcaaccgccgctggatgccggcgcctggctgcagcggctcgacggcctgctgttgaccggggcggtcagcaatgtggaaccgcatcactacagcgacgaacccagttgggagggcaacccgcacgatcccgcgcgcgatgccaccagcttggcgttgatcccgcaggcactggcgcgcggcctgccggtgctggccatctgccgcgggctgcaggaggtcaacgtcgcgctcggcgggcgcctgcaccagcgcgtgcacgaagtgccgggcctggcggaccatcgcgaagaccgcagcgcgccgctggacatccaatacggccccgcgcatccggtgcagctgcagccgggcggttggctggccggcatgagcgacaccgcgcaggtgcaggtgaactcgctgcatgggcaaggcatcgccacgctggccgcggggctgctggtggaagccaccgcgccggacggcctgatcgaggcctttcgcggccctggcccggggtttctgcttgcggtgcagtggcatccggagtggcgtgtcacacagcatccgttctaccgtgccatcttccaggcctttggcgaggcctgtcgccagtacgccgcccagcgcggaaagtga

SEQ ID NO: 1794 - protein, 251 aa, Xanthomonas campestris pv. campestris str. ATCC 33913
MTMVPLVGLPTDRSLHGPHPFLAAGEKYVRAVVEAAGAQPVLLPSLQPPLDAGAWLQRLDGLLLTGAVSNVEPHHYSDEPSWEGNPHDPARDATSLALIPQALARGLPVLAICRGLQEVNVALGGRLHQRVHEVPGLADHREDRSAPLDIQYGPAHPVQLQPGGWLAGMSDTAQVQVNSLHGQGIATLAAGLLVEATAPDGLIEAFRGPGPGFLLAVQWHPEWRVTQHPFYRAIFQAFGEACRQYAAQRGK

SEQ ID NO: 1795 - DNA, 756 bp, Xanthomonas axonopodis pv. citri str. 306
  CDS (1)..(756): transl_table=11
atggctgtcgttccgctggtcggcctgccgaccgatcgcatcctgcaagggcctcatccgttcctggccgccggcgagaagtacatccgcgcggtggtcgaggcggccggtgcgatgccggtgctgttgcccagcctgcagccggcattggatgcgggcgcgtggctggagcggctggatgggctgctgttgaccggagcggtcagcaatgtggagccgcatcactacagcgacgagcccagttgggaaggcaacccgcacgacccggcgcgcgatgccaccagccttgcgctgatcccgcaggcgcttgcgcgtggcctgccggtgctggcgatctgccgcgggctgcaggaagtcaacgtggccttgggcgggcgcctgcatcagcgcgtgcacgacgtgcccggcctggccgatcaccgggaggacccgggcacaccgatagacacgcaatacggtccggcgcatgtggtgcacctgcatcccggcggttggctggcgggcatgagcgacagcgcccaggtgtgggtcaattccctgcacgggcagggaattgccacgctggccgagggcttgctgatcgaagccaccgcgccggacggtctgatcgaagcgttccacggccccggcccgggctttctgctggcggtgcaatggcatccggaatggcgtgtcacacagcatccgttctaccgtgccatctttcaggccttcggcgaggcctgtcgccaatacgccgcgcgacgcggcaagtga

SEQ ID NO: 1796 - protein, 251 aa, Xanthomonas axonopodis pv. citri str. 306
MAVVPLVGLPTDRILQGPHPFLAAGEKYIRAVVEAAGAMPVLLPSLQPALDAGAWLERLDGLLLTGAVSNVEPHHYSDEPSWEGNPHDPARDATSLALIPQALARGLPVLAICRGLQEVNVALGGRLHQRVHDVPGLADHREDPGTPIDTQYGPAHVVHLHPGGWLAGMSDSAQVWVNSLHGQGIATLAEGLLIEATAPDGLIEAFHGPGPGFLLAVQWHPEWRVTQHPFYRAIFQAFGEACRQYAARRGK

SEQ ID NO: 1797 - DNA, 762 bp, Shewanella oneidensis MR-1
  CDS (1)..(762): transl_table=11
atgtctgtcctgttaccccttattggtgttattgcgtgtaaccaacgattggggtcacacccttttaatattgttggggaaaaatacctgttaggtgtggtgaatggtgctaaggggtggccgctggtgatcccatcattaggtgcggatcaacctatcgaagccattctggcaagacttgacggcattctctttactggttcgccttcaaacgttgagccacatctatatgctggtgtaccgagtgaagcgggcacgcaccatgatcctaagcgtgacgcgactacattaccgcttattcgagccgccatcgcagctggtgtgcctgtccttgggatttgtcgaggttttcaggagatgaatgtggcttttggtggcagtttgcatcaaaaactgcacgaagtcggtcattttattgaacatagagaagataaagaggcctcgttagaggtgcagtatgggccatcccacagtatcactgtggagcctgggggggtcatttacgaggcttggggccgtaactctgcagaggttaactctgtgcatactcaaggcgtggagcgtcttgggattgggttacggccagaagcgtgtgctccagatggtcttgtggaggctttctccgtgatagatgccactgaatttgccctcggcgtgcaatggcatcctgaatggaaggtgagtgacaatccattttacctctctatattcaatgcctttggcgatgcgtgtcgtcgtcgggctaccactcgagtgaaataa

SEQ ID NO: 1798 - protein, 253 aa, Shewanella oneidensis MR-1
MSVLLPLIGVIACNQRLGSHPFNIVGEKYLLGVVNGAKGWPLVIPSLGADQPIEAILARLDGILFTGSPSNVEPHLYAGVPSEAGTHHDPKRDATTLPLIRAAIAAGVPVLGICRGFQEMNVAFGGSLHQKLHEVGHFIEHREDKEASLEVQYGPSHSITVEPGGVIYEAWGRNSAEVNSVHTQGVERLGIGLRPEACAPDGLVEAFSVIDATEFALGVQWHPEWKVSDNPFYLSIFNAFGDACRRRATTRVK

SEQ ID NO: 1799 - DNA, 774 bp, Pseudomonas putida KT2440
  CDS (1)..(774): transl_table=11
atgccacgtgtgcccgtgatcggcattaccgcatgcaccagcatgattgagctgcatgcaacccagaccatcagcgagaagtacgcgcgcgcggcagccaaggcagcgtgtgggctgcccatcgtcattcccagcctcggtgagttgatggacagcgccgatattctcgacgtggtggatgggctgatcttcaccggttcgccgtccaacatcgagccgtaccattacaacggcccggccagtgctgcgggtacccatcacgaccaactgcgcgatgccaccacgttgccgctgatgcgcgccgccatcgccgccggcgtaccggtactcggcatttgccgtggcttccaggaaatgaacgtggcgttgggtggcaccctgcaccagaaggtccacgagaccggcgtgttcatggaccaccgcgaaggcaaggatgagcccctcgacaagcaatacgggccgcgccacaccctgcatgtagagcctggcggcatgctcgaccgcatgggcttgccggcgatattcgacgtcaattccatccacggccaaggcatcgacgtactggcccccgggctgagggtggaggcgctggcacccgatggcctggtggaagcgatttcggtcgagagcagcaagggctttgccctgggcgtgcaatggcaccccgagttccaggtcatggataacccccattacctggccatcttccagtcctttggcaaggcctgccggcaccgctcggtattgcgccagaggctgttgctgtctgcctga

SEQ ID NO: 1800 - protein, 257 aa, Pseudomonas putida KT2440
MPRVPVIGITACTSMIELHATQTISEKYARAAAKAACGLPIVIPSLGELMDSADILDVVDGLIFTGSPSNIEPYHYNGPASAAGTHHDQLRDATTLPLMRAAIAAGVPVLGICRGFQEMNVALGGTLHQKVHETGVFMDHREGKDEPLDKQYGPRHTLHVEPGGMLDRMGLPAIFDVNSIHGQGIDVLAPGLRVEALAPDGLVEAISVESSKGFALGVQWHPEFQVMDNPHYLAIFQSFGKACRHRSVLRQRLLLSA

SEQ ID NO: 1801 - DNA, 768 bp, Pseudomonas putida KT2440
  CDS (1)..(768): transl_table=11
atgagcgcaaatgcggtccctttgatcggtgtcagcgcctgccgtcagcaggtagggaagaactcctcgcacacggtcggcgacaagtatgtcgaggcggccggctttgccggcttgccactgatcttgccggcccgtgatggcggcagcgacacgcaagcgctgctggctcgcctgcacggcattgtttttaccggctcgccttcaaatatcgagccgcatcattacaatggcgcccccagtgtggcgggtacccggcatgatctggcgcgtgatcgcctgaccctgccgctgttgcaggcagccattgccgtcggtgtgcccgtattctgcatctgccgaggctaccaggagctgaacgtggcccttggcggcagcctgcaccagcgtgtgcaggaactgcctggctaccttgaccaccgcgaacctgaggacgcccccctggaggtgcaatacggccctcgccactcggtcagcatcgagcctggcgggttgttcgagcgcctggggttggtggcgcagttcgaggtcaattcgctgcacagccagggcatcgaccgtctggccccaggcctgcgcgtcgaggcacgggccccggatggcctgatcgaggcggtgtccatgcctgcggcaccgggctttgtgcttggggtgcagtggcacccggagtggcgcttcaacgaaaacccggtctcgctgcgtctgtttcaggcgtttcgcgaggcctgcaatgcctacgcagcacgggagggcttacggcaggaatga

SEQ ID NO: 1802 - protein, 255 aa, Pseudomonas putida KT2440
MSANAVPLIGVSACRQQVGKNSSHTVGDKYVEAAGFAGLPLILPARDGGSDTQALLARLHGIVFTGSPSNIEPHHYNGAPSVAGTRHDLARDRLTLPLLQAAIAVGVPVFCICRGYQELNVALGGSLHQRVQELPGYLDHREPEDAPLEVQYGPRHSVSIEPGGLFERLGLVAQFEVNSLHSQGIDRLAPGLRVEARAPDGLIEAVSMPAAPGFVLGVQWHPEWRFNENPVSLRLFQAFREACNAYAAREGLRQE

SEQ ID NO: 1803 - DNA, 765 bp, Pseudomonas syringae pv. tomato str. DC3000
  CDS (1)..(765): transl_table=11
atgccgcgcctccctttgatcggtgtcactgcatgccgccaacaactggacaagtactcgtcccacacggcgggcgataaatatgtcgaagccgccgggtttgccggcatccccgtgatcctgccagcgcttgaaatgcccacagagcctgcgcatctgctggcctcgctggacggtttgttgttcacagggtcgccatccaatgtcgagccgcaccattaccaaggcgctccaagcctggaaggtaccgcccatgatgtgtttcgcgatcgaatgacgctgccgctgctcagggccgcgattgctcagggcgtgccggtgttgtgcatctgccgtggttttcaggagttgaatgtggcattgggcggcagcctgcatcagcgggtgcaggatctgccgggttatctggaccaccgcgagccgcaaagtgaggtgttgtcggtgcagtacgcgccgcagcatgcggtaagggtgcaggctggcgggttactggattcgctcggtctggcgccggggtttgaggtcaacagcctgcatagtcaggggatcgaccggctggcattggctctgcgcgccgaagcactggcgcctgacggtctggtcgaggcggtttcgctgcccggtgcgccggggtttgtgctgggtgtgcagtggcatccggaatgggcgttcagggacaatcccgtgtcattgagcctgttcagcgcgtttcgccaggcctgccagacctatgcgcgcaggcgcggtgatgcgatcagcggctga

SEQ ID NO: 1804 - protein, 254 aa, Pseudomonas syringae pv. tomato str. DC3000
MPRLPLIGVTACRQQLDKYSSHTAGDKYVEAAGFAGIPVILPALEMPTEPAHLLASLDGLLFTGSPSNVEPHHYQGAPSLEGTAHDVFRDRMTLPLLRAAIAQGVPVLCICRGFQELNVALGGSLHQRVQDLPGYLDHREPQSEVLSVQYAPQHAVRVQAGGLLDSLGLAPGFEVNSLHSQGIDRLALALRAEALAPDGLVEAVSLPGAPGFVLGVQWHPEWAFRDNPVSLSLFSAFRQACQTYARRRGDAISG

SEQ ID NO: 1805 - DNA, 777 bp, Shigella flexneri 2a str. 2457T
  CDS (1)..(777): transl_table=11
atgagattgagcatggaaaatataatgaacaatccggttatcggtgtcgtaatgtgcaggaacaggcttaagggtcatgcgacccagactctgcaagaaaagtacctgaatgccatcatccacgcaggcggcttgccaattgcgctaccacatgcgctggcggaaccgtcgttacttgaacaacttttgccgaaactcgatggcatttatcttcctagtagtcccagcaatgtgcagccgcacctatatggtgaaaacggcgatgagcctgacgccgatcccgggcgtgatcttctgagcatggcgataattaatgccgcactcgaaaggcgcatccccattttcgccatctgccggggtttacaagaactggtggtggcaaccggtggttcgttgcatcgcaagctgtgcgaacagcctgaattgctggaacatcgggaagatcccgaactgccggtggaacagcaatatgcaccgtcgcatgaagttcaggttgaagaggggggattactgtctgcgttgttacctgaatgtagcaacttttgggtaaactctctacatggacaaggggcgaaggtcgttagcccacggttgcgtgttgaagctcgctcgccggatggcttagttgaggcggttagcgtcatcaatcatccttttgcgctgggcgtacagtggcacccggaatggaacagtagcgagtacgcgctttcgcgtatattgttcgagggctttatcaccgcttggcagcaccatatcgctgaaaaacagcgactctga

SEQ ID NO: 1806 - protein, 258 aa, Shigella flexneri 2a str. 2457T
MRLSMENIMNNPVIGVVMCRNRLKGHATQTLQEKYLNAIIHAGGLPIALPHALAEPSLLEQLLPKLDGIYLPSSPSNVQPHLYGENGDEPDADPGRDLLSMAIINAALERRIPIFAICRGLQELVVATGGSLHRKLCEQPELLEHREDPELPVEQQYAPSHEVQVEEGGLLSALLPECSNFWVNSLHGQGAKVVSPRLRVEARSPDGLVEAVSVINHPFALGVQWHPEWNSSEYALSRILFEGFITAWQHHIAEKQRL

SEQ ID NO: 1807 - DNA, 804 bp, Methylibium petroleiphilum PM1
  CDS (1)..(804): transl_table=11
atgaaccgccctgacctccctcgcgctccggcccgcgctgtcgtgctggtgccggcctgcaaccgcatcatcggcctgcaccccttccacgtggccgggcagaagtacatcgacgcggttcgcctggccggctgcctgccgctggtggtgccatcggcccaggcgcacgagatcgatgagttgctcgacctcgccgacggcgtgttcctgaccggctcgccaagcaacgtgcacccgcgccacttcgacgaggtggtgcacgaccccagcctgccgctcgacccggtgcgcgacgactggacgctgccgctgatcccgcgtgcgctcgagcgcggcatcccgctgttcgccatctgccgcggcttccaggaaaccaacgtggccctgggtggcacgctgcaccaggcggtgcaggagcggccgggactgatggaccatcgctctgacgacgcccaggcggtggacgtgcagtacggcccggctcacgccgtgagcgtggtccccggcggcctgctcgacaccctgctcggcggcgccgacttcaaggtcaacagcctgcacggccagggcgtgaaccgcctggccccggggctgcgcgcagaggctacagccccggacggcatcatcgaggctttcagcctgccttcggcgccggccttcaacctcggggtgcagtggcaccccgaatggcaggcgcgcgacaacccggtgtcgatgaagctgctgcgcgccttcggtgacgcctgccgcagcttccgtgaactcaaccgtgaatccgtccgcgagcgtcctcgcgtgccctag

SEQ ID NO: 1808 - protein, 267 aa, Methylibium petroleiphilum PM1
MNRPDLPRAPARAVVLVPACNRIIGLHPFHVAGQKYIDAVRLAGCLPLVVPSAQAHEIDELLDLADGVFLTGSPSNVHPRHFDEVVHDPSLPLDPVRDDWTLPLIPRALERGIPLFAICRGFQETNVALGGTLHQAVQERPGLMDHRSDDAQAVDVQYGPAHAVSVVPGGLLDTLLGGADFKVNSLHGQGVNRLAPGLRAEATAPDGIIEAFSLPSAPAFNLGVQWHPEWQARDNPVSMKLLRAFGDACRSFRELNRESVRERPRVP

SEQ ID NO: 1809 - DNA, 762 bp, Shewanella baltica OS155
  CDS (1)..(762): transl_table=11
atgtcagccgatttgcccctcataggtgttattgcttgtaatcaacaactgggttcacatccctttaatattgttggtgaaaaataccttttaggtgtagttaatggcgcgaaaggctggccgttagtgatcccatcgttaggcggcgatttaccgatagacatgattttagaacgtcttgacggtattttgtttactggctctccttctaatgtagaaccccatctttatgcaggccaaccgagcgagcttggtacacaccatgatcctaaacgtgatgcgacgactttgccgctgatccacgccgctattgctgctggggtacctgtattaggtatttgtcgcggttttcaagaaatgaatgtggcttttggtggcagtttgcaccagaagttatatgaggtgggtggctttattgaacatagagaagataaaaccgcatccttagatgtgcaatatggggcttctcacagtattactgttgagcccggggggcttatttacgaggcctggggccgtaactctgcagaggtcaactctgtgcatactcaaggcgtggagcgtctgggtgttgggttgcggccagaagcttatgctccagatgggttagtggaggctttctccgtaataggtactaaagaatttgccctcggtgtgcaatggcatccagagtggaaggtgagcgaaaatccgttttacctctcccttttcaatgccttcggtgatgcatgccggcgcagggctacaactcgagtgaaataa

SEQ ID NO: 1810 - protein, 253 aa, Shewanella baltica OS155
MSADLPLIGVIACNQQLGSHPFNIVGEKYLLGVVNGAKGWPLVIPSLGGDLPIDMILERLDGILFTGSPSNVEPHLYAGQPSELGTHHDPKRDATTLPLIHAAIAAGVPVLGICRGFQEMNVAFGGSLHQKLYEVGGFIEHREDKTASLDVQYGASHSITVEPGGLIYEAWGRNSAEVNSVHTQGVERLGVGLRPEAYAPDGLVEAFSVIGTKEFALGVQWHPEWKVSENPFYLSLFNAFGDACRRRATTRVK

SEQ ID NO: 1811 - DNA, 792 bp, Burkholderia pseudomallei 668
  CDS (1)..(792): transl_table=11
atgaatgaccccctcggcaacggaccgcggcccgtcgtcggcatctgcgcggatcgcaagacggtcggcttgcatgtcgcgcacgtcgcgggcgagaaatacgtgaacgccgtcgtcgacggcgcgcacgcgctcgcgatcgtgctgcccgcgctcggcgagcggcaacccgcggacgagttgctcgcgctcgtcgacggcctgctgctgacgggcagctattcgaacgtcgagcccgcgcgctacggcggcccgacgagcgcgccgggcacgctgcacgacgcggcgcgcgacgcgaccgcgctgccgctcgtgcgcgcggcgatcgacgccggcgtgcccgtgctcgcgatctgccgcggaatgcaggagctgaacgtcgcgtacggcggcacgctgcatcagcaggtgcacgcattgagcggacatgccgaccatcgcgaggacctgtcggcgccggtcgacgtgcagtacgggcccgcgcatccggtgcggctcgtgcccggcggcctgctgcgccggctcgcgggcgcggagaccgtcgaggtcaattctctgcatgcgcagggtatcgaacggctcggcgaggggttgaccgtcgaggcccacgcgcccgacgggctcgtcgaggcgatcggcgtgcgcggcgcgcgcgcgttcgcgctcggcgtgcaatggcatccggaatggcggttcgacggcaatgcgctgtcgcgacaaatccttgcggcgttcggcgcggcgtgccgcgcccgaagacgcgcgacggccgggcgcgcgccgcgcgcgtga

SEQ ID NO: 1812 - protein, 263 aa, Burkholderia pseudomallei 668
MNDPLGNGPRPVVGICADRKTVGLHVAHVAGEKYVNAVVDGAHALAIVLPALGERQPADELLALVDGLLLTGSYSNVEPARYGGPTSAPGTLHDAARDATALPLVRAAIDAGVPVLAICRGMQELNVAYGGTLHQQVHALSGHADHREDLSAPVDVQYGPAHPVRLVPGGLLRRLAGAETVEVNSLHAQGIERLGEGLTVEAHAPDGLVEAIGVRGARAFALGVQWHPEWRFDGNALSRQILAAFGAACRARRRATAGRAPRA

SEQ ID NO: 1813 - DNA, 762 bp, Shewanella loihica PV-4
  CDS (1)..(762): transl_table=11
atgtccgatgaaggacttgctgttatcggtgtcacggcctgtaatcaacagataggcctgcacccattcaatatcgttggcgagaaatacctgctgggtattgccgatgccacccaaggctggcccttggtgatccccgcgcttggccattgcccggccgagacgatattgcccagactagatggcctgctgttcaccggttcgccctccaatatcgagccccaccactacgacggtgtggcgagtgacccagataccctacacgatcccaagcgcgacgcgaccaatctgccactgctcaaggcggcgattgacgccggcgtgcctgtgctggccatctgccggggatttcaggagatgaatgtggtgtatggcggcagtctgcatcagaaattgcatgaagttggcgattatattgaacacagagaagacaagacggctgacgtcgaggtgcaatatggcctgtctcatccgttgaagatagaaccggggggattgctccacgaggcttggggccgcaatttggcagaggtgaactctgtgcacactcaaggtgttgaccgtttgggtgttggattgcggccagaagcctatgcccccgatggattaatcgaggcgttttcggtcaaagatgcgaaaaattttgcgctgggggtgcagttccaccccgaatggaaggtgttagagaaccctttctaccgctcgatttttagcgcctttagtcaagcctgccaagccagagcagctcaacgcaagagatag

SEQ ID NO: 1814 - protein, 253 aa, Shewanella loihica PV-4
MSDEGLAVIGVTACNQQIGLHPFNIVGEKYLLGIADATQGWPLVIPALGHCPAETILPRLDGLLFTGSPSNIEPHHYDGVASDPDTLHDPKRDATNLPLLKAAIDAGVPVLAICRGFQEMNVVYGGSLHQKLHEVGDYIEHREDKTADVEVQYGLSHPLKIEPGGLLHEAWGRNLAEVNSVHTQGVDRLGVGLRPEAYAPDGLIEAFSVKDAKNFALGVQFHPEWKVLENPFYRSIFSAFSQACQARAAQRKR

SEQ ID NO: 1815 - DNA, 831 bp, Burkholderia vietnamiensis G4
  CDS (1)..(831): transl_table=11
atgcgcgcgcggccgatcgtagcggtcagcgccgaccgcgtgctgcgcggcgcgcaccagaaccacacggccggcgagaaatatctggtcgcggtggtcgacggcgccggtgcgctcgcgttcgtgttgccggcgctgggcgcgcggcagccggtcgacgcgatcgtcgcgtcgctcgacgggctgctgctgaccggcagtcattcgaacgtcgagccgcatcactacggcggcccggcaagcgccgctgacacgctgcacgacgccgcgcgcgacgcgaccgtgctgccgctcgtgcgcgcggcgatcgacgccggcgtgccagtgctcgcgatctgccgcggcatgcaggagctgaacgtcgcgtatggcggcacgctgcatcagcggctgcatgcgagcgtcgggttccacgatcatcgcgagcgcgacggcgatccgctcgagcggcagtacggccccgcgcaccgcgtccgattcgcgccgggcggcctgctgcaacgcatcgcgcgcggcgcgcatgacgcaatggtcaattcgctgcacgatcagggcatcgcgcggctcggtgcggggctcgcggtcgaggcgagcgcgccggacgggctgatcgaggccgtgagcgtgcgcggcgcgcgcgcgttcgcgctgggcgtgcagtggcatcccgaatggcggttcgcggaacagccgctgtcgcgcgacatcttcgcggcattcggcgcggcgtgccgcgcgcgcatgacgcatcgccttcatgcggccggcggcgcgatgccgtctcgggaggcgagcgatatcgacaccgatactgataacgacaccgactaa

SEQ ID NO: 1816 - protein, 276 aa, Burkholderia vietnamiensis G4
MRARPIVAVSADRVLRGAHQNHTAGEKYLVAVVDGAGALAFVLPALGARQPVDAIVASLDGLLLTGSHSNVEPHHYGGPASAADTLHDAARDATVLPLVRAAIDAGVPVLAICRGMQELNVAYGGTLHQRLHASVGFHDHRERDGDPLERQYGPAHRVRFAPGGLLQRIARGAHDAMVNSLHDQGIARLGAGLAVEASAPDGLIEAVSVRGARAFALGVQWHPEWRFAEQPLSRDIFAAFGAACRARMTHRLHAAGGAMPSREASDIDTDTDNDTD

SEQ ID NO: 1817 - DNA, 747 bp, Pseudomonas stutzeri A1501
  CDS (1)..(747): transl_table=11
atgtcgcgcaagcctctgatcggcgtatcggcctgtaccaagcagatcggccaccacagctttcatatcgccggcgacaagtacctgcgtgccgcggcgatcgccggcgtgccgctggtgatcccggcgctggacgagctgatcgatccggcaacgctgctggaaagcttcgacggcctgctgttcaccggctcgccgtccaatgtcgagccgcatcactatggcggcccggcgagcgagccgggcacccatcatgatccgtttcgcgaccgcctcaccctgccgctgattcgcgcggcggtggatgccggcattccggtgttcggcatctgccgaggattccaggagatgaacgtggcgtttggcggcagcctgcaccagaaggttcacgaagccgggctctatcaggaccaccgcgagcgcccggacgatccgctggaggtgcagtacggcctcagccatgcgctgcacgtgcagcctggtgggctgctcgagcgccttggcttgccggcgcagatccaggtcaattcggtgcatgggcagggtgtcgagcgtctcggcgctggtctgcgcatcgaggcgctggctcccgacgggctgatcgaggcattttccgtcgaggctgcgcagagcttcgcccttggcgtgcaatggcatccggaatggcaggtccaatcgcatccacattatctggcgctgttccgcggcttcgccgaggcctgccaggcacgcgcacgacaacgctga

SEQ ID NO: 1818 - protein, 248 aa, Pseudomonas stutzeri A1501
MSRKPLIGVSACTKQIGHHSFHIAGDKYLRAAAIAGVPLVIPALDELIDPATLLESFDGLLFTGSPSNVEPHHYGGPASEPGTHHDPFRDRLTLPLIRAAVDAGIPVFGICRGFQEMNVAFGGSLHQKVHEAGLYQDHRERPDDPLEVQYGLSHALHVQPGGLLERLGLPAQIQVNSVHGQGVERLGAGLRIEALAPDGLIEAFSVEAAQSFALGVQWHPEWQVQSHPHYLALFRGFAEACQARARQR

SEQ ID NO: 1819 - DNA, 774 bp, Unknown
  Unidentified
  CDS (1)..(774)
atgccacgtgtgcccgttatcggcattaccgcatgcaccagcatgattgagctgcatgcaacccagaccatcagcgagaagtacgcgcgcgcggcagccaaggcggcgtgtgggctgcctatcgtcattcccagcctaggtgagttgatggacagcgccgatattcttgacgtggtggatgggctgatcttcaccggttcgccgtccaacatcgagccgtaccactacaacggcccggccagtgccgcgggcacccatcacgaccctctgcgcgatgccaccacgttgccgctgatgcgcgccgccatcgccgccggtgtaccggtactcggcatttgccgtggcttccaggaaatgaacgtggcgctgggtggcaccctgcaccagaaggtccacgagaccggcatgttcatggaccaccgcgaaggcaaggatgagcccctcgacaagcaatatgggccgcgccacaccctgcatgtagagcctggcggcatgctcgaccgtatgggcttgccggcaatattcgacgtcaattccatccacggccaaggcatcgacgtattggcccccgggctgagggtggaagcgctggcgcccgatggcctggtggaagcgatttcggtcgagaacagcaagggttttgccctgggtgtgcaatggcaccccgagttccaggtcatggataacccccattacctggccatcttccagtcctttggcaaggcctgccggcaccgctcggtactgcgccagaggctgttgctgtctgcctga

SEQ ID NO: 1820 - protein, 257 aa, Unknown
  Unidentified
MPRVPVIGITACTSMIELHATQTISEKYARAAAKAACGLPIVIPSLGELMDSADILDVVDGLIFTGSPSNIEPYHYNGPASAAGTHHDPLRDATTLPLMRAAIAAGVPVLGICRGFQEMNVALGGTLHQKVHETGMFMDHREGKDEPLDKQYGPRHTLHVEPGGMLDRMGLPAIFDVNSIHGQGIDVLAPGLRVEALAPDGLVEAISVENSKGFALGVQWHPEFQVMDNPHYLAIFQSFGKACRHRSVLRQRLLLSA

SEQ ID NO: 1821 - DNA, 768 bp, Pseudomonas putida F1
  CDS (1)..(768): transl_table=11
atgagcgcaaatgcggtccctttgatcggtgtcagcgcctgccgtcagcaggtagggaagaactcctcgcacacggtcggcgacaagtatgtcgaggcagccggctttgccggcttgccactgatcttgccggcccgtgatggcggcagcgacacgcaagcgctgctggcccgcctgcacggcattgtttttaccggctcgccttcaaatatcgagccgcatcattacaatggcgcccccagtgtggcgggtacccggcatgatctggcgcgtgatcgcctgaccctgccgctgctgcaggcagccattgccgtcggtgtgcccgtattctgcatctgccgaggctaccaggagctgaacgtggcccttggcggcagcctgcaccagcgtgtgcaggagctgccaggctaccttgaccaccgcgaacccgaggatgcccccctggaggtgcaatacagccctcgtcactcggtcagtatcgagcctggcgggttgttcgagcgcctgggcctggcggcgcagttcgaggtcaattcgctgcacagccagggcatcgaccgtctggccccaggcctgcgcgtcgaggcacgggccccggatggcctgatcgaggcggtgtccatgcctgcggcaccgggctttgtgctcggggtgcagtggcacccggagtggcgcttcaacgaaaacccggtttcgctgcgtctgtttcaggcgtttcgcgaggcctgcaatgcctacgcagcacgggagggctcacggcaggaatga

SEQ ID NO: 1822 - protein, 255 aa, Pseudomonas putida F1
MSANAVPLIGVSACRQQVGKNSSHTVGDKYVEAAGFAGLPLILPARDGGSDTQALLARLHGIVFTGSPSNIEPHHYNGAPSVAGTRHDLARDRLTLPLLQAAIAVGVPVFCICRGYQELNVALGGSLHQRVQELPGYLDHREPEDAPLEVQYSPRHSVSIEPGGLFERLGLAAQFEVNSLHSQGIDRLAPGLRVEARAPDGLIEAVSMPAAPGFVLGVQWHPEWRFNENPVSLRLFQAFREACNAYAAREGSRQE

SEQ ID NO: 1823 - DNA, 753 bp, Klebsiella pneumoniae subsp. pneumoniae MGH 78578
  CDS (1)..(753): transl_table=11
atgtacaagccagttattggcgtcgtgatgtgtagaaacaggcttaagggtcaccagacccagaccttgcaagaaaagtacctgaatgcaattgttaacgccggcggactgccgattgccctgccgcatgcgctggcggagccggagctactgaacgtggtcgttgataaactggacgggatctacctgccaggcagccccagcaacgtgcagccgcacctttatggtgaaaacggcgatgagcctgacgccgaccccgggcgtgatcttctgagcatggcgctgattaacgccgcgctcgaaaggcgcatccccattttcgccatctgtcgtggactgcaggaactggttgtcgccaccggcgggactctgtatcgtcgtctgttcgagcagcctgagctccttgaacatcgcgaagatcctgaactgcccgtcgagcagcagtatgcgccgtcccatcaggttgaggttcaggaaggaggattgctgtcgcaattgataccgggctgcaacacgttttgggtaaactcgctacatgggcaaggggcaaaaaccctcagtccgcagctgcgcgtggaggcgcgagcgccggatggactggtggaagcggtcagcgtgaacgatcatcctttcgcgctgggcgtacagtggcatccagaatggaacagtagcgaatacgccctgtcgcgtatgttgtttgatggttttatcaccgcctgtcagggccatcatgctgaaaagcggcggcgctga

SEQ ID NO: 1824 - protein, 250 aa, Klebsiella pneumoniae subsp. pneumoniae MGH 78578
MYKPVIGVVMCRNRLKGHQTQTLQEKYLNAIVNAGGLPIALPHALAEPELLNVVVDKLDGIYLPGSPSNVQPHLYGENGDEPDADPGRDLLSMALINAALERRIPIFAICRGLQELVVATGGTLYRRLFEQPELLEHREDPELPVEQQYAPSHQVEVQEGGLLSQLIPGCNTFWVNSLHGQGAKTLSPQLRVEARAPDGLVEAVSVNDHPFALGVQWHPEWNSSEYALSRMLFDGFITACQGHHAEKRRR

SEQ ID NO: 1825 - DNA, 753 bp, Pseudomonas aeruginosa PA7
  CDS (1)..(753): transl_table=11
atgtctcgcctgccgttaatcggcgtcaccgcctgcaccaagcagatcggtcttcatccctaccacattgccggcgacaaatacctgcgtgccgtggtcaacggcgctggcggcctcccgctgatcattcctgcgctgggcgaactgctcgaccaggcaaccctgctggacagcatcgacggcttgctcttcaccggctcgccgtcgaacgtcgagccccgtcattatagtggggcggcgagcgagcccggcactcttcacgatcccgaccgcgacgccaccacgctgccgctggtccgcgccgccatcgacgccggcattccggtcctcggcatctgccgtggtttccaggaaatgaacgtggctttcggcggcagcctgcaccagaaggtgcacgaggccggaaccttcatggaccaccgcgagccggccgaccagccgctcgaggttcagtacgcgccgcgccatgccatgcatgtgcagccgggcggagtgctcgccggcatcggcttgccgagcgagttccaggtcaattccatccatggccagggcgttgatcgtctggcgccgggccttcgagtagaagcactggcgcctgacgggttggtcgaagccatctccgtagaaggtgcaaaagccttcgctcttggtgtgcaatggcacccggagtggcaggttctgacgaaccccaactatctcgctatcttccaggctttcggtaaggcctgcggcaagagggcggggcaacgttga

SEQ ID NO: 1826 - protein, 250 aa, Pseudomonas aeruginosa PA7
MSRLPLIGVTACTKQIGLHPYHIAGDKYLRAVVNGAGGLPLIIPALGELLDQATLLDSIDGLLFTGSPSNVEPRHYSGAASEPGTLHDPDRDATTLPLVRAAIDAGIPVLGICRGFQEMNVAFGGSLHQKVHEAGTFMDHREPADQPLEVQYAPRHAMHVQPGGVLAGIGLPSEFQVNSIHGQGVDRLAPGLRVEALAPDGLVEAISVEGAKAFALGVQWHPEWQVLTNPNYLAIFQAFGKACGKRAGQR

SEQ ID NO: 1827 - DNA, 762 bp, Shewanella baltica OS185
  CDS (1)..(762): transl_table=11
atgtcagccgatttgcccctcataggtgttattgcttgtaatcaacaactgggttcacatccctttaatattgttggtgaaaaataccttttaggtgtggttaatggcgcgaaaggctggccgttagtgatcccatcgttaggcggcgatttaccgatagacgcgattttagaacgtcttgacggtattttgtttactggctctccttctaatgtagaaccccatctttatgcaggccaaccgagcgagcttggtacacaccatgatcctaaacgtgatgcgacgactttgccgctgatccacgctgctattgctgctggggtacctgtattaggtatttgtcgcggttttcaagaaatgaatgtggcctttggtggcagtttgcaccagaagttatatgaggtgggtggctttattgaacatagagaagataaaaccgcatccttagatgtgcaatatggggcttctcacagtattactgttgagcccggggggcttatttacgaggcctggggccgtaactctgcagaggtcaactctgtgcatactcaaggcgtggagcgtctgggtgttgggttgcggccagaagcttatgctccagatgggttagtggaggctttctccgtaataggtactaaagaatttgccctcggtgtgcaatggcatccagagtggaaggtgagcgaaaatccgttttacctctcccttttcaatgccttcggtgatgcatgccgacgcagggctacaactcgagtgaaataa

SEQ ID NO: 1828 - protein, 253 aa, Shewanella baltica OS185
MSADLPLIGVIACNQQLGSHPFNIVGEKYLLGVVNGAKGWPLVIPSLGGDLPIDAILERLDGILFTGSPSNVEPHLYAGQPSELGTHHDPKRDATTLPLIHAAIAAGVPVLGICRGFQEMNVAFGGSLHQKLYEVGGFIEHREDKTASLDVQYGASHSITVEPGGLIYEAWGRNSAEVNSVHTQGVERLGVGLRPEAYAPDGLVEAFSVIGTKEFALGVQWHPEWKVSENPFYLSLFNAFGDACRRRATTRVK

SEQ ID NO: 1829 - DNA, 780 bp, Enterobacter sakazakii ATCC BAA-894
  CDS (1)..(780): transl_table=11
atgaccgtaaacacaccgcctctgattggcgtattgatgtgtcagagtaatcaggacgagcagttaatcttaacggtggaaaagctttatctggcaccgctttatcactccggtgctgtggccattcccctgccccaccatttggcggacgatccgctctatctggcggcagcgctgaaatcactgagcggaatttttctgccaggcagcccgtgcaacattgagccgcatcattacggcgaagaggcgcaggagaccagcaacgatccggggcgcgacaaactggcgctgatgctggtgcgtcacgcgctgaataccggcctgccgctgctcggctcgtgccggggcgtgcatgagatggtcgtcgccaccggcggcaagctctggcggcaactgcataatgtcgaagggctgcgcgagcatgaagtgaacccgaacggcagtccggaggcgaaattcgcgccggtacacgggcttgagataacgcccggcggctggctcgacagctgggtcgcgcccggcgaaaccgtgcgggtgaatacgctgcatcagcaagggatacgcgaggtggggcccggcgtgtttatcgaggcgcgcgccgacgacgggctgattgaggctatcagtattccggagcacccgttcgccttcggggtacagtggcacccggaatggggcgcgctgcacgacgagccgctctcaaaacagatttttgacgcctttgtggccgcctgccgcgtctggcaggctgaccatcaggcgctcactccattggcataa

SEQ ID NO: 1830 - protein, 259 aa, Enterobacter sakazakii ATCC BAA-894
MTVNTPPLIGVLMCQSNQDEQLILTVEKLYLAPLYHSGAVAIPLPHHLADDPLYLAAALKSLSGIFLPGSPCNIEPHHYGEEAQETSNDPGRDKLALMLVRHALNTGLPLLGSCRGVHEMVVATGGKLWRQLHNVEGLREHEVNPNGSPEAKFAPVHGLEITPGGWLDSWVAPGETVRVNTLHQQGIREVGPGVFIEARADDGLIEAISIPEHPFAFGVQWHPEWGALHDEPLSKQIFDAFVAACRVWQADHQALTPLA

SEQ ID NO: 1831 - DNA, 768 bp, Enterobacter sakazakii ATCC BAA-894
  CDS (1)..(768): transl_table=11
atgggcattatatttaacaggccgatgataggcgtcgtgatgtgcagaaacagtatcaaggggcacccaagccagacgttacaagagaagtacattaacgccgtgctgaacgctggcggcttgccggtgcccctgcctcatatcgtcgctgagtctgttcttctcgatcagctactcgctgaacttgacggcattatgctgccgggcagccccagcaacgttcagccgcacctgtatggtgaaaacggcgatgagcctgccgccgatcccgggcgggacactctgagcatcgcgctgattgagcgcgcgctggaaaggcgcatcccccttttcgccatctgtcgcgggcttcaggaactggttgtcgccaccggggggacgctgtatcgtcggctgtttgacgagccggaactgctggaacaccgcgaagatcctgaactgccgctggaccagcagtacgcgccctctcacgaggtgcaggtagtgccgggagggcttcttggcaaactgataccgggctgcaacacgttttgggtaaattcgctgcatggccagggcgcccgcacgctgggcgcgcggctgcgtgtggaagcgcgctcgccggatggccttgtggaagccgcaagcgttatcgatcacccgtttgcactgggggtgcagtggcacccggaatggaacagcagcgagtacgcactctcgcggctgttgtttgaaggttttattaccgcctgtcgggggtttcgggccgaaaagccccgacccgcctga

SEQ ID NO: 1832 - protein, 255 aa, Enterobacter sakazakii ATCC BAA-894
MGIIFNRPMIGVVMCRNSIKGHPSQTLQEKYINAVLNAGGLPVPLPHIVAESVLLDQLLAELDGIMLPGSPSNVQPHLYGENGDEPAADPGRDTLSIALIERALERRIPLFAICRGLQELVVATGGTLYRRLFDEPELLEHREDPELPLDQQYAPSHEVQVVPGGLLGKLIPGCNTFWVNSLHGQGARTLGARLRVEARSPDGLVEAASVIDHPFALGVQWHPEWNSSEYALSRLLFEGFITACRGFRAEKPRPA

SEQ ID NO: 1833 - DNA, 765 bp, Escherichia coli E24377A
  CDS (1)..(765): transl_table=11
atggaaaatataatgaacaatccggttatcggtgtcgtaatgtgcaggaacaggcttaagggtcatgcgacccagactctgcaagaaaagtacctgaatgccatcatccacgcaggcggcttgccaattgcgttaccacatgcgctggcggaaccgtcattacttgaacaacttttgccgaaactcgatggcatttatcttcctggtagtcccagcaatgtgcagccgcacctatatggtgaaaacggcgatgagcctgacgccgatcccgggcgtgatcttctgagcatggcgttaattaatgccgcactcgaaaggcgcatccccattttcgccatctgccggggtttacaggaactggtggtggcaaccggtggttcgttgcatcgcaagctgtgcgaacagcctgaattgctggaacatcgggaagatcccgaactgccggtggaacagcaatatgcaccgtcgcatgaagttcaggttgaagaggggggattactgtctgcgttgttacctgaatgtagcaacttttgggtaaactctctgcatggacaaggggcgaaggtcgttagcccacggttgcgtgttgaagctcgctcgccggatggcttagttgaggcggttagcgtcatcaatcatccttttgcgctgggcgtacagtggcacccggaatggaacagtagcgagtacgcgctttcgcgtatattgttcgagggctttatcaccgcttgtcagcaccatatcgctgaaaaacagcgactctga

SEQ ID NO: 1834 - protein, 254 aa, Escherichia coli E24377A
MENIMNNPVIGVVMCRNRLKGHATQTLQEKYLNAIIHAGGLPIALPHALAEPSLLEQLLPKLDGIYLPGSPSNVQPHLYGENGDEPDADPGRDLLSMALINAALERRIPIFAICRGLQELVVATGGSLHRKLCEQPELLEHREDPELPVEQQYAPSHEVQVEEGGLLSALLPECSNFWVNSLHGQGAKVVSPRLRVEARSPDGLVEAVSVINHPFALGVQWHPEWNSSEYALSRILFEGFITACQHHIAEKQRL

SEQ ID NO: 1835 - DNA, 762 bp, Shewanella sediminis HAW-EB3
  CDS (1)..(762): transl_table=11
atgtcggatgcagggcttgctgtcattggggtgacggcgtgcaaccaggagttaggcttacatccttttaatatagtgggcgagaagtaccttcttgctattgctgatgcgaccaagggttggcctttggttattcccgcgctgggtcactgcccgagtgagcttattttgcctcgcttggacggtattttgtttaccggttctccctcaaatatcgagccacatcactttcaaggtgaagcaagcgaagctgacactcatcatgatcccaagcgagacgcgacgactcttcctctgttaaaagcggcgatagaggcaggtatccctgtcttggcaatctgccgtgggtttcaagagatgaacgtcgtgtatggcggaagcctacatcaaaaattgcatcaagtgggcggctttatcgaacaccgcgaagataaaagtacggctgtcgaggtgcaatatgggatctcccatgaggtacagatagaacctggaggactgcttcacgacgcatggggccgtagctctgcagaggttaactctgtgcatactcaaggcgtagatcgcctcggagttgggttacggccagaagcatatgcaccagatggtttagtagaggctttctctattaaagaagcaaagaattttgcgctgggcgtgcagtggcatcctgaatggaaggtactgaataacgctttctatacctctatttttaatgctttcagtgatgcctgtgagcgccgagcaaagagacgagtgagataa

SEQ ID NO: 1836 - protein, 253 aa, Shewanella sediminis HAW-EB3
MSDAGLAVIGVTACNQELGLHPFNIVGEKYLLAIADATKGWPLVIPALGHCPSELILPRLDGILFTGSPSNIEPHHFQGEASEADTHHDPKRDATTLPLLKAAIEAGIPVLAICRGFQEMNVVYGGSLHQKLHQVGGFIEHREDKSTAVEVQYGISHEVQIEPGGLLHDAWGRSSAEVNSVHTQGVDRLGVGLRPEAYAPDGLVEAFSIKEAKNFALGVQWHPEWKVLNNAFYTSIFNAFSDACERRAKRRVR

SEQ ID NO: 1837 - DNA, 762 bp, Serratia proteamaculans 568
  CDS (1)..(762): transl_table=11
atgggcaatatatttaacagaccagtggtcggcgtagtgatgtgcaggtataggttaaacgggcacctcactcagaccttgcaagaaaagtacctaaatgccgtagtcgctgccggagggctgccaatcgccctgccacacgcgctggctgagccgaaactgctggaagaattgctggagcaccttgacggtattgtgctgccgggcagccccagtaatgtgcagccgcacctttatggtgaaaacggcgatgagcctgacgccgatcctgggcgagatgaattgagcctggcgctgatccgccactcgctcgacaggcgcattccccttttcgccatttgccgcggcatgcaagaaatggtggtcgccagccagggcaccctgcaccgccggctgtttgaattacccgaactgctcgagcaccgtgaagatcacgacctgccgctggaacaacaatacgcccccgcccacgaagtcatcgttcaggaaggcggcctgctctcgcaactgataccggattgcaacagattctgggtgaactcactgcatggccagggggcaaaaacccttggccccggcgtacgtattgaggcccacgccgccgatgggttggtggaggccatcagcctgcgcgaccagcctttcgcgctgggtgtgcaatggcacccggaatggaacagtgaggagtacgctctgtcacgcctgctgtttgaggggttcattagcgcctgccggaactatcaaaaggaaaaacgcccatga

SEQ ID NO: 1838 - protein, 253 aa, Serratia proteamaculans 568
MGNIFNRPVVGVVMCRYRLNGHLTQTLQEKYLNAVVAAGGLPIALPHALAEPKLLEELLEHLDGIVLPGSPSNVQPHLYGENGDEPDADPGRDELSLALIRHSLDRRIPLFAICRGMQEMVVASQGTLHRRLFELPELLEHREDHDLPLEQQYAPAHEVIVQEGGLLSQLIPDCNRFWVNSLHGQGAKTLGPGVRIEAHAADGLVEAISLRDQPFALGVQWHPEWNSEEYALSRLLFEGFISACRNYQKEKRP

SEQ ID NO: 1839 - DNA, 762 bp, Shewanella pealeana ATCC 700345
  CDS (1)..(762): transl_table=11
atgtcagaagttgggctcgcagttgttggcgtgacagcatgtaatatgcagttgggcttacacccctttaatatagtgggtgaaaagtatcttctagcaatcgcagatgcgacacaatcttggccattggttattccagctttagggcattgccctgccgaggttgtactttctcgtttggacggaattttattcaccggctccccctcaaatatcgaaccgcatcattttgacggccccgcaagtgatgagggaacacatcatgatcctaagcgcgatgcgacaaccttacctctgttaaaagcggcaattgatgctggcgtgccagtgcttgcgatctgccgtggctttcaagagatgaatgttgtgtttggtggcagtttgcatcaaaagttgcatgagctgggcgggtttattgagcatagagaagacaaaacgaaatccgtagaagtgcaatatggtatttcccacgaggttcaaatagaacctgggggactgcttcacgatgcatggggccgcagctctgcagaggtgaactctgtccatacccaaggcgtagaccgccttggggttgggttgcggccagaagcatatgcaaccgatggtctgatagaagccttttctgtcagaaacgcaaagaattttgcactaggtgtgcagtggcatccggagtggaaggcacttgatagtcctttttataccgcgatctttgaagcttttaataaagcatgccagcgccgtgcagcaagcagagtgaaataa

SEQ ID NO: 1840 - protein, 253 aa, Shewanella pealeana ATCC 700345
MSEVGLAVVGVTACNMQLGLHPFNIVGEKYLLAIADATQSWPLVIPALGHCPAEVVLSRLDGILFTGSPSNIEPHHFDGPASDEGTHHDPKRDATTLPLLKAAIDAGVPVLAICRGFQEMNVVFGGSLHQKLHELGGFIEHREDKTKSVEVQYGISHEVQIEPGGLLHDAWGRSSAEVNSVHTQGVDRLGVGLRPEAYATDGLIEAFSVRNAKNFALGVQWHPEWKALDSPFYTAIFEAFNKACQRRAASRVK

SEQ ID NO: 1841 - DNA, 807 bp, Burkholderia multivorans ATCC 17616
  CDS (1)..(807): transl_table=11
atgcgcgcacgcccgatcgtagccgtcaccgccgaccgcatcatgcgcggtccgcatccgaaccatacggccggcgagaagtacctcgacgcgctcgtcgacggcgccggcgcgctcgcgttcgtgctgcccgcgctcggtgcgcgccagccgctcgacgcgatcgtcgcggcgatcgacggactgctgttgaccggcagctattcgaacgtcgagccgcatcactacggcggcgcgccgagcgcgcgcgacaccttgcacgaccgcgcgcgcgatgcaaccgcgctcccgttgatccgcgcggcgatcgacgccggcgtgccggtgctcgcgatctgccgcggtatgcaggagctgaacgtcgcgtatggcggcacgctgcatcagcggctgcacgcgacggccggcttcgacgatcaccgcgaacggctcgacgatccgctcgaacggcagtacggccccgcgcacgtcgtgcagttcacgccgaacgggctgctgcagcggatcgcgcgcggcgcgaccgacgcgcgcgtgaattcgctgcacgaccagggcatcgcgcgcatcagcgcggggctcgtcgtcgaggcacgtgcgcccgacgggctcgtcgaggccgtcagcgtgcgcggcgcgcgtgcgttcgcgctcggcgtgcaatggcatccggagtggcgctacgcggagcagccgctgtcgcgcgacatcttcgcggcgttcggcgcggcatgccgcgcgcgaatggcgcatcgcattcatgcggtcggcggcgagttgccgtcgccgaacgcgtccgacgtcgactga

SEQ ID NO: 1842 - protein, 268 aa, Burkholderia multivorans ATCC 17616
MRARPIVAVTADRIMRGPHPNHTAGEKYLDALVDGAGALAFVLPALGARQPLDAIVAAIDGLLLTGSYSNVEPHHYGGAPSARDTLHDRARDATALPLIRAAIDAGVPVLAICRGMQELNVAYGGTLHQRLHATAGFDDHRERLDDPLERQYGPAHVVQFTPNGLLQRIARGATDARVNSLHDQGIARISAGLVVEARAPDGLVEAVSVRGARAFALGVQWHPEWRYAEQPLSRDIFAAFGAACRARMAHRIHAVGGELPSPNASDVD

SEQ ID NO: 1843 - DNA, 774 bp, Pseudomonas putida GB-1
  CDS (1)..(774): transl_table=11
atgccacgtgtgcccgttattggcattaccgcatgcaccagcatgattgagcagcatgccacccagaccatcgccgagaagtacgcacgcgcggccgccaaagcggcgtgtgggctgcccatcgtgatccccagcctcggtgacctgatggacagcgccgatattctcgacgtggtggatgggctgatcttcaccggttcgccgtccaacatcgagccgtttcactacaacggcccggccagtgcggtaggcacccatcatgaccctttgcgtgatgccaccacgttgccgctgatgcgtgcggccatcgccgccggtgtgcccgtacttggcatttgccgtggctttcaggaaatgaacgtggcgttgggcggcaccctgtaccagaaggtccacgaggctggggtgttcatggatcaccgcgaaggcaagggcgagcccatcgaaaagcagtatggcccgcgtcacaccatgcatgtggagcccggtggcctgctcgaccgcatgggcttgccggcgatcttcgacgtcaattccatccacggccagggcattgatgtactggccccggggctacgggtggaagcattggcaccagatggcctggtggaagcgatttcggtcgagaacagcaaggggtttgccctggccgtgcaatggcacccggagttccaggtcatggacaacccgcagtacctggccatcttccagtcattcggcaaggcctgccggcagcgctcggtgctgcgccagaggctgttgctgtccgcctga

SEQ ID NO: 1844 - protein, 257 aa, Pseudomonas putida GB-1
MPRVPVIGITACTSMIEQHATQTIAEKYARAAAKAACGLPIVIPSLGDLMDSADILDVVDGLIFTGSPSNIEPFHYNGPASAVGTHHDPLRDATTLPLMRAAIAAGVPVLGICRGFQEMNVALGGTLYQKVHEAGVFMDHREGKGEPIEKQYGPRHTMHVEPGGLLDRMGLPAIFDVNSIHGQGIDVLAPGLRVEALAPDGLVEAISVENSKGFALAVQWHPEFQVMDNPQYLAIFQSFGKACRQRSVLRQRLLLSA

SEQ ID NO: 1845 - DNA, 768 bp, Pseudomonas putida GB-1
  CDS (1)..(768): transl_table=11
atgagcgcaactgcggtccccttgatcggtgtcagcgcctgccgtcagcaggtggggaagaactcgtcgcacacggtgggcgacaagtatgtcgaggcggccggctttgccggcttaccgctgatcttgccggcccgtgatggcggcagcgacacgcatgcgctgctggctcgcctgcacggcattgtttttaccggctcgccttcaaatatcgaaccgcatcattacaatggcgcccccagtgtggcaggtacccggcatgacctggcgcgtgatcgcctgaccctgccgctgctgcaggcggccattgccgccggtgtgccggtgttctgcatttgccgtggctaccaggaactgaacgtggcccttggcggcagcctgcaccagcgcgtgcaggaactgcctggatacctggatcaccgcgaacctgaggatgcccccctggaggtgcagtacggccctcgtcacccggtcggcatcgagcctggcgggttgttcgagcgcttgggcctggcggcgcagttcgaggtcaactcgctgcacagtcagggcatcgaccgcctggccccaggcctgcgtgtcgaggcacgggccccggatggcctgatcgaagcagtgtccatgcccgacgcgccgggctttgtgcttggcgtgcagtggcacccggagtggcgcttcaacgaaaacccggtctcgctgcgcctgtttcaggcgtttcgcgaggcctgcattgcctatgcagcacgggagggtgcacggcaggaatga

SEQ ID NO: 1846 - protein, 255 aa, Pseudomonas putida GB-1
MSATAVPLIGVSACRQQVGKNSSHTVGDKYVEAAGFAGLPLILPARDGGSDTHALLARLHGIVFTGSPSNIEPHHYNGAPSVAGTRHDLARDRLTLPLLQAAIAAGVPVFCICRGYQELNVALGGSLHQRVQELPGYLDHREPEDAPLEVQYGPRHPVGIEPGGLFERLGLAAQFEVNSLHSQGIDRLAPGLRVEARAPDGLIEAVSMPDAPGFVLGVQWHPEWRFNENPVSLRLFQAFREACIAYAAREGARQE

SEQ ID NO: 1847 - DNA, 762 bp, Shewanella halifaxensis HAW-EB4
  CDS (1)..(762): transl_table=11
atgtcagaagtagggctcgcagttgttggcgtgacagcatgtaatatgcagttgggcttgcacccctttaatattgtgggggaaaagtatcttctcgcaatcgcagatgcgacacaatcttggccattggttattccagctttaggccattgtcctgccgaggtcgtactctctcgtttggacggaattttgttcaccggctccccctctaatatcgaaccccaccattttgacggccccgcaagtgatgcgggaacacatcatgaccccaagcgcgatgcgacaaccctacctttgttaaaagcggcaattgatgcaggcgtgccagtgcttgcgatctgtcgcggttttcaagaaatgaatgtcgtatttggtggcagtttgcatcaaaagttgcatgagctggacgggtttattgaacatcgagaagacaaaaccaagcctgtagaggtgcaatatggcatatcccatgaggttcaaatagaacctgggggactgcttcacgatgcatggggccgcagctctgcagaggtgaactctgtccatacccaaggcgtagaccgtcttggtgttgggttgcggccagaagcatatgcaaacgatggtttgatagaagctttttctgtcaaagacgcaaagaattttgcactaggtgtgcagtggcatccggaatggaaggcactcgatagtcctttttataccgcgatttttaatgcttttagtcaagcatgtcagcaccgtgcagcaagcagagtgaaataa

SEQ ID NO: 1848 - protein, 253 aa, Shewanella halifaxensis HAW-EB4
MSEVGLAVVGVTACNMQLGLHPFNIVGEKYLLAIADATQSWPLVIPALGHCPAEVVLSRLDGILFTGSPSNIEPHHFDGPASDAGTHHDPKRDATTLPLLKAAIDAGVPVLAICRGFQEMNVVFGGSLHQKLHELDGFIEHREDKTKPVEVQYGISHEVQIEPGGLLHDAWGRSSAEVNSVHTQGVDRLGVGLRPEAYANDGLIEAFSVKDAKNFALGVQWHPEWKALDSPFYTAIFNAFSQACQHRAASRVK

SEQ ID NO: 1849 - DNA, 753 bp, Escherichia coli SMS-3-5
  CDS (1)..(753): transl_table=11
atgaacaatccggttatcggtgtcgtaatgtgcaggaacaggcttaagggtcatgcgacccagactctgcaagaaaagtacctgaatgccatcatccacgcaggcggtttgccaatagcgctaccacatgcgctggcggaaccgtcgttacttgaacaacttttgccgaaactcgatggtatttatcttcctggtagtcccagcaatgtgcagccgcacctatatggtgaaaacggcgatgagcctgacgccgatcccgggcgtgatcttctgagcatggcgttaattaatgccgcactcgaaaggcgcatccccattttcgccatctgccggggtttacaggaactggtggtggcaaccggtggttcgttgcatcgcaagctgtgcgaacagcctgaattgctggaacatcgggaagatcccgaactgccggtggagcagcaatatgcaccgtcgcatgaagttcaggttgaagaggggggattgctgtctgcgttgttacctgaatgtagcaacttttgggtaaactctctgcatggacaaggggcgaaggtcgttagcccacggttgcgtgttgaagctcgctcgccggatggcttagttgaggcggttagcgtcatcaatcatccttttgcgctgggcgtacagtggcacccggagtggaacagtagcgagtacgcgctttcgcgtatattgttcgagggctttatcaccgcttgtcagcaccatatcgctgaaaaacagcgactctga

SEQ ID NO: 1850 - protein, 250 aa, Escherichia coli SMS-3-5
MNNPVIGVVMCRNRLKGHATQTLQEKYLNAIIHAGGLPIALPHALAEPSLLEQLLPKLDGIYLPGSPSNVQPHLYGENGDEPDADPGRDLLSMALINAALERRIPIFAICRGLQELVVATGGSLHRKLCEQPELLEHREDPELPVEQQYAPSHEVQVEEGGLLSALLPECSNFWVNSLHGQGAKVVSPRLRVEARSPDGLVEAVSVINHPFALGVQWHPEWNSSEYALSRILFEGFITACQHHIAEKQRL

SEQ ID NO: 1851 - DNA, 750 bp, Unknown
  Unidentified
  CDS (1)..(750)
atgagcgcatttgcggtccccttgatcggtgtcagcgcctgccgtcagcaggtagggaagaactcgtcgcacacggtgggcgacaagtatgtcgaggcggccggctttgccgggctcccgctgatcctgccggcccgcgacggaggcagcgacacgcaggcgttgctggcacggctcgatggcattctttttaccggttcgccttcaaatgtcgagccgcatcattacaatggcgcccccagcgcggaaggtacccggcacgatcttgcacgagaccgcctgaccttgccgctgttgcaggcggccattgccgccggcgtgccggtgttctgtatctgtcgtggtttccaggaattgaacgtggccctcggcggcagcttgcaccagcgcgtgcacgagctgccgggctacctggaccaccgtgaacctgaggacgcacccctggaggtgcaatacggccctcgtcatcctgtcggcattacgcctggcggggtattcgagcgcctgggcctggccgcgcagttcgaggtcaactcgctgcacagtcagggcatcgaccgcctggccccgggcctgcgcgtcgaggcacaggccccggatggcctgatcgaagcggtgtcgatgcctgacgcgcctggctttgtgcttggcgtgcagtggcacccggaatggcgttttgccgaaaacccggtctccaggcgcctgttccaggcgttccgcgaggcctgcattgcccatgctgcacggtag

SEQ ID NO: 1852 - protein, 249 aa, Unknown
  Unidentified
MSAFAVPLIGVSACRQQVGKNSSHTVGDKYVEAAGFAGLPLILPARDGGSDTQALLARLDGILFTGSPSNVEPHHYNGAPSAEGTRHDLARDRLTLPLLQAAIAAGVPVFCICRGFQELNVALGGSLHQRVHELPGYLDHREPEDAPLEVQYGPRHPVGITPGGVFERLGLAAQFEVNSLHSQGIDRLAPGLRVEAQAPDGLIEAVSMPDAPGFVLGVQWHPEWRFAENPVSRRLFQAFREACIAHAAR

SEQ ID NO: 1853 - DNA, 762 bp, Shewanella woodyi ATCC 51908
  CDS (1)..(762): transl_table=11
atgtcggatgcagggcttgctgtcattggggtgacagcgtgcaatcagaagttaggcttacatccttttaatatcgtgggcgaaaaatatctgttatccattgcagatgcgactaacgcgtggccattggtgatcccttctcttgggcattgccctgcggagtcaattctacctaggttagatggcattttatttaccggttcaccatcaaatattgagccgcatcactttcaagggcaacccagtgaagcggatacccaccacgatcctaagcgagacgcgaccacacttcctttattaaaagcagctatcgatgcaggggttcctgtgctggcaatctgccgtggttttcaggagatgaatgtggtttatggcggcacacttcatcagaaactccatgaagtgggcggttatattgaacatagagaagataaaactaagccagtagatgtgcagtatgggatctcccatgaggtacagatagaacctggagggttgcttcacgaggcatggggccgtagctctgcagaggttaactctgtgcatacccaaggcgttgaccgtctgggtgtcgggttgcggccggaggcgtttgcctcagatggattagtcgaagctttctctgtgagagaggctaaaaatttcgcactgggcgtccagtggcatccggaatggaaggtgcttgaacatcctttttacaccgccattttcaaactgtttagtgatgcttgccagcgccatgcaatgaaccgagtgagataa

SEQ ID NO: 1854 - protein, 253 aa, Shewanella woodyi ATCC 51908
MSDAGLAVIGVTACNQKLGLHPFNIVGEKYLLSIADATNAWPLVIPSLGHCPAESILPRLDGILFTGSPSNIEPHHFQGQPSEADTHHDPKRDATTLPLLKAAIDAGVPVLAICRGFQEMNVVYGGTLHQKLHEVGGYIEHREDKTKPVDVQYGISHEVQIEPGGLLHEAWGRSSAEVNSVHTQGVDRLGVGLRPEAFASDGLVEAFSVREAKNFALGVQWHPEWKVLEHPFYTAIFKLFSDACQRHAMNRVR

SEQ ID NO: 1855 - DNA, 840 bp, Burkholderia cenocepacia MC0-3
  CDS (1)..(840): transl_table=11
atgcgcgcacgaccgatcgtagccgtcaccgccgaccgcatcctgcgcggcgcccatccgaaccacacggcgggtgagaagtacctcgccgccgtcgtcgacggcgccggcgcgctggcgttcgtgctgcccgcgctcggcgcgcggcagccggccgacgcgatcgtcgcggcaatcgacgggctgctgttgaccggcagctattcgaacgtcgagccgcatcattacggcggcgctgccagcgcgcccgacacgctgcacgatccggcgcgcgacgagaccgcgttgccgctgatccgcgcggcgatcgacgcgggcgtgccggtgctcgcgatctgccgcggcatgcaggagctgaacgtcgcgtacggcggcacgctgcatcagcggctgcatgcgacgaccggtttcgacgaccatcgcgaacggccggccgatccgctcgaacggcagtacggtcccgcgcacgtcgtgcagctcgcgccaggcggcctgctgcagcgggtcgcgcgcggcgcgcacgaggcgacggtcaattccctgcacgaccagggcatcgcgcggctgggcgccgggctcgcggtcgaagcgagcgcgcccgacgggctcgtcgaggccgtcagcgtgcgcggcgcgcgtgcattcgcgctgggcgtgcagtggcatcccgaatggcgctacgcggagcagccgctgtcgcgcgacatcttcgcggcattcggcgcggcgtgccgcgcgcgcatgacgcaccgcatgcatgctgctggcggcgcgacgccgtcgccggccgcatccgacatcgacatcgaccaacgaggccgatcatgcaacccgaactga

SEQ ID NO: 1856 - protein, 279 aa, Burkholderia cenocepacia MC0-3
MRARPIVAVTADRILRGAHPNHTAGEKYLAAVVDGAGALAFVLPALGARQPADAIVAAIDGLLLTGSYSNVEPHHYGGAASAPDTLHDPARDETALPLIRAAIDAGVPVLAICRGMQELNVAYGGTLHQRLHATTGFDDHRERPADPLERQYGPAHVVQLAPGGLLQRVARGAHEATVNSLHDQGIARLGAGLAVEASAPDGLVEAVSVRGARAFALGVQWHPEWRYAEQPLSRDIFAAFGAACRARMTHRMHAAGGATPSPAASDIDIDQRGRSCNPN

SEQ ID NO: 1857 - DNA, 786 bp, Burkholderia cenocepacia MC0-3
  CDS (1)..(786): transl_table=11
atggaaaggaaacctctcgtcggcatcaccgccgacctcacccagatcggcgcgcacgcgtcgcatacggtcggcgacaagtacgtcgccgcgatcgtcgacggcgcgcaggcgctcgcgatggtgctgccggccctcggcgagcgccagtcgagcgccgacgtgctcgacgcggtcgacgggctgctgtttaccggcagctactcgaacgtcgagccgcatctctatggcggcgaaccgagcgcaccgggcacgaagcacgacccggcgcgcgacgcgacgacgctgccgctgctgcgcgcggccatcgtcgccggcgtgcccgtgctcgccgtgtgccgtggcttccaggagttgaacgtcgtctgcggcggcacgctgcaccagcgcgtgcatgaagtgcccggcttcgccgatcaccgcgaggacgacgacgcgccgatggacacgcaatacggccccgcgcacgtcgtgcgcctgacgcccggcggcaagctgcatgcgctggccggcggccgcgacgaagtgcacgtgaactcgctgcacaagcagggcatcgcgcagctcggctccggcctcgccgtcgaggcggtcgcgccggatgggttgatcgaggccgtgagcgtcgtcgacgcaccggctttcgcgctggccgtgcagtggcatccggaatggcggcatgcgcaggacccgctgtcgagcgcgatcttccgcgccttcggcgatgcctgccgcgcccgccgcgccgcccgcacgcgcgccatggccgccgccgcgctcgcctga

SEQ ID NO: 1858 - protein, 261 aa, Burkholderia cenocepacia MC0-3
MERKPLVGITADLTQIGAHASHTVGDKYVAAIVDGAQALAMVLPALGERQSSADVLDAVDGLLFTGSYSNVEPHLYGGEPSAPGTKHDPARDATTLPLLRAAIVAGVPVLAVCRGFQELNVVCGGTLHQRVHEVPGFADHREDDDAPMDTQYGPAHVVRLTPGGKLHALAGGRDEVHVNSLHKQGIAQLGSGLAVEAVAPDGLIEAVSVVDAPAFALAVQWHPEWRHAQDPLSSAIFRAFGDACRARRAARTRAMAAAALA

SEQ ID NO: 1859 - DNA, 771 bp, Leptothrix cholodnii SP-6
  CDS (1)..(771): transl_table=11
atgagtcgcttgcccgtcgtgctggtaccggcctgcaaccggatgctcggccagcatcccttccatgtggccggccagaaatacgtcgatgccgtccggctggcgggcgccctgcccctggtggtgccctcggcccaccacgacgaaatcgatgccctgctcgacctggccgacggcgtgctgctgtcgggctcgccctccaacgtgcatccgagccgtttcggcgaggacgtgcacgacccgtcgctgccgctcgacccggtgcgcgacgactggaccctgccgctgatcccgctcgcgctggcacgcggccttccgcttttcgcaatctgccgcggcttccaggaggtcaacgtcgccctcggcggcagcctgcaccaggccgtgcagacgctgcccggccacctcgatcaccgcgcgctggccgtgctgccggtggccacgcaatacggcccggcgcaccgggtggcgatccggcccggcggtctgttcgagcgcctgttcgatggcgaaggcatcgacggattcgaagtcaacagcctgcacggtcagggcgtcaaccgactggccgacggcctgcgcatcgaggcactcgcgcccgacggtctggtcgaagcgttttcggtcaccgacacgcccggcttcggcctgggcgtgcagtggcaccccgagtggcaggccgcgcacaacccggtctcgatgacgctgctgcgcgccttcggcgccgcctgccaggagtaccgcgacacccaccggccaccgagccgctga

SEQ ID NO: 1860 - protein, 256 aa, Leptothrix cholodnii SP-6
MSRLPVVLVPACNRMLGQHPFHVAGQKYVDAVRLAGALPLVVPSAHHDEIDALLDLADGVLLSGSPSNVHPSRFGEDVHDPSLPLDPVRDDWTLPLIPLALARGLPLFAICRGFQEVNVALGGSLHQAVQTLPGHLDHRALAVLPVATQYGPAHRVAIRPGGLFERLFDGEGIDGFEVNSLHGQGVNRLADGLRIEALAPDGLVEAFSVTDTPGFGLGVQWHPEWQAAHNPVSMTLLRAFGAACQEYRDTHRPPSR

SEQ ID NO: 1861 - DNA, 807 bp, Burkholderia ambifaria MC40-6
  CDS (1)..(807): transl_table=11
atgcgcgcgcgcccgatcgtagccgtcaccgccgaccgcatcctgcgcggcgcccatccgaaccacacggccggcgagaagtatctcgtcgcgctggtcgacggcgccggcgcgctggcgttcgtgctgcccgcgctgggtgcgcggcagccggtcgacgcgatcgtggcgtccgtcgacgggctgctgctgaccggcagctattcgaacgtcgagccgcatcactacggcggcccggcgagtacgcccgacacgctgcacgatcccgcgcgcgatgcgaccgcgctgccgctgatccgcgcggcgatcgatgccggcgtgccggtgctcgcgatctgccgcgggatgcaggagctgaacgtcgcgtacggcggcacgctgcatcagcggctgcatgcgagccccggctttcacgaccatcgcgagcgcgacggcgatccgctcgagcgacagtacggccccgcacaccgcatacagcttgcgccgggcggcctgctgcaacggatcgctcgcggcgcgcacgacgcgatggtcaattcgctgcacgaccagggcatcgagcggctcggcgcggggctcgcggccgaagcgagcgcgcccgacgggctgatcgaggccgtcagcgtgcgcggcgcgcgcgcgttcgcgcttggcgtgcagtggcatcccgaatggcgtttcgcggaacagccgctgtcgcgcgacatcttcgcggcattcggtgcggcgtgccgcgcgcgcatgacccatcgcattcgtgcggccggcggcaccatgccgtcgccggccgcatccgacatcgactga

SEQ ID NO: 1862 - protein, 268 aa, Burkholderia ambifaria MC40-6
MRARPIVAVTADRILRGAHPNHTAGEKYLVALVDGAGALAFVLPALGARQPVDAIVASVDGLLLTGSYSNVEPHHYGGPASTPDTLHDPARDATALPLIRAAIDAGVPVLAICRGMQELNVAYGGTLHQRLHASPGFHDHRERDGDPLERQYGPAHRIQLAPGGLLQRIARGAHDAMVNSLHDQGIERLGAGLAAEASAPDGLIEAVSVRGARAFALGVQWHPEWRFAEQPLSRDIFAAFGAACRARMTHRIRAAGGTMPSPAASDID

SEQ ID NO: 1863 - DNA, 795 bp, Burkholderia pseudomallei 1655
  CDS (1)..(795): transl_table=11
atgatgaatgaacccctcggcaacggaccgcggcccgtcgtcggcatctgcgcggatcgcaagacggtcggcttgcatgtcgcgcacgtcgcgggcgagaaatacgtgaacgccgtcatcgacggcgcgcacgcgctcgcgatcgtgctgcccgcgctcggcgagcggcagcccgcggacgagttgctcgcgctcgtcgacggcctgctgctgacgggcagctattcgaacgtcgagcccgcgcgctacggcggcccgacgagcgcgccgggcacgctgcacgacgcggcgcgcgacgcgaccgcgctgccgctcgtgcgcgcggcgatcgacaccggcgtgcccgtgctcgcgatctgccgcggaatgcaggagctgaacgtcgcgtacggcggcacgctgcatcagcaggtgcacgcattgagcggacatgccgaccatcgcgaggacctgtcggcgccggtcgacgtgcagtacgggcccgcgcatccggtgcggctcgtgcccggcggcctgctgcgccggctcgcgggcgcggagaccgtcgaggtcaattctctgcatgcgcagggtatcgaacggctcggcgaggggttgaccgtcgaggcccacgcgccagacgggctcgtcgaggcgatcggcgtgcgcggcgcgcgcgcgttcgcgctcggcgtgcaatggcatccggaatggcggttcgacggcaatgcgctgtcgcgacaaatccttgcggcgttcggcgcggcgtgccgcgcacgaagacgcgggacggccgggcgcgcgccgcgcgcgtga

SEQ ID NO: 1864 - protein, 264 aa, Burkholderia pseudomallei 1655
MMNEPLGNGPRPVVGICADRKTVGLHVAHVAGEKYVNAVIDGAHALAIVLPALGERQPADELLALVDGLLLTGSYSNVEPARYGGPTSAPGTLHDAARDATALPLVRAAIDTGVPVLAICRGMQELNVAYGGTLHQQVHALSGHADHREDLSAPVDVQYGPAHPVRLVPGGLLRRLAGAETVEVNSLHAQGIERLGEGLTVEAHAPDGLVEAIGVRGARAFALGVQWHPEWRFDGNALSRQILAAFGAACRARRRGTAGRAPRA

SEQ ID NO: 1865 - DNA, 1032 bp, Burkholderia pseudomallei 406e
  CDS (1)..(1032): transl_table=11
atgacgcgcgcgcggcggcggtgcgcgcatcgcatcgcgcgaagctcggcccgtgcgtcgccgcacgccgtcgcgcgccgccgtcgaatcggcgccatggcgccgctgcgcgtcgaatgcgcgcttgcgcgcaggcacgccgcacgtgcgtgcgagccgattccttctttcgcgacgaacgccgcgccttgcgcgcgccgcgtgcgcgttcgtcgcgcctaccgaacggagggacgcgtgatgaatgaacccctcggcaacgggccgcggcccgtcgtcggcatctgcgcggatcgcaagacggtcggcttgcatgtcgcgcacgtcgcgggcgagaaatacgtgaacgccgtcgtcgacggcgcgcacgcgctcgcgatcgtgctgcccgcgctcggcgagcggcagcccgcggacgagttgctcgcgctcgtcgacggcctgctgctgacgggcagctattcgaacgtcgagcccgcgcgctacggcggcccgacgagcgcgccgggcacgctgcacgacgcggcgcgcgacgcgaccgcgctgccgctcgtgcgcgcggcgatcgacgccggcgtgcccgtgctcgcgatctgccgcggaatgcaggagctgaacgtcgcgtacggcggcacgctgcatcagcaggtgcacgcattgagcggacatgccgaccatcgcgaggacctgtcggcgccggtcgacgtgcagtacgggcccgcgcatccggtgcggctcgtgcccggcggcctgctgcgccggctcgcgggcgcggagaccgtcgaggtcaattctctgcatgcgcagggtatcgaacggctcggcgatgggttgaccgtcgaggcccacgcgccagacgggctcgtcgaggcgatcggcgtgcgcggcgcgcgcgcgttcgcgctcggcgtgcaatggcatccggaatggcggttcgacggcaatgcgctgtcgcgacaaatccttgcggcgttcggcgcggcgtgccgcgcgcgaagacgcgcgacggccgggcgcgcgccgcgcgcgtga

SEQ ID NO: 1866 - protein, 343 aa, Burkholderia pseudomallei 406e
MTRARRRCAHRIARSSARASPHAVARRRRIGAMAPLRVECALARRHAARACEPIPSFATNAAPCARRVRVRRAYRTEGRVMNEPLGNGPRPVVGICADRKTVGLHVAHVAGEKYVNAVVDGAHALAIVLPALGERQPADELLALVDGLLLTGSYSNVEPARYGGPTSAPGTLHDAARDATALPLVRAAIDAGVPVLAICRGMQELNVAYGGTLHQQVHALSGHADHREDLSAPVDVQYGPAHPVRLVPGGLLRRLAGAETVEVNSLHAQGIERLGDGLTVEAHAPDGLVEAIGVRGARAFALGVQWHPEWRFDGNALSRQILAAFGAACRARRRATAGRAPRA

SEQ ID NO: 1867 - DNA, 786 bp, Burkholderia cenocepacia J2315
  CDS (1)..(786): transl_table=11
atggaaaggaaacctctcgtcggcatcaccgccgacctcacccagatcggcgcccacgcgtcgcatacggtcggcgacaaatacgtcgccgcgatcgtcgacggcgcgcaggcgctcgcgatggtgctgcccgccctcggcgagcgccagtcgaccgccgacgtgctcgacgcggtcgacgggctgctgtttaccggcagctactcgaacgtcgagccgcatctgtatggcggcgaaccgagcgcaccgggcacgaagcacgacccggcgcgcgacgcgacgacgctgccgctgctgcgcgcggccatcgtcgcgggcgtgcccgtgctcgccgtgtgccgcggcttccaggagctgaacgtcgtgtgcggcggcacgctgcatcagcgcgtgcacgacgtgcccggcttcgccgatcaccgcgaggacgacgacgcgccgatggatacgcaatacggccccgcgcacgtcgtgcgcctgacgcccggcggccagctgcatgcgctcgccggcggccgcgacgaagtgcaggtgaactcgctgcacaagcagggcgtcgcgcagctcggctccggcctcgcggtcgaggccgtcgcgccggatggcctgatcgaggccgtgagcgtcgtcgacgcaccggcgttcgcgctcgccgtgcagtggcatccggaatggcgacatgcgcaggacccgctgtcgagcgcgatcttccgcgcgttcggcgacgcgtgccgcgcgcgccgcgccgcccgcacgcgcgccacggccgccgccgcgctcgcctga

SEQ ID NO: 1868 - protein, 261 aa, Burkholderia cenocepacia J2315
MERKPLVGITADLTQIGAHASHTVGDKYVAAIVDGAQALAMVLPALGERQSTADVLDAVDGLLFTGSYSNVEPHLYGGEPSAPGTKHDPARDATTLPLLRAAIVAGVPVLAVCRGFQELNVVCGGTLHQRVHDVPGFADHREDDDAPMDTQYGPAHVVRLTPGGQLHALAGGRDEVQVNSLHKQGVAQLGSGLAVEAVAPDGLIEAVSVVDAPAFALAVQWHPEWRHAQDPLSSAIFRAFGDACRARRAARTRATAAAALA

SEQ ID NO: 1869 - DNA, 837 bp, Burkholderia cenocepacia J2315
  CDS (1)..(837): transl_table=11
atgtcgcgcgccattaccggagagacgccgatgcgcgcacgaccgatcgtagccgtcaccgccgaccgcatcctgcgcggcgcccatccaaaccacacggcgggcgagaagtacctcgccgccgtcgtcgacggcgccggcgcgctggcgttcgtgctgcccgcgctcggcgcgcggcagccggccgacgcgatcgtcgcggcaatcgacgggctgctgttgaccggcagctattcgaacgtcgaaccgcatcattacggcggcgccgcgagcgcgcccgacacgctgcacgatccggcgcgcgatgcgaccgcgttgccgctgatccgcgcggcgatcgacgcgggcgtgccggtgctcgcgatctgccgcggcatgcaggagctgaacgtcgcgtacggcggcacgctgcatcagcggctgcacgcgacgaccggcttcgacgatcatcgcgaacgcccggccgatccgctcgagcggcagtacggtcccgcgcacgtggtgcaactcgcgcccggcggtctgctgcagcgggtcgcgcgcggtgcgcacgaggcgacggtcaactcgctgcacgaccagggcatcgcgcgtctgggcgcggggctcgccgtcgaagcgagcgcacccgacgggctgatcgaggccgtcagcgtgcgcggcgcgcgtgcgttcgcgctgggcgtgcagtggcatcccgaatggcgctacgcagagcagccgctgtcgcgcgacatcttcgcggcattcggcgcggcgtgccgcgcgcacatgacacatcgcattcatgcgaccggcggcgcgatgccgtcgccggccgcatccgacatcgactga

SEQ ID NO: 1870 - protein, 278 aa, Burkholderia cenocepacia J2315
MSRAITGETPMRARPIVAVTADRILRGAHPNHTAGEKYLAAVVDGAGALAFVLPALGARQPADAIVAAIDGLLLTGSYSNVEPHHYGGAASAPDTLHDPARDATALPLIRAAIDAGVPVLAICRGMQELNVAYGGTLHQRLHATTGFDDHRERPADPLERQYGPAHVVQLAPGGLLQRVARGAHEATVNSLHDQGIARLGAGLAVEASAPDGLIEAVSVRGARAFALGVQWHPEWRYAEQPLSRDIFAAFGAACRAHMTHRIHATGGAMPSPAASDID

SEQ ID NO: 1871 - DNA, 765 bp, Klebsiella pneumoniae 342
  CDS (1)..(765): transl_table=11
atggaaaatataatgtacaagccagttattggcgtcgtgatgtgtagaaacaggcttaagggtcaccagacccagactctgcaagaaaagtacctgaatgccattgttaaccacggcggactgccgatcgccctgccgcatgcgctggcggagccggagctgctgaacgcgttagtcgataaactggacgggatttacctgccaggcagccccagtaatgtgcagccgcacctttatggtgaaaacggcgatgagcctgacgccgaccccgggcgtgatcttctgagcatggcgctgattaacgccgcgctcgaaaggcgcatccccattttcgccatctgtcgtggactgcaggaactggttgtcgccaccggcgggactctgtatcgtcgtctgttcgagcagcctgagctccttgaacatcgtgaagatcctgaactgcccgtcgagcagcagtatgcgccgtcccatcaggttgaggttcaggaaggaggattgctgtcgcaattgataccgggctgcaacacgttttgggtaaactcgctacatgggcaaggggcaaaaaccctgagtccgcagctgcgcgtggaggcgcgagcgccggatggactggtggaagcggtcagcgtgaacgatcatcctttcgcgttgggcgtacagtggcatcctgaatggaacagtagcgaatacgccctgtcgcgtatgttgtttgatggttttatcaccgcctgtcagggccatcatgctgaaaagcggcggcgctga

SEQ ID NO: 1872 - protein, 254 aa, Klebsiella pneumoniae 342
MENIMYKPVIGVVMCRNRLKGHQTQTLQEKYLNAIVNHGGLPIALPHALAEPELLNALVDKLDGIYLPGSPSNVQPHLYGENGDEPDADPGRDLLSMALINAALERRIPIFAICRGLQELVVATGGTLYRRLFEQPELLEHREDPELPVEQQYAPSHQVEVQEGGLLSQLIPGCNTFWVNSLHGQGAKTLSPQLRVEARAPDGLVEAVSVNDHPFALGVQWHPEWNSSEYALSRMLFDGFITACQGHHAEKRRR

SEQ ID NO: 1873 - DNA, 753 bp, Escherichia coli O157:H7 str. EC4115
  CDS (1)..(753): transl_table=11
atgaacaatccggttatcggtgtcgtaatgtgcaggaacaggcttaaggggcatgcgacccagactctgcaagaaaagtacctgaatgccatcatccacgcaggcggcttgccaattgcgctgccacatgcgctggcggaaccgtcgttacttgaacaacttttgccgaaactcgatggcatttaccttcctggtagtcccagcaatgtgcagccgcacctatatggtgaaaacggcgatgagcctgacgccgatcccgagcgtgatcttctgagcatggcgttaattaatgccgcactcgaaaggcgcatccccattttcgccatctgccggggtttacaggaactggtggtggcaaccggtggttcgttgcatcgcaagctgtgcgaacagcctgaattgctggaacatcgggaagatcccgaactgccggtggaacagcaatatgcaccgtcgcatgaagttcaggttgaagaggggggattgctgtctgcattgttacctgaatgtagcaacttttgggtaaactctctgcatggacaaggggcgaaggtcgttagcccacggttgcgtgttgaagctcgctcgccggatggcttagttgaggcggttagtgtcatcaatcatccttttgcgctgggcgtacagtggcacccggaatggaacagtagcgagtacgcgctttcgcgtatattgttcgagggctttatcaccgcttgtcagcaccatatcgctgaaaaacagcgactctga

SEQ ID NO: 1874 - protein, 250 aa, Escherichia coli O157:H7 str. EC4115
MNNPVIGVVMCRNRLKGHATQTLQEKYLNAIIHAGGLPIALPHALAEPSLLEQLLPKLDGIYLPGSPSNVQPHLYGENGDEPDADPERDLLSMALINAALERRIPIFAICRGLQELVVATGGSLHRKLCEQPELLEHREDPELPVEQQYAPSHEVQVEEGGLLSALLPECSNFWVNSLHGQGAKVVSPRLRVEARSPDGLVEAVSVINHPFALGVQWHPEWNSSEYALSRILFEGFITACQHHIAEKQRL

SEQ ID NO: 1875 - DNA, 807 bp, Rhodospirillum centenum SW
  CDS (1)..(807): transl_table=11
atgagcctgccgatccccccgagcccctcccgaccggccccgtcccgaccggccaccatccggcccccggtcggcatccccgcctgcgcccgcaccctggggcagcatccgttccatgtcgtcggggacaagtatgtccgcgccgtcagcgaaggggcgggggcgctgccgctggtgctgccggcgctgggggactggtacgacgtggacgccctgctggaccggctggacggcctgttcttcaccggcagcccgtccaacgtgcatcccgccgcctacggccgtgcgccgggcacggaagcgcccccgcatgacgaggcgcgcgacgccaccaccctgccgctgatccgccgcgccctggagcggggcgtgcccctgctggcggtctgccgcggcttccaggaactgaacgtggccctgggcggcaccctgcatgcgcgggtgcaggaggtgccgggcatgatggaccaccgcgaggacaaggacgcgccggtggaggtgcagtacggccccgcccataccgtggcgctggcgccggaggggcggctcgcggctatcaccggccggcgggagctgcgggtgaactccgtgcattcccagggcatcgaccggctggcgccgggcctggtggtggagggaacggcccccgacgggctgatcgaggcggtgcgggtggagggggcgcccttcgcgctggcggtgcagtggcacccggaatggcgcttccgcgacgacccggcctccaccgccctgctggccgccttcggcgcggccgtccgcgaccacgccgccgcacgggggcggtga

SEQ ID NO: 1876 - protein, 268 aa, Rhodospirillum centenum SW
MSLPIPPSPSRPAPSRPATIRPPVGIPACARTLGQHPFHVVGDKYVRAVSEGAGALPLVLPALGDWYDVDALLDRLDGLFFTGSPSNVHPAAYGRAPGTEAPPHDEARDATTLPLIRRALERGVPLLAVCRGFQELNVALGGTLHARVQEVPGMMDHREDKDAPVEVQYGPAHTVALAPEGRLAAITGRRELRVNSVHSQGIDRLAPGLVVEGTAPDGLIEAVRVEGAPFALAVQWHPEWRFRDDPASTALLAAFGAAVRDHAAARGR

SEQ ID NO: 1877 - DNA, 762 bp, Shewanella piezotolerans WP3
  CDS (1)..(762): transl_table=11
atgtcggaagtagggctcgcggtagtaggtgtgacggcatgcaatcaacagttaggattgcatccatttaacattgttggcgaaaagtacttattagctatagcagatgccactcaagcttggcctctggttatcccttcgctgggacattgcccagcagaagtcgtgttatcaagactcgacggaattttgtttaccggctccccctcgaatattgagccgcaccattttgatggaccagcaagtgaagcgggaacgcatcacgaccctaagcgagatgccacaactttaccattgattcatgccgctattaaggcgggtgtacctgtgcttggaatttgtcgtggctttcaagagatgaacgtcgcttttggtggcagcttacaccaaagattgcatgaagtcggtggttttatcgagcaccgtgaagacaaaacggcaccagttgaagaacagtatggtttatctcatgaggtcaagatagaacctgggggattgcttcacgatgcgtggggccgcagctccgcagaggtgaactctgtgcacactcaaggcgtagaccgtttgggtgttgggttgcggccagaagcatatgcaaatgatggattaattgaagcgttttcagttaaagacgcaaagaattttgcattaggtgttcaatggcatccagagtggaaagtgttagataacgctttttatactgcagtttttaaggcctttaatgaggcttgccagcaccgtgcagcgagcagagtaaaataa

SEQ ID NO: 1878 - protein, 253 aa, Shewanella piezotolerans WP3
MSEVGLAVVGVTACNQQLGLHPFNIVGEKYLLAIADATQAWPLVIPSLGHCPAEVVLSRLDGILFTGSPSNIEPHHFDGPASEAGTHHDPKRDATTLPLIHAAIKAGVPVLGICRGFQEMNVAFGGSLHQRLHEVGGFIEHREDKTAPVEEQYGLSHEVKIEPGGLLHDAWGRSSAEVNSVHTQGVDRLGVGLRPEAYANDGLIEAFSVKDAKNFALGVQWHPEWKVLDNAFYTAVFKAFNEACQHRAASRVK

SEQ ID NO: 1879 - DNA, 765 bp, Escherichia coli IAI1
  CDS (1)..(765): transl_table=11
atggaaaatataatgaacaatccggttatcggtgtcgtaatgtgcaggaacaggcttaagggtcatgcgacccagactctgcaagaaaagtacctgaatgccatcatccacgcaggcggcttgccaattgcgctaccacatgcgctggcggaaccgtcgttacttgaacaacttttgccgaaactcgatggcatttatcttcctggtagtcccagcaatgtgcagccgcacctatatggtgaaaacggcgatgagcctgacgccgatcccgggcgtgatcttctgagcatggcgataattaatgccgcactcgaaaggcgcattcccattttcgccatctgccggggtttacaagaactagtggtggcaaccggtggttcgttgcatcgcaagctgtgcgaacagcctgaattgctggaacatcgggaagatcccgaactgccggtggaacagcaatatgcaccgtcgcatgaagttcaggttgtagaggggggattactgtctgcgttgttacctgaatgtagcaacttttgggtaaactctctacatggacaaggggcgaaggtcgttagcccacggttgcgtgttgaagctcgctcgccggatggcttagttgaggcggttagcgtcatcaatcatccttttgcgctgggcgtacagtggcacccggaatggaacagtagcgagtacgcgctttcgcgtatattgttcgagggctttatcaccgcttgtcagcaccatatcgctgaaaaacagcgactctga

SEQ ID NO: 1880 - protein, 254 aa, Escherichia coli IAI1
MENIMNNPVIGVVMCRNRLKGHATQTLQEKYLNAIIHAGGLPIALPHALAEPSLLEQLLPKLDGIYLPGSPSNVQPHLYGENGDEPDADPGRDLLSMAIINAALERRIPIFAICRGLQELVVATGGSLHRKLCEQPELLEHREDPELPVEQQYAPSHEVQVVEGGLLSALLPECSNFWVNSLHGQGAKVVSPRLRVEARSPDGLVEAVSVINHPFALGVQWHPEWNSSEYALSRILFEGFITACQHHIAEKQRL

SEQ ID NO: 1881 - DNA, 792 bp, Burkholderia mallei ATCC 23344
  CDS (1)..(792): transl_table=11
atgaatgaacccctcggcaacggaccgcggcccgtcgtcggcatctgcgcggatcgcaagacggtcggcttgcatgtcgcgcacgtcgcgggcgagaaatacgtgaacgccgtcatcgacggcgcgcacgcgctcgcgatcgtgctgcccgcgctcggcgagcggcagcccgcggacgagttgctcgcgctcgtcgacggcctgctgctgacgggcagctattcgaacgtcgagcccgcgcgctacggcggcccgacgagcgcgccgggcacgctgcacgacgcggcgcgcgacgcgaccgcgctgccgctcgtgcgcgcggcgatcgacgccggcgtgcccgtgctcgcgatctgccgcggaatgcaggagctgaacgtcgcgtacggcggcacgctgcatcagcaggtgcacgcgttgagcggacatgccgaccatcgcgaggacctgtcggcgccggtcgacgtgcagtacgggcccgcgcatccggtgcggctcgcgcccggcggcctgctgcgccggctcgcgggcgcggagaccgtcgaggtcaattctctgcatgcgcagggtatcgaacggctcggcgaggggttgaccgtcgaggcccacgcgcccgacgggctcgtcgaggcgatcggcgtgcgcggcgcgcgcgcgttcgcgctcggcgtgcaatggcatccggaatggcggttcgacggcaatgcgctgtcgcgacaaatccttgcggcgttcggcgcggcgtgccgcgcacgaagacgcgcgacggccgggcgcgcgccgcgcgcgtga

SEQ ID NO: 1882 - protein, 263 aa, Burkholderia mallei ATCC 23344
MNEPLGNGPRPVVGICADRKTVGLHVAHVAGEKYVNAVIDGAHALAIVLPALGERQPADELLALVDGLLLTGSYSNVEPARYGGPTSAPGTLHDAARDATALPLVRAAIDAGVPVLAICRGMQELNVAYGGTLHQQVHALSGHADHREDLSAPVDVQYGPAHPVRLAPGGLLRRLAGAETVEVNSLHAQGIERLGEGLTVEAHAPDGLVEAIGVRGARAFALGVQWHPEWRFDGNALSRQILAAFGAACRARRRATAGRAPRA

SEQ ID NO: 1883 - DNA, 792 bp, Burkholderia pseudomallei K96243
  CDS (1)..(792): transl_table=11
atgaatgaacccctcggcaacgggccgcggcccgtcgtcggcatctgcgcggatcgcaagacggtcggcttgcatgtcgcgcacgtcgcgggcgagaaatacgtgaacgccgtcgtcgacggcgcgcacgcgctcgcgatcgtgctgcccgcgctcggcgagcggcagcccgcggacgagttgctcgcgctcgtcgacggcctgctgctgacgggcagctattcgaacgtcgagcccgcgcgctacggcggcccgacgagcgcgccgggcacgctgcacgacgcggcgcgcgacgcgaccgcgctgccgctcgtgcgcgcggcgatcgacgccggcgtgcccgtgctcgcgatctgccgcggaatgcaggagctgaacgtcgcgtacggcggcacgctgcatcagcaggtgcacgcattgagcggacatgccgaccatcgcgaggacctgtcggcgccggtcgacgtgcagtacgggcccgcgcatccggtgcggctcgtgcccggcggcctgctgcgccggctcgcgggcgcggagaccgtcgaggtcaattctctgcatgcgcagggtatcgaacggctcggcgatgggttgaccgtcgaggcccacgcgccagacgggctcgtcgaggcgatcggcgtgcgcggcgcgcgcgcgttcgcgctcggcgtgcaatggcatccggaatggcggttcgacggcaatgcgctgtcgcgacaaatccttgcggcgttcggcgcggcgtgccgcgcacgaagacgcgcgacggccgggcgcgcgccgcgcgcgtga

SEQ ID NO: 1884 - protein, 263 aa, Burkholderia pseudomallei K96243
MNEPLGNGPRPVVGICADRKTVGLHVAHVAGEKYVNAVVDGAHALAIVLPALGERQPADELLALVDGLLLTGSYSNVEPARYGGPTSAPGTLHDAARDATALPLVRAAIDAGVPVLAICRGMQELNVAYGGTLHQQVHALSGHADHREDLSAPVDVQYGPAHPVRLVPGGLLRRLAGAETVEVNSLHAQGIERLGDGLTVEAHAPDGLVEAIGVRGARAFALGVQWHPEWRFDGNALSRQILAAFGAACRARRRATAGRAPRA

SEQ ID NO: 1885 - DNA, 750 bp, Pseudomonas syringae pv. syringae B728a
  CDS (1)..(750): transl_table=11
atgtcgcgacctcccttgatcggtgtcaccgcctgccgtcagcagttgggcaagtattcttctcacaccgcaggcgacaagtacgtcgaggctgcagccttcgccggcatgccggtgattctgcctgcactcgaggtgcccaccgagcctgcgcaactgctcgcgtcgctggatggcctgctgtttaccggctcgccgtccaacgtcgagccgcgtcactacaatggaccggcgagcgtggagggcaccgctcatgatgtattccgggaccgcaccacactgccgctgctcagggctgccatcgctcagggcgtgccggtgttgtgcatttgccgcggttttcaggagctgaatgtcgctttgggcggcagcctgcatcagcgggttcaggagttgcccggctatctggatcatcgtgagccgcaaagcgaggtgctggcggtgcagtacacgccaaagcatgccgtgcaggtgcagcctggcggtttgctcgactcgctcgggctgggcccgggcttcgaggtcaacagcctgcacagtcagggtgtcgatcgtctggcgtcggacctgcgcgcagaagcattggcccccgacggtctggtcgaagcggtgtccatgcccggcgcgccaggctttgtgctgggtgtgcagtggcatccggaatgggagttcatggacaaccccgtgtcgctcagcctgttcaaggccttccgcgaggcctgccagagctatgcgcgcaaccgccgctag

SEQ ID NO: 1886 - protein, 249 aa, Pseudomonas syringae pv. syringae B728a
MSRPPLIGVTACRQQLGKYSSHTAGDKYVEAAAFAGMPVILPALEVPTEPAQLLASLDGLLFTGSPSNVEPRHYNGPASVEGTAHDVFRDRTTLPLLRAAIAQGVPVLCICRGFQELNVALGGSLHQRVQELPGYLDHREPQSEVLAVQYTPKHAVQVQPGGLLDSLGLGPGFEVNSLHSQGVDRLASDLRAEALAPDGLVEAVSMPGAPGFVLGVQWHPEWEFMDNPVSLSLFKAFREACQSYARNRR

SEQ ID NO: 1887 - DNA, 756 bp, Pseudomonas syringae pv. phaseolicola 1448A
  CDS (1)..(756): transl_table=11
atgtcacgacctcccttgataggcgttactgcctgccgtcagcagttgggcaagtactcctctcacaccgcaggcgataaatatgtcgaggcggctgcgtttgcgggtgtcccggtcattctgcccgcgctcgacgtgcccaccgagcctgcgcagttgctggcctcactggacggtttgctgtttaccggctcgccgtccaatgtcgagccgcatcattacaacggcccggcaagcgtggaaggcactgcccacgacgtgtttcgggatcgcacaacattaccgctgctcagggccgccatcgcccagggtgtgccggtgttatgcatctgccgtggttttcaggaactgaatgttgcactgggcggcagcctgcatcagagggtgcaggaattgcctggctatctggatcaccgtgagccgcaaagcgatgtgctggctgtgcaatatgcgacgcaacacccggtgcaggtgcgatctggcggggtgctggaggcgctcgggctgaccccggggttcgaggtcaatagcctgcacagtcagggtatcgatcgtctggcatcggatctgcgggcggaagcactggcacccgacggtctggtggaagcggtttccctgcccggtgcgccaggctttgtgctgggcgtgcagtggcacccggagtgggagttcatgaacaaccctgtgtcgctgaacctgttcacggcattccgtgaagcctgcctggcgtatgcccggaaccgtcagggcaggtag

SEQ ID NO: 1888 - protein, 251 aa, Pseudomonas syringae pv. phaseolicola 1448A
MSRPPLIGVTACRQQLGKYSSHTAGDKYVEAAAFAGVPVILPALDVPTEPAQLLASLDGLLFTGSPSNVEPHHYNGPASVEGTAHDVFRDRTTLPLLRAAIAQGVPVLCICRGFQELNVALGGSLHQRVQELPGYLDHREPQSDVLAVQYATQHPVQVRSGGVLEALGLTPGFEVNSLHSQGIDRLASDLRAEALAPDGLVEAVSLPGAPGFVLGVQWHPEWEFMNNPVSLNLFTAFREACLAYARNRQGR

SEQ ID NO: 1889 - DNA, 1050 bp, Burkholderia pseudomallei 1710b
  CDS (1)..(1050): transl_table=11
atgcgccgtcgcgctgtcgtgacgcgcgcgcggcggcggtgcgcgcatcgcatcgcgcgaagctcggcccgtgcgtcgccgcacgccgtcgcgcgcggccgtcgaatcggcgccatggcgccgctgcgcgtcgaatgcgcgcttgcgcgcaggcacgccgcacgtgcgtgcgagccgattccttctttcgcgacgaacgccgcgccttgcgcgcgccgcgtgcgcgttcgtcgcgcctaccgaacggagggacgcgtgatgaatgaacccctcggcaacgggccgcggcccgtcgtcggcatctgcgcggatcgcaagacggtcggcttgcatgtcgcgcacgtcgcgggcgagaaatacgtgaacgccgtcgtcgacggcgcgcacgcgctcgcgatcgtgctgcccgcgctcggcgagcggcagcccgcggacgagttgctcgcgctcgtcgacggcctgctgctgacgggcagctattcgaacgtcgagcccgcgcgctacggcggcccgacgagcgcgccgggcacgctgcacgacgcggcgcgcgacgcgaccgcgctgccgctcgtgcgcgcggcgatcgacgccggcgtgcccgtgctcgcgatctgccgcggaatgcaggagctgaacgtcgcgtacggcggcacgctgcatcagcaggtgcacgcattgagcggacatgccgaccatcgcgaggacctgtcggcgccggtcgacgtgcagtacgggcccgcgcatccggtgcggctcgtgcccggcggcctgctgcgccggctcgcgggcgcggagaccgtcgaggtcaattctctgcatgcgcagggtatcgaacggctcggcgatgggttgaccgtcgaggcccacgcgccagacgggctcgtcgaggcgatcggcgtgcgcggcgcgcgcgcgttcgcgctcggcgtgcaatggcatccggaatggcggttcgacggcaatgcgctgtcgcgacaaatccttgcggcgttcggcgcggcgtgccgcgcacgaagacgcgcgacggccgggcgcgcgccgcgcgcgtga

SEQ ID NO: 1890 - protein, 349 aa, Burkholderia pseudomallei 1710b
MRRRAVVTRARRRCAHRIARSSARASPHAVARGRRIGAMAPLRVECALARRHAARACEPIPSFATNAAPCARRVRVRRAYRTEGRVMNEPLGNGPRPVVGICADRKTVGLHVAHVAGEKYVNAVVDGAHALAIVLPALGERQPADELLALVDGLLLTGSYSNVEPARYGGPTSAPGTLHDAARDATALPLVRAAIDAGVPVLAICRGMQELNVAYGGTLHQQVHALSGHADHREDLSAPVDVQYGPAHPVRLVPGGLLRRLAGAETVEVNSLHAQGIERLGDGLTVEAHAPDGLVEAIGVRGARAFALGVQWHPEWRFDGNALSRQILAAFGAACRARRRATAGRAPRA

SEQ ID NO: 1891 - DNA, 792 bp, Burkholderia thailandensis E264
  CDS (1)..(792): transl_table=11
atgaatgaacacctcgacgccgggccgcggcccgtcgtcggcgtctgcgcggatcgaaagacggtcggcctgcatgtcgcgcacgtcgcgggcgagaaatacgtgaatgccgtcgtcgacggcgcaagcgcgctcgcaatcgtgctgcctgcgctcggcgagcggcagcgcgcggacgagctgcttgcgctcgtcgatggcctgctgctgacgggcagccattcgaacgtcgagcccgcgcgctacggcggcccggcgagcgcgcccggcacgctgcacgacgcggcgcgcgacgcgacgacgctgccgctcgtgcgcgcggcgatcgacgccggcgtgcccgtgctcgcgatctgccgcgggatgcaggagctgaacgtcgcgtatggcggcacgctgcatcaggcggtgcacgccctgagcggccatgccgatcatcgcgaggacctgctggcatcggtcgacgtgcagtacggccccgcgcatccggtccggctcgtgccgggcggcctgctgcatcggctcgcgggcgccgaggccgtcgacgttaattctctgcacgcgcagggcatcgagcggctcggcgacgggctgaccgtggaggcgcgcgcgcccgacgggctcgtcgaggcgatcggcgtgcgcgacgcacgcgcgttcgcgctcggcgtgcaatggcatccggaatggcgtttcgacagcaatccgctgtcgcgagaaatctttgcggcgttcggcgcggcgtgccgcgcccgaagacgccggacggccgggcgcgcgccgcgcgcgtga

SEQ ID NO: 1892 - protein, 263 aa, Burkholderia thailandensis E264
MNEHLDAGPRPVVGVCADRKTVGLHVAHVAGEKYVNAVVDGASALAIVLPALGERQRADELLALVDGLLLTGSHSNVEPARYGGPASAPGTLHDAARDATTLPLVRAAIDAGVPVLAICRGMQELNVAYGGTLHQAVHALSGHADHREDLLASVDVQYGPAHPVRLVPGGLLHRLAGAEAVDVNSLHAQGIERLGDGLTVEARAPDGLVEAIGVRDARAFALGVQWHPEWRFDSNPLSREIFAAFGAACRARRRRTAGRAPRA

SEQ ID NO: 1893 - DNA, 765 bp, Shewanella denitrificans OS217
  CDS (1)..(765): transl_table=11
atgacaagctccaagcttcctctgatcggtgtcgttgcctgcaatagtcagctcggattgcaccctttttctattgttggcgagaaatatttactcagtgtggtcgagggctcgggaggctggcctttggttattccctccttgggcggcgctcagcctatcgccgccatactcgacagcctagacggcatactctttaccggttcaccttccaatgttgaacctcaccattatcaagggcctgccagcagcgaaggaacccatcatgatcctaatcgcgacgccagtaccttgccgttgatcaaagcggccgtcgcggcgggagtgcctatattaggcgtctgccgaggctttcaagaaatgaatgtcgcctacggtggcagcttgtaccaaaaactccatgagataggtgaatttattgagcacagggaagataaaacagcccctttagatgtgcaatatggcttagctcatgaaatcaagattgaaacagacagcctgttgtttaaggcctgggggcaagcaaaggcccaagtcaattcagttcatacccaaggcgtcgaacgtcttggtgtcgggcttcggatagaagcccgcgcgccagatggtttaatcgaagccttctcagtgattgacgccaagtcttttgccttaggcgtccaatggcatcccgaatggaaagttaccgaaaatccgttttactcatcgattttcaagtcctttggtgatgcgtgcagaaatcgtgctacaacccgagcgagataa

SEQ ID NO: 1894 - protein, 254 aa, Shewanella denitrificans OS217
MTSSKLPLIGVVACNSQLGLHPFSIVGEKYLLSVVEGSGGWPLVIPSLGGAQPIAAILDSLDGILFTGSPSNVEPHHYQGPASSEGTHHDPNRDASTLPLIKAAVAAGVPILGVCRGFQEMNVAYGGSLYQKLHEIGEFIEHREDKTAPLDVQYGLAHEIKIETDSLLFKAWGQAKAQVNSVHTQGVERLGVGLRIEARAPDGLIEAFSVIDAKSFALGVQWHPEWKVTENPFYSSIFKSFGDACRNRATTRAR

SEQ ID NO: 1895 - DNA, 774 bp, Pseudomonas entomophila L48
  CDS (1)..(774): transl_table=11
atgagcgcaattgcggtccccttgatcggtgtcagcgcctgccgccagcaggtggggaagaactcgtcgcacacggtgggcgacaagtatgtcgaggccgcgggctttgccgggctgccgctgatcctgccggcgcgtgatcgcggcagcgatacgcaggcgctgctggcacgcctggatggcattctttttaccggttcgccttcaaatgtcgagccgcatcattacaatggcgcgcccagcgcggaaggcacccggcacgaccttgcccgtgaccgtctgaccttgccgctgctgcaggcggcgattgccgccggcgtgccggtgttctgcgtctgtcgtggtttccaggaactgaacgtggcccttggcggcagcctgcaccagcgcgtgcaggaattgcctggctaccgggaccaccgcgaacctgaggatgcacccctggaggtgcaatacggccctcgccaccccgtcggtatcgaacccggtgggatgttcgagcgcctgggcctggctgcgcggttcgaggtcaactcgctgcacagccagggcatcgaccgcctggccccgggcctgcgcgtcgaggcacgggccccggatggcctgatcgaagcggtgtcgatgcctgatgcgccgggctttgtactcggcgtgcagtggcaccctgaatggcgtttcgccgaaaacccggtttcgctgcgcctgttcgaggcgttccgcgaggcctgtattgcccatgctgcacgggaaggtgtgcgtccgaaaacagtgtga

SEQ ID NO: 1896 - protein, 257 aa, Pseudomonas entomophila L48
MSAIAVPLIGVSACRQQVGKNSSHTVGDKYVEAAGFAGLPLILPARDRGSDTQALLARLDGILFTGSPSNVEPHHYNGAPSAEGTRHDLARDRLTLPLLQAAIAAGVPVFCVCRGFQELNVALGGSLHQRVQELPGYRDHREPEDAPLEVQYGPRHPVGIEPGGMFERLGLAARFEVNSLHSQGIDRLAPGLRVEARAPDGLIEAVSMPDAPGFVLGVQWHPEWRFAENPVSLRLFEAFREACIAHAAREGVRPKTV

SEQ ID NO: 1897 - DNA, 786 bp, Burkholderia cenocepacia AU 1054
  CDS (1)..(786): transl_table=11
atggaaaggaaacctctcgtcggcatcaccgccgacctcacccagatcggcgcgcacgcgtcgcatacggtcggcgacaagtgcgtcgccgcgatcgtcgacggcgcgcatgcgctcgcgatggtgctgccggccctcggcgagcgccagtcgagcgccgacgtgctcgacgcggtcgacgggctgctgtttaccggcagctactcgaacgtcgagccgcatctctatggcggcgaaccgagcgcaccgggcacgaagcacgacccggcgcgcgacgcgacgacgctgccgctgctgcgcgcggccatcgtcgccggcgtgcccgtgcttgccgtgtgccgcggcttccaggagttgaacgtcgtctgcggcggcacgctgcaccagcgcgtgcatgaagtgcccggcttcgccgatcaccgcgaggacgacgacgcgccgatggacacgcaatacggccccgcgcacgtcgtgcgcctgacgcccggcggcaagctgcatgcactcgccggcggccgcgacgaagtgcacgtgaactcgctgcacaagcagggcatcgcgcagctcggctcgggcctcgccgtcgaggcggtcgcgccggatgggctgatcgaggccgtgagcgtcgtcgacgcgccggctttcgcgctggccgtgcagtggcatccggaatggcggcatgcgcaggacccgctgtcgagcgcgatcttccgcgcattcggcgatgcctgccgcgcccgccgcgccgcccgcacgcgcgccatggccgccgccgcgctcgcctga

SEQ ID NO: 1898 - protein, 261 aa, Burkholderia cenocepacia AU 1054
MERKPLVGITADLTQIGAHASHTVGDKCVAAIVDGAHALAMVLPALGERQSSADVLDAVDGLLFTGSYSNVEPHLYGGEPSAPGTKHDPARDATTLPLLRAAIVAGVPVLAVCRGFQELNVVCGGTLHQRVHEVPGFADHREDDDAPMDTQYGPAHVVRLTPGGKLHALAGGRDEVHVNSLHKQGIAQLGSGLAVEAVAPDGLIEAVSVVDAPAFALAVQWHPEWRHAQDPLSSAIFRAFGDACRARRAARTRAMAAAALA

SEQ ID NO: 1899 - DNA, 840 bp, Unknown
  Unidentified
  CDS (1)..(840)
atgcgtgcgcgaccgatcgtagccgtcaccgccgaccgcatcctgcgcggcgcccatccgaaccacacggcgggtgagaagtacctcgccgccgtcgtcgacggcgccggcgcgctggcgttcgtgctgcccgcgctcggcgcgcggcaaccggccgacgcgatcgtcgcggcaatcgacgggctgctgttgaccggcagctattcgaacgtcgagccgcatcattacggcggcgccgccagcgcgcccgacacgctgcacgatccggcgcgcgacgcgaccgcgttgccgctgatccgcgcggcgatcgacgcgggcgtgccggtgctcgcgatctgccgcggcatgcaggaactgaacgtcgcgtacggcggcacgctgcatcagcggctgcatgcgatgaccggtttcgacgaccatcgcgaacggccggccgatccgctcgaacggcagtatggtcccgcgcacgtcgtgcagctcgcgcccggcggcctgctgcagcgggtcgcgcgcggcgcgcacgaggcgacggtcaattccctgcacgatcagggcatcgcgcggctgggcgccgggctcgcggtcgaagcgagcgcgcccgacgggctggtcgaggccgtcagcgtgcgcggcgcgcgtgcattcgcgctgggcgtgcagtggcatcccgaatggcgctacgcggagcagccgctgtcgcgcgacatcttcgcggcattcggcgcggcgtgccgcgcgcgcatgacgcaccgcatgcatgctgccggcggtgcgataccgtcgccggccgcatccgacatcgacatcgaccaacgaggccgatcatgcaacccgaactga

SEQ ID NO: 1900 - protein, 279 aa, Unknown
  Unidentified
MRARPIVAVTADRILRGAHPNHTAGEKYLAAVVDGAGALAFVLPALGARQPADAIVAAIDGLLLTGSYSNVEPHHYGGAASAPDTLHDPARDATALPLIRAAIDAGVPVLAICRGMQELNVAYGGTLHQRLHAMTGFDDHRERPADPLERQYGPAHVVQLAPGGLLQRVARGAHEATVNSLHDQGIARLGAGLAVEASAPDGLVEAVSVRGARAFALGVQWHPEWRYAEQPLSRDIFAAFGAACRARMTHRMHAAGGAIPSPAASDIDIDQRGRSCNPN

SEQ ID NO: 1901 - DNA, 762 bp, Shewanella sp. MR-4
  CDS (1)..(762): transl_table=11
atgtctgtcgagttgccccttattggtgttattgcgtgtaatcaacaattgggatcacatccctttaatattgttggtgaaaaatacctcttaggtgtagtgaatggtgctaagggctggcccttagtgatcccctcattaggtgctgaacaacctattgaggcgattctggcaagtctcgatggcattctctttactggttcgccttcgaatgttgaaccccatctctatgcgggtgaaccgagtgaagtcggtactcaccacgatcccaaacgcgatgctaccaccttaccgctgatccgtgcggccattgcggcgggtgtgcctgtgcttgggatttgtcgtggctttcaagagatgaacgtcgcttttggtggcagtctgcatcagaagttgcacgaagtgggcggttttattgaacacagagaagataaagaggcctcgttagaggtgcaatatgggccatcccacagtattactgtggagcctgggggggtcatttacgaggcctggggccgtaactcggcagaggtaaactctgtacatacccagggcgtggagcgtcttgggattgggttgcggccagaagcttatgctccagatggtctagtggaggccttctccgttatagacgcaaatgaatttgccctcggtgtgcaatggcatcctgaatggaaggtgagcgaaaacccatttttcctctctatattcaatgcctttggtgatgcatgccgtcgtagggctacaactcgagtgaaataa

SEQ ID NO: 1902 - protein, 253 aa, Shewanella sp. MR-4
MSVELPLIGVIACNQQLGSHPFNIVGEKYLLGVVNGAKGWPLVIPSLGAEQPIEAILASLDGILFTGSPSNVEPHLYAGEPSEVGTHHDPKRDATTLPLIRAAIAAGVPVLGICRGFQEMNVAFGGSLHQKLHEVGGFIEHREDKEASLEVQYGPSHSITVEPGGVIYEAWGRNSAEVNSVHTQGVERLGIGLRPEAYAPDGLVEAFSVIDANEFALGVQWHPEWKVSENPFFLSIFNAFGDACRRRATTRVK

SEQ ID NO: 1903 - DNA, 762 bp, Shewanella sp. MR-7
  CDS (1)..(762): transl_table=11
atgtctgtcgagttgccccttattggtgttattgcgtgtaatcaacaattgggatcgcatccctttaatattgttggtgaaaaatacctcttaggtgtagtgaatggtgctaagggctggcccttaataatcccctctttaggtgctgaacaacctatagaggcgattctggcaagtctcgatggcattctctttactggttcgccttcgaatgttgaaccccatctctatgcgggtgaaccgagtgaagtcggtactcaccacgatcccaaacgcgatgccaccaccttaccgctgatccgtgcggccattgcggcgggtgtgcctgtgctggggatttgtcgtggctttcaagagatgaacgtcgcttttggtggcagtctgcatcagaagttgcacgaagtgggcggttttattgaacacagagaagataaagaggcctcgttagaggtgcaatatgggccatcccacagtatcactgtggagcctgggggggtcatttacgaggcctggggccgtaactcggcagaggtaaactctgtacatactcaggccgtggagcgtcttgggattgggttgcggccagaagcttatgctccagatggtctagtggaggccttctccgttatagacgcaaatgaatttgccctcggtgtgcaatggcatcctgaatggaaggtgagtgaaaacccatttttcctctctatattcaatgcttttggtgatgcatgccgtcgtagggctacaactcgagtgaaataa

SEQ ID NO: 1904 - protein, 253 aa, Shewanella sp. MR-7
MSVELPLIGVIACNQQLGSHPFNIVGEKYLLGVVNGAKGWPLIIPSLGAEQPIEAILASLDGILFTGSPSNVEPHLYAGEPSEVGTHHDPKRDATTLPLIRAAIAAGVPVLGICRGFQEMNVAFGGSLHQKLHEVGGFIEHREDKEASLEVQYGPSHSITVEPGGVIYEAWGRNSAEVNSVHTQAVERLGIGLRPEAYAPDGLVEAFSVIDANEFALGVQWHPEWKVSENPFFLSIFNAFGDACRRRATTRVK

SEQ ID NO: 1905 - DNA, 765 bp, Shewanella frigidimarina NCIMB 400
  CDS (1)..(765): transl_table=11
atgtctctgtcaggtcttcccctcatcggggtagtagcgtgcaatcagcaaattggtcttcatccatttaacatagtgggtgaaaaatatttattgagtgtggttaatggcgctaaaggattccccttagttatcccatcacttggcgtcgatgcgccaattgaagctattcttgctcgtctcgacggtatcctttttacgggttcaccatcgaatgttgaacctcatcattaccaaggtcctgctagtgagcatggaacccatcatgatcctaagcgtgacgcaataactttaccgctgataaaagccgcaattgatgccgggatccctgtattaggtatttgccgtggttttcaagaaatgaacgtagtgtacggtggcagtttgtaccagaaactacacgaagtaggcacgtatattgaacatcgtgaagataagaaagccccattagatgtgcaatatggtatttcgcatccagttaacctggttgctggcgggctccttcacgatgcatggggctgtgacacagcagaggttaactctgttcatactcaaggcgtggagcgtctaggtgaggggttacagccagaagcattcgctccagacggattagtagaagcattttctgttaaaaatgctaaaaattttgcattaggagtccaatggcatccagaatggaaagtaaccgaaaatgcattctacactgcaattttcgaagcattcggacaagcctgtagacaacatgcggcaacacaagtgagataa

SEQ ID NO: 1906 - protein, 254 aa, Shewanella frigidimarina NCIMB 400
MSLSGLPLIGVVACNQQIGLHPFNIVGEKYLLSVVNGAKGFPLVIPSLGVDAPIEAILARLDGILFTGSPSNVEPHHYQGPASEHGTHHDPKRDAITLPLIKAAIDAGIPVLGICRGFQEMNVVYGGSLYQKLHEVGTYIEHREDKKAPLDVQYGISHPVNLVAGGLLHDAWGCDTAEVNSVHTQGVERLGEGLQPEAFAPDGLVEAFSVKNAKNFALGVQWHPEWKVTENAFYTAIFEAFGQACRQHAATQVR

SEQ ID NO: 1907 - DNA, 807 bp, Burkholderia ambifaria AMMD
  CDS (1)..(807): transl_table=11
atgcgcgcgcgcccgatcgtagccgttaccgccgaccgcatcctgcgcggcgcccatccgaaccacacggccggcgagaagtatctcgtcgcgctggtcgacggcgccggcgcgctggcgttcgtgctgcccgcgctgggtgcgcggcagccggtcgacgcgatcgtcgcatccgtcgacgggctgctgctgacgggcagctattcgaacgtcgagccgcatcactacggcggcccggcgagtacgcccgacacgctgcacgaccccgcgcgcgatgcgaccgcgctgccgctgatccgcgcggcgatcgatgccggcgtgccggtgctcgcgatctgccgcggcatgcaggagctgaacgtcgcgtacggcggcacgctgcatcagcggctgcatgcgagccccggtttccatgaccatcgcgagcgcgacggcgatccgctcgagcgacagtacggccccgcccatcgcatccagcttgcgccgggcggcctgctgcaacggatcgcgcgcggcgcgcacgacgcgatggtcaattcgctgcacgaccagggcatcgcgcggcttggcgcggggctcgcggtcgaagcgagcgcgcccgacgggctgatcgaggccgtcagcgtgcgcggcgcgcgcgcgttcgcgctcggcgtgcagtggcatcccgaatggcgcttcgcggaacagccgctgtcgcgcgacatcttcgcggcattcggcgcggcgtgccgcgcgcgcatgacccaccgcattcgtgcggccggcggcaccatgccgtcgccggccgcatccgacatcgactga

SEQ ID NO: 1908 - protein, 268 aa, Burkholderia ambifaria AMMD
MRARPIVAVTADRILRGAHPNHTAGEKYLVALVDGAGALAFVLPALGARQPVDAIVASVDGLLLTGSYSNVEPHHYGGPASTPDTLHDPARDATALPLIRAAIDAGVPVLAICRGMQELNVAYGGTLHQRLHASPGFHDHRERDGDPLERQYGPAHRIQLAPGGLLQRIARGAHDAMVNSLHDQGIARLGAGLAVEASAPDGLIEAVSVRGARAFALGVQWHPEWRFAEQPLSRDIFAAFGAACRARMTHRIRAAGGTMPSPAASDID

SEQ ID NO: 1909 - DNA, 762 bp, Shewanella sp. ANA-3
  CDS (1)..(762): transl_table=11
atgtctgtcgagttgccccttattggtgttattgcgtgtaatcaacaattgggatcacatccctttaatattgttggtgaaaaatacctcttaggtgtagtgaatggtgctaagggctggcccttggtgatcccctcattaggtgctgaacaacctatagaggcgattctggcaagtctcgatggcattctctttaccggttcgccttcgaatgttgaaccccatctctatgcgggtgaaccgagtgaagtcggtactcaccacgatcccaaacgcgatgccaccaccttaccgctcatccgtgcggccattgcggcgggtgtgcctgtgcttgggatttgtcgtggctttcaagagatgaacgtggcgtttggtggcagtttgcatcagaagttgcacgaagtgggcggttttattgaacacagagaagataaagaggcctcgttagaggtgcaatatgggccatcccacagtatcactgtggagcctgggggggtcatttacgaggcctggggccgtaactcggcagaggtaaactctgtacatactcagggcgtggagcgtcttgggattgggttgcggccagaagcttatgctccagatggtctagtggaggccttctccgttatagacacaaatgaatttgccctaggtgtgcaatggcatcctgaatggaaggtgagtgaaaacccatttttcctctctatattcaatgcctttggtgatgcgtgccgtcgtagggctacaactcgagtgaaataa

SEQ ID NO: 1910 - protein, 253 aa, Shewanella sp. ANA-3
MSVELPLIGVIACNQQLGSHPFNIVGEKYLLGVVNGAKGWPLVIPSLGAEQPIEAILASLDGILFTGSPSNVEPHLYAGEPSEVGTHHDPKRDATTLPLIRAAIAAGVPVLGICRGFQEMNVAFGGSLHQKLHEVGGFIEHREDKEASLEVQYGPSHSITVEPGGVIYEAWGRNSAEVNSVHTQGVERLGIGLRPEAYAPDGLVEAFSVIDTNEFALGVQWHPEWKVSENPFFLSIFNAFGDACRRRATTRVK

SEQ ID NO: 1911 - DNA, 765 bp, Shewanella amazonensis SB2B
  CDS (1)..(765): transl_table=11
atgtctgacgccacgataccccttattggtgtctctgcctgtaataccccgattggactgcagacgtttaatacggtgggagaaaaatatcttttaggtgtgattaatggcactggcggttggccgctgatcattccttctattggcgatggcatgccaacggaactcttgcttgagcgtctggacggcatactgttcacaggttcaccttccaatgtcgaaccacatcactattcggggccggccagcgagccgggaactcatcacgatccccgccgtgatgccaccaccttgcctttgattaaggcggctatcgctgcgggcgtgccggtactgggtatctgtcgcggcttccaggaaatgaacgtggcctttggcggcagtttgcaccaaaagttacatgaaacgggtgtgtttgaagagcacagggaagacagaactgcgccacttgaggtgcagtatggtctggcccacacggtgactctggagcccgggggggtaattttcgaagcctggggccgcagctcggcggaagtgaattccgtccatactcagggcgttgaacgtctgggtaacgggttgcggccagaagcctatgcaccggatggcttgatagaagccttctctgttacagatgccaaaaattttgccctgggtgtgcaatttcatcccgaatggaaagtggccgacaatgctttttatctgtcgattttcaatgccttcggtgacgcgtgtcgacgcagggcccaagagcgagcgagataa

SEQ ID NO: 1912 - protein, 254 aa, Shewanella amazonensis SB2B
MSDATIPLIGVSACNTPIGLQTFNTVGEKYLLGVINGTGGWPLIIPSIGDGMPTELLLERLDGILFTGSPSNVEPHHYSGPASEPGTHHDPRRDATTLPLIKAAIAAGVPVLGICRGFQEMNVAFGGSLHQKLHETGVFEEHREDRTAPLEVQYGLAHTVTLEPGGVIFEAWGRSSAEVNSVHTQGVERLGNGLRPEAYAPDGLIEAFSVTDAKNFALGVQFHPEWKVADNAFYLSIFNAFGDACRRRAQERAR

SEQ ID NO: 1913 - DNA, 762 bp, Shewanella sp. W3-18-1
  CDS (1)..(762): transl_table=11
atgtctgcagagttacccctcattggtgttattgcgtgtaatcaacaattgggttcacatccgtttaatattgttggtgaaaaatatcttttaggtgttgttgatggtgcgaaaggctggcctttggtgatcccatcactcgggcatgattcacctattgacagtatcttggcacggcttgatggcattttgtttacggggtctccttctaatgttgagccacgccattatgcaggtcaaccgagtgagactggtactcaccatgatcccaaacgtgacgccactaccttgccattaatccacgctgctattgcggcaggagtgcctgtactcggaatatgtcgtggttttcaagaaatgaatgtggcctttggtggcagcttgcatcaaaagttatatgaagttgctggtttgatcgaacatagagaaaatgaaaatgccgctttagaggtgcaatatgggccgtcacacagtattactgttgagcctgggggggtcatttacgaggcttggggccgtaactctgcagaggttaactctgttcatactcaaggcgtggcgcgtttgggtgttgggttacggccagaagcttatgctccagatggattagtggaggccttctccgtaatcgataccaaagaatttgcccttggtgtgcagtggcatccagagtggaaagtggctgaaaatccattttacctctctattttcaatgcgtttggtgatgcctgccgacgtagggctaaaactcgagtgaaataa

SEQ ID NO: 1914 - protein, 253 aa, Shewanella sp. W3-18-1
MSAELPLIGVIACNQQLGSHPFNIVGEKYLLGVVDGAKGWPLVIPSLGHDSPIDSILARLDGILFTGSPSNVEPRHYAGQPSETGTHHDPKRDATTLPLIHAAIAAGVPVLGICRGFQEMNVAFGGSLHQKLYEVAGLIEHRENENAALEVQYGPSHSITVEPGGVIYEAWGRNSAEVNSVHTQGVARLGVGLRPEAYAPDGLVEAFSVIDTKEFALGVQWHPEWKVAENPFYLSIFNAFGDACRRRAKTRVK

SEQ ID NO: 1915 - DNA, 753 bp, Azotobacter vinelandii
  CDS (1)..(753): transl_table=11
atgccccgcctgcccctgatcggcgtgaccgcctgcacccggcagatcggttcgcaccccttccatatcgccggcgacaagtacctgcgggcggtggcggaaggggccggcggcctgccactgatcgttcccgcgctgggcgaactgatcgaccgggaggccctgctggagcggctcgacggcctgctctgcaccggctcgccgtcgaacgtcgaaccccactattaccagggggccgccagcgcgccgggcacccctcacgatccggcccgcgacagcaccacgctgccgctgatccgcgccgcggtcgccgccggcgtgccgttgctcggcatctgccggggcttccaggaaatgaacgtggccttcggcggcagcctgcaccagaaggtccacgaggccggcccctacgccgaccaccgcgagctggaggacgaggcgctggaaatccagtacgggccgcgccatgcgctgcacgtgcagcccggcgggctgctcgacggattgggcctgccccggcggatcgaggtcaactcgctgcacggccagggcatcgagcgcctggctcccggcctgcgcacggaagggttggcccaggacgggctgatcgaggcgttttccgtcgagggtgcgaagtccttcgccctcggcgtgcagtggcatccggaatggcagttccacaccaacccctgttcccgggccctgttccaggccttcggcgacgcctgccggcgtcgggcggagcgtcgttag

SEQ ID NO: 1916 - protein, 250 aa, Azotobacter vinelandii
MPRLPLIGVTACTRQIGSHPFHIAGDKYLRAVAEGAGGLPLIVPALGELIDREALLERLDGLLCTGSPSNVEPHYYQGAASAPGTPHDPARDSTTLPLIRAAVAAGVPLLGICRGFQEMNVAFGGSLHQKVHEAGPYADHRELEDEALEIQYGPRHALHVQPGGLLDGLGLPRRIEVNSLHGQGIERLAPGLRTEGLAQDGLIEAFSVEGAKSFALGVQWHPEWQFHTNPCSRALFQAFGDACRRRAERR

SEQ ID NO: 1917 - DNA, 789 bp, Pseudomonas syringae pv. syringae B728a
  CDS (1)..(789): transl_table=11
atggcgctgaccattcagatttcacacaggattcaagctatgtcgcgacctcccttgatcggtgtcaccgcctgccgtcagcagttgggcaagtattcttctcacaccgcaggcgacaagtacgtcgaggctgcagccttcgccggcatgccggtgattctgcctgcactcgaggtgcccaccgagcctgcgcaactgctcgcgtcgctggatggcctgctgtttaccggctcgccgtccaacgtcgagccgcgtcactacaatggaccggcgagcgtggagggcaccgctcatgatgtattccgggaccgcaccacactgccgctgctcagggctgccatcgctcagggcgtgccggtgttgtgcatttgccgcggttttcaggagctgaatgtcgctttgggcggcagcctgcatcagcgggttcaggagttgcccggctatctggatcatcgtgagccgcaaagcgaggtgctggcggtgcagtacacgccaaagcatgccgtgcaggtgcagcctggcggtttgctcgactcgctcgggctgggcccgggcttcgaggtcaacagcctgcacagtcagggtgtcgatcgtctggcgtcggacctgcgcgcagaagcattggcccccgacggtctggtcgaagcggtgtccatgcccggcgcgccaggctttgtgctgggtgtgcagtggcatccggaatgggagttcatggacaaccccgtgtcgctcagcctgttcaaggccttccgcgaggcctgccagagctatgcgcgcaaccgccgctag

SEQ ID NO: 1918 - protein, 262 aa, Pseudomonas syringae pv. syringae B728a
MALTIQISHRIQAMSRPPLIGVTACRQQLGKYSSHTAGDKYVEAAAFAGMPVILPALEVPTEPAQLLASLDGLLFTGSPSNVEPRHYNGPASVEGTAHDVFRDRTTLPLLRAAIAQGVPVLCICRGFQELNVALGGSLHQRVQELPGYLDHREPQSEVLAVQYTPKHAVQVQPGGLLDSLGLGPGFEVNSLHSQGVDRLASDLRAEALAPDGLVEAVSMPGAPGFVLGVQWHPEWEFMDNPVSLSLFKAFREACQSYARNRR

SEQ ID NO: 1919 - DNA, 807 bp, Burkholderia cepacia R18194
  CDS (1)..(807): transl_table=11
atgcgtgcgcgcccgatcgtagccgtcaccgccgaccgcatcctgcgcggtgcgcatccgaaccacaccgcgggggagaagtacctggccgcgctcgtcgacggcgccggcgcgcttgcattcgtgctgcccgcgctcggcgcgcgccagccggccgacgcgatcgtcgcggcgatcgacgggttgctgttgaccggcagctattcgaacgtcgagccgcatcactatggcggcaccgcgagcgcgcccgacacgctgcacgaccccgcgcgcgatgcgaccgcgctgccgctgatccgcgcggcgatcgacgcgggcgtgcccgtgctcgcgatctgtcgcggcatgcaggagctgaacgtcgcgtacggcggcacgctgcaccagaggctgcacgcgacgaccggcttcgacgatcaccgcgagcggcccgccgatccgctcgaacggcagtacggccccgcgcacgtcgtgcagttcgcgccgggcggcctgctgcagcgggtcgcgcgcggcgcgcaggcggcgacggtcaattcgctgcacgatcagggcatcgcgcagctcggcgcggggctcgtcgtcgaagccagtgcgcccgacgggctggtcgaggccgtcagcgtgcgcggcgcgcgcgcgttcgcgctcggcgtgcagtggcatcccgaatggcgctacgcggaacagtcgctgtcgcgcgacatcttcgcggcatttggcgcggcgtgccgcgcgcgcatgacgcatcgcattcatgcagccggcggcgcgatggcgtcgccggctgcatccgacgtcgactga

SEQ ID NO: 1920 - protein, 268 aa, Burkholderia cepacia R18194
MRARPIVAVTADRILRGAHPNHTAGEKYLAALVDGAGALAFVLPALGARQPADAIVAAIDGLLLTGSYSNVEPHHYGGTASAPDTLHDPARDATALPLIRAAIDAGVPVLAICRGMQELNVAYGGTLHQRLHATTGFDDHRERPADPLERQYGPAHVVQFAPGGLLQRVARGAQAATVNSLHDQGIAQLGAGLVVEASAPDGLVEAVSVRGARAFALGVQWHPEWRYAEQSLSRDIFAAFGAACRARMTHRIHAAGGAMASPAASDVD

SEQ ID NO: 1921 - DNA, 789 bp, Burkholderia cepacia R18194
  CDS (1)..(789): transl_table=11
atggaaagaaggaaacccctcgtcggcatcaccgccgaccacacgcaaatcggcgcgcacgcgtcgcatacggtcggcgacaaatacgtcgccgcgatcgtcgacggcgcgcaagcgttcgcgatggtgctgcccgcgctcggcgagcgccagtcggtcgacgacgtactcgacacggtcgacggcctgctgtttaccggcagctactcgaacgtcgagccgcacctgtacggcggcgaaccgagcgcaccgggcacgaagcacgacccggcccgcgacgcgaccacgctgccgctgctgcgcgcggcgatcgccgcgggcgtgcccgtgctggccgtctgccgcggcttccaggagctgaacgtcgtctgcggcggcacgctgcaccagcgcgtgcatgaagtgccgggcttcgccgaccaccgcgaggacgacgacgcgccgatggatacgcagtacggccccgcgcacgtcgtgcgcctcacgcccggcggcaagctgcacgcgctcgccggcggccgcgacgaagtgcacgtgaactcgctgcacaagcagggcatcgcgcagctcggctccggcctcgccgtcgaggccgtcgcgccagacgggctgatcgaagccgtgagcgtcgtcgatgcaccggctttcgccctcgccgtccagtggcatccggaatggcgccatgcgcaggacccgctgtcgagcgcgatcttccgcgccttcggcgatgcctgccgcgcccgccgcgccacccgcacgcgtgccacggccgctgccgcgctcgcctga

SEQ ID NO: 1922 - protein, 262 aa, Burkholderia cepacia R18194
MERRKPLVGITADHTQIGAHASHTVGDKYVAAIVDGAQAFAMVLPALGERQSVDDVLDTVDGLLFTGSYSNVEPHLYGGEPSAPGTKHDPARDATTLPLLRAAIAAGVPVLAVCRGFQELNVVCGGTLHQRVHEVPGFADHREDDDAPMDTQYGPAHVVRLTPGGKLHALAGGRDEVHVNSLHKQGIAQLGSGLAVEAVAPDGLIEAVSVVDAPAFALAVQWHPEWRHAQDPLSSAIFRAFGDACRARRATRTRATAAAALA

SEQ ID NO: 1923 - DNA, 873 bp, Burkholderia cepacia R1808
  CDS (1)..(873): transl_table=11
atgcgcatgcgcatgcattgtgcgctcgacgcggaggcgctcatgcgcgcgcggccgatcgtagcggtcagcgccgaccgcgtgctgcgcggcgcgcaccagaaccacacggccggcgagaaatatctggtcgcggtggtcgacggcgccggtgcgctcgcgttcgtgttgccggcgctgggcgcgcggcagccggtcgacgcgatcgtcgcgtcgctcgacgggctgctgctgaccggcagtcattcgaacgtcgagccgcatcactacggcggcccggcaagcgccgctgacacgctgcacgacgccgcgcgcgacgcgaccgtgctgccgctcgtgcgcgcggcgatcgacgccggcgtgccagtgctcgcgatctgccgcggcatgcaggagctgaacgtcgcgtatggcggcacgctgcatcagcggctgcatgcgagcgtcgggttccacgatcatcgcgagcgcgacggcgatccgctcgagcggcagtacggccccgcgcaccgcgtccgattcgcgccgggcggcctgctgcaacgcatcgcgcgcggcgcgcatgacgcaatggtcaattcgctgcacgatcagggcatcgcgcggctcggtgcggggctcgcggtcgaggcgagcgcgccggacgggctgatcgaggccgtgagcgtgcgcggcgcgcgcgcgttcgcgctgggcgtgcagtggcatcccgaatggcggttcgcggaacagccgctgtcgcgcgacatcttcgcggcattcggcgcggcgtgccgcgcgcgcatgacgcatcgccttcatgcggccggcggcgcgatgccgtctcgggaggcgagcgatatcgacaccgatactgataacgacaccgactaa

SEQ ID NO: 1924 - protein, 290 aa, Burkholderia cepacia R1808
MRMRMHCALDAEALMRARPIVAVSADRVLRGAHQNHTAGEKYLVAVVDGAGALAFVLPALGARQPVDAIVASLDGLLLTGSHSNVEPHHYGGPASAADTLHDAARDATVLPLVRAAIDAGVPVLAICRGMQELNVAYGGTLHQRLHASVGFHDHRERDGDPLERQYGPAHRVRFAPGGLLQRIARGAHDAMVNSLHDQGIARLGAGLAVEASAPDGLIEAVSVRGARAFALGVQWHPEWRFAEQPLSRDIFAAFGAACRARMTHRLHAAGGAMPSREASDIDTDTDNDTD

SEQ ID NO: 1925 - DNA, 762 bp, Pseudomonas fluorescens PfO-1
  CDS (1)..(762): transl_table=11
atggcattcaagccattgatcggcgttactgcgtgcgtcaaacagattggcctgcacccctatcacatcagcggcgacaaatacgttcgcgctgtcagcgttgcggcgctggggttgcccgtcgtcattccttcccttggccaactgactgaaatcgaagatctgctgggtcagctcgacggtctgttgctgaccggctcgccgtccaacgtggaacccttccactatcagggcccggacagcgctcccggcacggaccacgatccggcgcgggatgccactacccttcctttattgcgtgcagccatcgcggcgggcgttccggtactcggcatctgccggggtttccaggaaatgaacgtggcgttcggcggcagcctgcaccagaaggtgcatgagctgccgggcatgctcgatcaccgcgaagccgacagcccggatgtcgccgtgcaatacgccccggcccatgccgtgacggtgctgcccggtggcgtgttcgaagcgctggagctgccgagtgaattccaggtcaactcgattcacagtcagggcatcgaccgcctcgctcccggtctgcgcgccgaagccgtggcgccggatggcctgatcgaggcggtctcggtggagcacagcccgaccttcgccctcggcgtgcaatggcacccggaatggcaagtgctggacaacccgaactacctgcggattttccaggcattcggcgaggcttgccgccagcgtgcggcgcgacgcaaccagcgctga

SEQ ID NO: 1926 - protein, 253 aa, Pseudomonas fluorescens PfO-1
MAFKPLIGVTACVKQIGLHPYHISGDKYVRAVSVAALGLPVVIPSLGQLTEIEDLLGQLDGLLLTGSPSNVEPFHYQGPDSAPGTDHDPARDATTLPLLRAAIAAGVPVLGICRGFQEMNVAFGGSLHQKVHELPGMLDHREADSPDVAVQYAPAHAVTVLPGGVFEALELPSEFQVNSIHSQGIDRLAPGLRAEAVAPDGLIEAVSVEHSPTFALGVQWHPEWQVLDNPNYLRIFQAFGEACRQRAARRNQR

SEQ ID NO: 1927 - DNA, 762 bp, Shewanella benthica KT99
  CDS (1)..(762): transl_table=11
atgtcggatgcagggcttgctgtcattggagtgacggcgtgcaatcaggatttaggcttacatccattcaatatagtcggtgaaaagtacctgcttagtatcgcggatgcgactaaggcttggccgttagtcattcctgcattaggccattgtccggcggagttaatcttacctcgtctggacggcattctctttaccggttctccttcaaacatcgagccccatcactttcagggccagccaagcgaggccggcactcaccacgatcctaaacgcgacgcgacaacactgcctctactcaaggcggcaatagatgccggtattcctgtgttggcgatttgccgtggttttcaggagatgaatgtggtcttcggtggcagtttgcaccagaaattacatcaagtgggtggattcatcgagcatagagaagataagcaagagccggtcgaagtgcagtatggcatctctcacgaggtacacattgaacctggaggattgctccatgaggcgtggggccgtagctccgcagaggtgaactctgtgtatacccaaggcgtcgatcgtctaggtattgggtttcgaccagaagcatatgccccagatggtttagtagaggcattctctattaaagatgcaaagaattttgcactgggcgtgcagtggcatcctgaatggaaggtgttagacaatccgttttacacctcaatttttaacgctttcagtgttgcctgtgagcgccgtgcaaacagccgaacgagataa

SEQ ID NO: 1928 - protein, 253 aa, Shewanella benthica KT99
MSDAGLAVIGVTACNQDLGLHPFNIVGEKYLLSIADATKAWPLVIPALGHCPAELILPRLDGILFTGSPSNIEPHHFQGQPSEAGTHHDPKRDATTLPLLKAAIDAGIPVLAICRGFQEMNVVFGGSLHQKLHQVGGFIEHREDKQEPVEVQYGISHEVHIEPGGLLHEAWGRSSAEVNSVYTQGVDRLGIGFRPEAYAPDGLVEAFSIKDAKNFALGVQWHPEWKVLDNPFYTSIFNAFSVACERRANSRTR

SEQ ID NO: 1929 - DNA, 753 bp, Escherichia albertii TW07627
  CDS (1)..(753): transl_table=11
atgaacaatcctgttatcggtgtcgtaatgtgcaggaacaggcttaagggtcatgcgacccagactctgcaagaaaagtacctgaatgccattatttacgcgggtggtttgccgattgcgctgccacatgcgctggcggagcccgcattacttgaagaacttctgccgaaactcgatggcatttatcttcctggtagtcccagcaatgtgcagccgcacctatatggtgaaaacggcgatgagcctgacgccgatcccgggcgtgatcttctgagcatggcgttaattaatgctgcactcgaaaggcgtatccccattttcgccatctgccgagggttacaggaactggtggtggcaaccggaggttcgctgcatcgcaagctgtgcgaacagcctgaattgctggaacatcgtgaagatcccgaactgccggttgagcagcaatatgcgccgtcgcacgaagttcaggttgaagaggggggattactgtctgcactgttacctgaatgtagcaacttttgggtaaactctctgcatggacaaggggcgaaggtcgtcagcccgcgattacgcgttgaggctcgttcgccggatggcctggttgaggcggtaagcgtcatcaatcatcctttcgcgctgggcgtacagtggcacccggaatggaacagtagcgagtacgcgctttcgcgtatattgttcgagggctttatcaccgcttgtcagaaccatatcgctgaaaaacagcggctctga

SEQ ID NO: 1930 - protein, 250 aa, Escherichia albertii TW07627
MNNPVIGVVMCRNRLKGHATQTLQEKYLNAIIYAGGLPIALPHALAEPALLEELLPKLDGIYLPGSPSNVQPHLYGENGDEPDADPGRDLLSMALINAALERRIPIFAICRGLQELVVATGGSLHRKLCEQPELLEHREDPELPVEQQYAPSHEVQVEEGGLLSALLPECSNFWVNSLHGQGAKVVSPRLRVEARSPDGLVEAVSVINHPFALGVQWHPEWNSSEYALSRILFEGFITACQNHIAEKQRL

SEQ ID NO: 1931 - DNA, 807 bp, Burkholderia ambifaria IOP40-10
  CDS (1)..(807): transl_table=11
atgcgagcacgcccgatcgtagccgtcaccgccgaccgcattctgcgcggcgcccatccgaaccacacggccggcgagaagtatctcgtcgcgctggtcgacggcgccggcgcgctggcgttcgtgctgcccgcgctgggtgcgcggcagccggtcgacgcgatcgttgcgtccgtcgacgggctgctgctgacgggcagctattcgaacgtcgagccgcatcattacggcggcccggcgagtacgcccgacacgttgcacgaccccgcgcgcgatgcgaccgcgctgccgctgatccgcgcggcgatcgacgccggcgtgccggtgctcgcgatctgccgcggcatgcaggagctgaacgtcgcgtacggcggcacgctgcatcagcggctgcatgcgagccccggtttccatgaccatcgcgagcgcgacggcgatccgctcgagcgacagtacggccccgcgcatcgcatacggcttgcgccgggcggcctgctgcaacggatcgcgcgcggcgcgcacgacgcgatggtcaattcgctgcacgaccagggcgtcgcgcggctcggcgcggggctcgcggtcgaagcgagcgcgcccgacgggctgatcgaggccgtcagcgtgcgcggcgcgcgcgcgttcgcgctcgccgtgcagtggcatcccgagtggcgtttcgcggaacagccgctgtcgcgcgacatcttcgcggcattcggcgcggcgtgccgcgcgcgcatgacccaccgcattcatgcggccggcggcaccatgccgtcgccggccgcatccgacatcgactga

SEQ ID NO: 1932 - protein, 268 aa, Burkholderia ambifaria IOP40-10
MRARPIVAVTADRILRGAHPNHTAGEKYLVALVDGAGALAFVLPALGARQPVDAIVASVDGLLLTGSYSNVEPHHYGGPASTPDTLHDPARDATALPLIRAAIDAGVPVLAICRGMQELNVAYGGTLHQRLHASPGFHDHRERDGDPLERQYGPAHRIRLAPGGLLQRIARGAHDAMVNSLHDQGVARLGAGLAVEASAPDGLIEAVSVRGARAFALAVQWHPEWRFAEQPLSRDIFAAFGAACRARMTHRIHAAGGTMPSPAASDID

SEQ ID NO: 1933 - DNA, 807 bp, Burkholderia ambifaria MEX-5
  CDS (1)..(807): transl_table=11
atgcgagcgcgcccgatcgtagccgtcaccgccgaccgcatcctgcgcggcgcccatccgaaccacacggccggcgagaaatatctcgtcgcgctggtcgacggcgccggcgcgctggcgttcgtgctgcccgcgctcggtgcgcggcagccggtcgacgcgatcgttgcgtcggtcgacgggctgctgctgaccggcagctattcgaacgtcgagccgcatcactacggcggcccggcgagtacgcccgacacgctgcacgaccccgcgcgcgatgcgaccgcgctgccgctgatccgcgcggcgatcgatgccggcgtgccggtgctcgccatctgccgcggcatgcaggagctgaacgtcgcgtacggcggcacgctgcatcagcggctgcatgcgagccccggtttccatgaccatcgcgagcgcgacggcgatccgctcgagcgacagtacggccccgcgcatcgcatacagcttgcgccgggcggcctgctgcaacggatcgcgcgcggcgcgcacgacgcgatggtcaattcgctgcacgaccagggcgtcgcgcggctcggcgccgggctcgcggtcgaagcgagcgcgcccgacgggctgatcgaagccgtcagcgtgcgcggcgcgcgtgcgttcgcgctcggcgtgcagtggcatcccgaatggcgtttcgcggaacagccgctgtcgcgcgacatcttcgcggcattcggcgcggcgtgccgcgcgcgcatgacgcaccgcattcatgcggccggcggcaccatgccgtcgccggctgcatccgacatcgactga

SEQ ID NO: 1934 - protein, 268 aa, Burkholderia ambifaria MEX-5
MRARPIVAVTADRILRGAHPNHTAGEKYLVALVDGAGALAFVLPALGARQPVDAIVASVDGLLLTGSYSNVEPHHYGGPASTPDTLHDPARDATALPLIRAAIDAGVPVLAICRGMQELNVAYGGTLHQRLHASPGFHDHRERDGDPLERQYGPAHRIQLAPGGLLQRIARGAHDAMVNSLHDQGVARLGAGLAVEASAPDGLIEAVSVRGARAFALGVQWHPEWRFAEQPLSRDIFAAFGAACRARMTHRIHAAGGTMPSPAASDID

SEQ ID NO: 1935 - DNA, 786 bp, Burkholderia ambifaria MEX-5
  CDS (1)..(786): transl_table=11
atggaaaggaaacccctcgtcggcatcaccgccgacttcacgcagatcggcgcacacgcgtcgcacacggtcggcgacaagtacgtcgcggcgatcgtcgacggcgcgcatgcgttcgcgatggtgctgcccgcgctcggcgatcggcagtcggtcgacgacgtgctcgacacggtcgacggcctgctgtttaccggcagctattcgaacgtcgagccgcaccggtacggcggcgcgccgagcacaccgggcacgaagcacgaccctgctcgcgatgcgacgacgctgcccctgctgcgcgcggcgatcgcggcgggcgtgccggtgctcgccgtatgccgcggcttccaggagctgaacgtcgtctgcggcggcacgctgcatcagcacgtgcacgacgtgccgggcctcgcggatcaccgcgaggacgacgccgcgccgatggaatcgcaatacggccccgcgcacgtcgttcacctgacgcccggcggcaagctgcaagcgctcgccggcggacgcgacgaagtacacgtgaactcgctgcacaagcagggcatcgcgcagctcggccccggcctcgccgtcgaagccgtcgcaccggacggcctgatcgaggccgtgagcgtcgtcgacgcaccggctttcgcactcgccgtgcaatggcatccggaatggcggcatgcgcaggacccgctgtcgagcgcgatctttcgcgcgttcggcgacgcctgccgcgcccaccgcgccgcccgcgcgcacaccacggccgccgccgcgctcgcctga

SEQ ID NO: 1936 - protein, 261 aa, Burkholderia ambifaria MEX-5
MERKPLVGITADFTQIGAHASHTVGDKYVAAIVDGAHAFAMVLPALGDRQSVDDVLDTVDGLLFTGSYSNVEPHRYGGAPSTPGTKHDPARDATTLPLLRAAIAAGVPVLAVCRGFQELNVVCGGTLHQHVHDVPGLADHREDDAAPMESQYGPAHVVHLTPGGKLQALAGGRDEVHVNSLHKQGIAQLGPGLAVEAVAPDGLIEAVSVVDAPAFALAVQWHPEWRHAQDPLSSAIFRAFGDACRAHRAARAHTTAAAALA

SEQ ID NO: 1937 - DNA, 753 bp, Escherichia coli E22
  CDS (1)..(753): transl_table=11
atgaacaatccggttatcggtgtcgtaatgtgcaggaacaggcttaaggatcatgcgacccagactctgcaagaaaagtacctgaatgccatcatccacgcaggcggcttgccaattgcgctaccacatgcgctggcggaaccgtcattacttgaacaacttttgccgaaactcgatggcatttatcttcctggtagtcccagcaatgtgcagccgcacctatatggtgaaaacggcgatgagcctgacgccgatcccgggcgtgatcttctgagcatggcgttaattaatgccgcactcgaaaggcgcatccccattttcgccatctgccggggtttacaggaactggtggtggcaaccggtggttcgttgcatcgcaagctgtgcgaacagcctgaattgctggaacatcgggaagatcccgaactgccggtggaacagcaatatgcaccgtcgcatgaagttcaggttgaagaggggggattactgtctgcgttgttacctgaatgtagcaacttttgggtaaactctctgcatgggcaaggggcgaaggtcgttagcccacggttgcgtgttgaagctcgctcgccggatggcttagttgaggcggttagcgtcatcaatcatccttttgcgctgggcgtacagtggcacccggaatggaacagtagcgagtacgcgctttcgcgtatattgttcgagggctttatcaccgcttgtcagcaccatatcgctgaaaaacagcgactctga

SEQ ID NO: 1938 - protein, 250 aa, Escherichia coli E22
MNNPVIGVVMCRNRLKDHATQTLQEKYLNAIIHAGGLPIALPHALAEPSLLEQLLPKLDGIYLPGSPSNVQPHLYGENGDEPDADPGRDLLSMALINAALERRIPIFAICRGLQELVVATGGSLHRKLCEQPELLEHREDPELPVEQQYAPSHEVQVEEGGLLSALLPECSNFWVNSLHGQGAKVVSPRLRVEARSPDGLVEAVSVINHPFALGVQWHPEWNSSEYALSRILFEGFITACQHHIAEKQRL

SEQ ID NO: 1939 - DNA, 753 bp, Escherichia coli B171
  CDS (1)..(753): transl_table=11
atgaacaatccggttatcggtgtcgtaatgtgcaggaacaggcttaaggatcatgcgaccctgactctgcaagaaaagtacctgaatgccatcatccacgcaggcggcttgccaattgcgctaccacatgcgctggcggaaccgtcattacttgaacaacttttgccgaaactcgatggcatttatcttcctggtagtcccagcaatgtgcagccgcacctatatggtgaaaacggcgatgagcctgacgccgatcccgggcgtgatcttctgagcatggcgttaattaatgccgcactcgaaaggcgcatccccattttcgccatctgccggggtttacaggaactggtggtggcaaccggtggttcgttgcatcgcaagctgtgcgaacagcctgaattgctggaacatcgggaagatcccgaactgccggtggaacagcaatatgcaccgtcgcatgaagttcaggttgaagaggggggattactgtctgcgttgttacctgaatgtagcaacttttgggtaaactctctgcatgggcaaggggcgaaggtcgttagcccacggttgcgtgttgaagctcgctcgccggatggcttagttgaggcggttagcgtcatcaatcatccttttgcgctgggcgtacagtggcacccggaatggaacagtagcgagtacgcgctttcgcgtatattgttcgagggctttatcaccgcttgtcagcaccatatcgctgaaaaacagcgactctga

SEQ ID NO: 1940 - protein, 250 aa, Escherichia coli B171
MNNPVIGVVMCRNRLKDHATLTLQEKYLNAIIHAGGLPIALPHALAEPSLLEQLLPKLDGIYLPGSPSNVQPHLYGENGDEPDADPGRDLLSMALINAALERRIPIFAICRGLQELVVATGGSLHRKLCEQPELLEHREDPELPVEQQYAPSHEVQVEEGGLLSALLPECSNFWVNSLHGQGAKVVSPRLRVEARSPDGLVEAVSVINHPFALGVQWHPEWNSSEYALSRILFEGFITACQHHIAEKQRL

SEQ ID NO: 1941 - DNA, 777 bp, Shigella dysenteriae 1012
  CDS (1)..(777): transl_table=11
atgagattgagcatggaaaatataatgaacaatccggttatcggtgtcgtaatgtgcaggaacaggcttaagggtcatgcgacccagactctgcaagaaaagtacctgaatgccatcatccacgcaggcggcttgccaattgcgctaccacatgcgctggcggaaccgtcgttacttgaacaacttttgccgaaactcgatggcatttatcttcctggtagtcccagcaatgtgcagccgcacctatatggtgaaaacggcgatgagcctgacgccgatcccgggcgtgatcttctgagcatggcgttaattaatgccgcactcgaaaggcgcatccccattttcgccatctgccggggtttacaggaactggtggtggcaaccggtggttcgttgcatcgcaagctgtgcgaacagcctgaattgctggaacatcgggaagatcccgaactgccggtggaacagcaatatgcaccgtcgcatgaagttcaggttgaagaggggggattactgtctgcgttgttacctgaatgtagcaacttttgggtaaactctctgcatggacaaggggcgaaggtcgttagcccacggttgcatgttgaagctcgctcgccggatggcttagttgaggcggttagcgtcatcaatcatccttttgcgctgggcgtacagtggcacccggaatggaacagtagcgagtacgcgctttcgcgtatattgttcgagggctttatcaccgcttgtcagcaccatatcgctgaaaaacagcgactctga

SEQ ID NO: 1942 - protein, 258 aa, Shigella dysenteriae 1012
MRLSMENIMNNPVIGVVMCRNRLKGHATQTLQEKYLNAIIHAGGLPIALPHALAEPSLLEQLLPKLDGIYLPGSPSNVQPHLYGENGDEPDADPGRDLLSMALINAALERRIPIFAICRGLQELVVATGGSLHRKLCEQPELLEHREDPELPVEQQYAPSHEVQVEEGGLLSALLPECSNFWVNSLHGQGAKVVSPRLHVEARSPDGLVEAVSVINHPFALGVQWHPEWNSSEYALSRILFEGFITACQHHIAEKQRL

SEQ ID NO: 1943 - DNA, 765 bp, Escherichia coli 101-1; identical to SEQ ID NO: 1785
  CDS (13)..(765): transl_table=11

SEQ ID NO: 1944 - protein, 250 aa, Escherichia coli 101-1
MNNPVIGVVMCRNRLKGHATQTLQEKYLNAIIHAGGLPIALPHALAEPSLLEQLLPKLDGIYLPGSPSNVQPHLYGENGDEPDADPGRDLLSMAIINAALERRIPIFAICRGLQELVVATGGSLHRKLCEQPELLEHREDPELPVEQQYAPSHEVQVEEGGLLSALLPECSNFWVNSLHGQGAKVVSPRLRVEARSPDGLVEAVSVINHPFALGVQWHPEWNSSEYALSRILFEGFITACQHHIAEKQRL

SEQ ID NO: 1945 - DNA, 765 bp, Enterobacter cancerogenus ATCC 35316
  CDS (1)..(765): transl_table=11
atggaaaatataatgtacaagccagttattggcgtggtgatgtgtcgaaacaggcttaagggtcatgagacccagaccctgcaagaaaagtacctgaatgccattattcacgcaggcggattaccgattgccctgccccacgcgctggcagagccagagctgctttctgttttactctcaaagcttgacggcatttacctgccgggcagccccagcaacgtgcagccgcacctttatggtgaaaacggcgatgagcctgacgccgatcccgggcgtgatcttctgagcatggcgttgatccgcgccgcactcgaaaggcgcatccccattttcgccatctgccgtggtttacaggaactggttgtcgccaccgaagggactctgtatcgtcgtcttttcgatgagccagcgctgcttgaacatcgcgaagatcctgaactgccggttgagatgcagtacgcgccctctcatgaagtacaggttcaggaaggaggattactttctcaattgataccgggctgcaacacgttttgggtaaactcgctgcacggacaaggagcaaaaacgttagggccacggctgcgtgtggaagcacgttccacagacgggctggtggaagcggtcagcgtaaatgaccatcctttcgcgcttggcgtacaatggcatcccgaatggaacagtagcgaatacgccctgtcgcgtatgttgtttgagggttttatcaccgcctgtcagagccacattgctgaaaaacagcggctttga

SEQ ID NO: 1946 - protein, 254 aa, Enterobacter cancerogenus ATCC 35316
MENIMYKPVIGVVMCRNRLKGHETQTLQEKYLNAIIHAGGLPIALPHALAEPELLSVLLSKLDGIYLPGSPSNVQPHLYGENGDEPDADPGRDLLSMALIRAALERRIPIFAICRGLQELVVATEGTLYRRLFDEPALLEHREDPELPVEMQYAPSHEVQVQEGGLLSQLIPGCNTFWVNSLHGQGAKTLGPRLRVEARSTDGLVEAVSVNDHPFALGVQWHPEWNSSEYALSRMLFEGFITACQSHIAEKQRL

SEQ ID NO: 1947 - DNA, 747 bp, Vibrio alginolyticus 12G01
  CDS (1)..(747): transl_table=11
atggcagatacacacaaacccatcattggtgtggttagctgcgctaaagagttgggtggctatcagatacaagcggtcaacgacttttaccttcgcgccataaaggattttggaggactaccgattatgttggctcccgacatgtcgggcgatgacgtaaccaccatcctagacatatgtgatggttttctttttcctggcagccactctaacgttgcgccacatcgatacaatgcaacgcacgaagagagctacaaagatgaagctcgtgatgagctctcattcacgttaattcgtcatgcggttgaccaaaacattccgtgccttggtatttgccgcggctttcaagagatgaatgtcgcactcggtggctcgttaaacccagccgttcatgactccggcttcaatgaccatcgtgaagcgcctgttgaagatttcgaacaaaaatacgcgccagcacacgctgtgctagttcaaaagcagagcttatttgaacaatggctggtgcaaaatcattgggaaaataccaccttctttgaagtgaacacactacacaaccaaggcgtcgatcagcttgctcctctattacaagtagaagctaaagccccggatggcttggtagaagcatttagtcttcctaatcaaaaatttttcgttggcgtgcagtggcacccagaatgggaagcaaaaaccaatcatttctctcaaattttgttcaatgaatttatgatggctacctctcgttaa

SEQ ID NO: 1948 - protein, 248 aa, Vibrio alginolyticus 12G01
MADTHKPIIGVVSCAKELGGYQIQAVNDFYLRAIKDFGGLPIMLAPDMSGDDVTTILDICDGFLFPGSHSNVAPHRYNATHEESYKDEARDELSFTLIRHAVDQNIPCLGICRGFQEMNVALGGSLNPAVHDSGFNDHREAPVEDFEQKYAPAHAVLVQKQSLFEQWLVQNHWENTTFFEVNTLHNQGVDQLAPLLQVEAKAPDGLVEAFSLPNQKFFVGVQWHPEWEAKTNHFSQILFNEFMMATSR

SEQ ID NO: 1949 - DNA, 777 bp, Shigella flexneri
  CDS (13)..(777): transl_table=11
gtgagattgagcatggaaaatataatgaacaatccggttatcggtgtcgtaatgtgcaggaacaggcttaagggtcatgcgacccagactctgcaagaaaagtacctgaatgccatcatccacgcaggcggcttgccaattgcgctaccacatgcgctggcggaaccgtcgttacttgaacaacttttgccgaaactcgatggcatttatcttcctagtagtcccagcaatgtgcagccgcacctatatggtgaaaacggcgatgagcctgacgccgatcccgggcgtgatcttctgagcatggcgataattaatgccgcactcgaaaggcgcatccccattttcgccatctgccggggtttacaagaactggtggtggcaaccggtggttcgttgcatcgcaagctgtgcgaacagcctgaattgctggaacatcgggaagatcccgaactgccggtggaacagcaatatgcaccgtcgcatgaagttcaggttgaagaggggggattactgtctgcgttgttacctgaatgtagcaacttttgggtaaactctctacatggacaaggggcgaaggtcgttagcccacggttgcgtgttgaagctcgctcgccggatggcttagttgaggcggttagcgtcatcaatcatccttttgcgctgggcgtacagtggcacccggaatggaacagtagcgagtacgcgctttcgcgtatattgttcgagggctttatcaccgcttggcagcaccatatcgctgaaaaacagcgactctga

SEQ ID NO: 1950 - protein, 254 aa, Shigella flexneri
MENIMNNPVIGVVMCRNRLKGHATQTLQEKYLNAIIHAGGLPIALPHALAEPSLLEQLLPKLDGIYLPSSPSNVQPHLYGENGDEPDADPGRDLLSMAIINAALERRIPIFAICRGLQELVVATGGSLHRKLCEQPELLEHREDPELPVEQQYAPSHEVQVEEGGLLSALLPECSNFWVNSLHGQGAKVVSPRLRVEARSPDGLVEAVSVINHPFALGVQWHPEWNSSEYALSRILFEGFITAWQHHIAEKQRL

SEQ ID NO: 1951 - DNA, 27 bp, Artificial sequence
  primer
atgagattgagcatggaaaatataatg

SEQ ID NO: 1952 - DNA, 27 bp, Artificial sequence
  primer
atgagattgagcatggaaaatataatg

SEQ ID NO: 1953 - protein, 254 aa, Artificial sequence
  consensus sequence
  Variant (2)..(3): Xaa in position 2 to 3 is any amino acid
  Variant (4)..(9): Xaa in position 4 to 9 is any or no amino acid
  Variant (11)..(20): Xaa in position 11 to 20 is any amino acid
  Variant (22)..(28): Xaa in position 22 to 28 is any amino acid
  Variant (31)..(32): Xaa in position 31 to 32 is any amino acid
  Variant (34)..(43): Xaa in position 34 to 43 is any amino acid
  Variant (44)..(45): Xaa in position 44 to 45 is any or no amino acid
  Variant (47)..(47): Xaa in position 47 is any amino acid
  Variant (48)..(48): Xaa in position 48 is any or no amino acid
  Variant (50)..(57): Xaa in position 50 to 57 is any amino acid
  Variant (58)..(59): Xaa in position 58 to 59 is any or no amino acid
  Variant (61)..(63): Xaa in position 61 to 63 is any amino acid
  Variant (66)..(69): Xaa in position 66 to 69 is any amino acid
  Variant (72)..(72): Xaa in position 72 is any amino acid
  Variant (76)..(76): Xaa in position 76 is any amino acid
  Variant (78)..(79): Xaa in position 78 to 79 is any amino acid
  Variant (81)..(89): Xaa in position 81 to 89 is any amino acid
  Variant (90)..(91): Xaa in position 90 to 91 is any or no amino acid
  Variant (93)..(94): Xaa in position 93 to 94 is any amino acid
  Variant (97)..(101): Xaa in position 97 to 101 is any amino acid
  Variant (103)..(104): Xaa in position 103 to 104 is any amino acid
  Variant (107)..(111): Xaa in position 107 to 111 is any amino acid
  Variant (113)..(115): Xaa in position 113 to 115 is any amino acid
  Variant (120)..(120): Xaa in position 120 is any amino acid
  Variant (123)..(124): Xaa in position 123 to 124 is any amino acid
  Variant (127)..(127): Xaa in position 127 is any amino acid
  Variant (130)..(130): Xaa in position 130 is any amino acid
  Variant (133)..(142): Xaa in position 133 to 142 is any amino acid
  Variant (143)..(143): Xaa in position 143 is any or no amino acid
  Variant (147)..(154): Xaa in position 147 to 154 is any amino acid
  Variant (157)..(157): Xaa in position 157 is any amino acid
  Variant (159)..(159): Xaa in position 159 is any amino acid
  Variant (161)..(166): Xaa in position 161 to 166 is any amino acid
  Variant (169)..(169): Xaa in position 169 is any amino acid
  Variant (171)..(180): Xaa in position 171 to 180 is any amino acid
  Variant (181)..(186): Xaa in position 181 to 186 is any or no amino acid
  Variant (190)..(190): Xaa in position 190 is any amino acid
  Variant (192)..(192): Xaa in position 192 is any amino acid
  Variant (195)..(201): Xaa in position 195 to 201 is any amino acid
  Variant (203)..(204): Xaa in position 203 to 204 is any amino acid
  Variant (207)..(208): Xaa in position 207 to 208 is any amino acid
  Variant (213)..(213): Xaa in position 213 is any amino acid
  Variant (216)..(216): Xaa in position 216 is any amino acid
  Variant (218)..(222): Xaa in position 218 to 222 is any amino acid
  Variant (223)..(223): Xaa in position 223 is any or no amino acid
  Variant (235)..(245): Xaa in position 235 to 245 is any amino acid
  Variant (246)..(246): Xaa in position 246 is any or no amino acid
  Variant (248)..(249): Xaa in position 248 to 249 is any amino acid
  Variant (251)..(252): Xaa in position 251 to 252 is any amino acid
PXXXXXXXXGXXXXXXXXXXHXXXXXXXKYXXAXXXXXXXXXXXXPXXLXXXXXXXXXXLXXXDGXXXXGSXSNVXPXXYXXXXXXXXXXXDXXRDXXXXXLXXAAXXXXXPXXXICRGXQEXXVAXGGXLHXXXXXXXXXXXHREXXXXXXXXQYXPXHXXXXXXGGXLXXXXXXXXXXXXXXXXVNSXHXQGXXXXXXXLXXEAXXPDGLXEAXSXXXXXXFALGVQWHPEWXXXXXXXXXXXXFXXFXXAC

SEQ ID NO: 1954 - protein, 32 aa, Artificial sequence
  protein pattern
  Variant (4)..(4): Xaa in position 4 is Ile, Leu or Val
  Variant (6)..(6): Xaa in position 6 is any amino acid
  Variant (9)..(9): Xaa in position 9 is Ala, Ile or Val
  Variant (10)..(11): Xaa in position 10 to 11 is any amino acid
  Variant (12)..(12): Xaa in position 12 is Ile, Leu or Val
  Variant (13)..(13): Xaa in position 13 is Ala, Gly or Ser
  Variant (14)..(15): Xaa in position 14 to 15 is any amino acid
  Variant (17)..(17): Xaa in position 17 is any amino acid
  Variant (18)..(18): Xaa in position 18 is Ala, Ile, Pro or Val
  Variant (21)..(21): Xaa in position 21 is any amino acid
  Variant (22)..(22): Xaa in position 22 is Ala or Ser
  Variant (27)..(27): Xaa in position 27 is Ile or Val
  Variant (30)..(31): Xaa in position 30 to 31 is any or no amino acid
VNSXHXQGXXXXXXXLXXEAXXPDGLXEAXXV

SEQ ID NO: 1955 - protein, 11 aa, Artificial sequence
  protein pattern
  Variant (2)..(2): Xaa in position 2 is Ala, Gly, Asn or Val
FXLGVQWHPEW

SEQ ID NO: 1956 - protein, 23 aa, Artificial sequence
  protein pattern
  Variant (2)..(2): Xaa in position 2 is any amino acid
  Variant (3)..(4): Xaa in position 3 to 4 is any or no amino acid
  Variant (6)..(6): Xaa in position 6 is any amino acid
  Variant (7)..(7): Xaa in position 7 is any or no amino acid
  Variant (10)..(10): Xaa in position 10 is any amino acid
  Variant (13)..(13): Xaa in position 13 is Ile or Val
  Variant (14)..(14): Xaa in position 14 is Glu or Gln
  Variant (16)..(17): Xaa in position 16 to 17 is any amino acid
  Variant (18)..(18): Xaa in position 18 is Phe or Tyr
  Variant (19)..(19): Xaa in position 19 is Ala, Asp, Gly, Asn, Gln or Ser
  Variant (20)..(20): Xaa in position 20 is Glu or Gly
  Variant (21)..(21): Xaa in position 21 is any amino acid
  Variant (22)..(22): Xaa in position 22 is Ala, Gly, Pro or Thr
  Variant (23)..(23): Xaa in position 23 is Asp or Ser
DXXXLXXGSXSNXXPXXXXXXXX

SEQ ID NO: 1957 - protein, 29 aa, Artificial sequence
  protein pattern
  Variant (4)..(5): Xaa in position 4 to 5 is any or no amino acid
  Variant (7)..(11): Xaa in position 7 to 11 is any amino acid
  Variant (12)..(13): Xaa in position 12 to 13 is any or no amino acid
  Variant (16)..(16): Xaa in position 16 is Ala or Gly
  Variant (17)..(17): Xaa in position 17 is Ala, Ile, Leu or Pro
  Variant (18)..(18): Xaa in position 18 is any amino acid
  Variant (20)..(20): Xaa in position 20 is any amino acid
  Variant (21)..(21): Xaa in position 21 is Ile, Leu, Met or Val
  Variant (22)..(22): Xaa in position 22 is any amino acid
  Variant (23)..(23): Xaa in position 23 is Phe, Ile, Leu or Val
  Variant (24)..(25): Xaa in position 24 to 25 is any amino acid
  Variant (26)..(26): Xaa in position 26 is Glu, Gly or Asn
  Variant (28)..(28): Xaa in position 28 is any amino acid
  Variant (29)..(29): Xaa in position 29 is Phe, Ile or Leu
HREXXDXXXXXXXQYXXXHXXXXXXXGXX

SEQ ID NO: 1958 - DNA, 594 bp, Escherichia coli
  CDS (1)..(594)
atgatcattcgtgacgaaaactattttactgataaatatgaattaacccgcacacactctgaagtactggaagcggtgaaagtggttaaaccgggtaaaacgctggatctgggctgtggcaatggtcgtaacagtctttacctggcagccaatggttatgatgttgacgcatgggataaaaatgccatgagtatcgccaacgtcgagcgcattaaatccattgaaaatctggataatttacacacccgagtcgttgatctgaataacctcacatttgatagacagtacgattttattctttcgactgtggtgctgatgttccttgaggctaaaaccatccccgggttgattgccaatatgcaacgttgcactaaacctggtggttacaacctgattgtggcggcgatggataccgctgattatccatgtaccgtcggcttcccgtttgccttcaaagagggagaattacgtcgatattacgaaggctgggagagggtgaaatacaatgaagacgtcggcgagctgcaccgcaccgacgccaacggtaatcgtattaaactgcgtttcgccacgatgctggcacgtaaaaaataa

SEQ ID NO: 1959 - protein, 197 aa, Escherichia coli
MIIRDENYFTDKYELTRTHSEVLEAVKVVKPGKTLDLGCGNGRNSLYLAANGYDVDAWDKNAMSIANVERIKSIENLDNLHTRVVDLNNLTFDRQYDFILSTVVLMFLEAKTIPGLIANMQRCTKPGGYNLIVAAMDTADYPCTVGFPFAFKEGELRRYYEGWERVKYNEDVGELHRTDANGNRIKLRFATMLARKK

SEQ ID NO: 1960 - DNA, 861 bp, Pasteurella multocida subsp. multocida str. Pm70
  CDS (1)..(861): transl_table=11
atgcaaaatgaactcatttgttataaaagaatgccaatttggacagcctccagtttgccgcaaatgtttcaagaaaaacataatacgaaaattgggacatggggaaaattaagcgtactaaaagggaaactcaaattctacgaattgacggaaacgggagaaacaatccaagaacatatttttacaccagaaacggctattcctcttgttgaaccgcaggcttggcataaagtagaagccatgtcagaagatctagaatgtgttcttgaatttcattgtaagaaaaaagactactttcataaaaaatacaatatgaccccaacgcattcggaagtgaaaagtgcggtggaaatattgtcaccttgtaaagtattagacttgggctgcggtcaaggacgtaattcactcttcttaagtctgttaggttacaatgtcacagcttgggatcacaacgagaacagtatcaaatttttacaagacactgccgaaaaagaaaatcttactattcagaccgcactttatgacatcaatagtgcaaagatcagcgaaaattatgattttattttgtccactgtcgtctttatgtttctcaagccacaatgtatctcacagattattgaaaacatgcaaacgcataccaatgtgggaggctataatttaattgttgcggcgatgtcaacggaagaggtcccttgtcctgtccccttttcttttacttttaaagaaaatgaattaaaaacctattatcaagattgggaattggttaaatacaacgaagaaatgggcgaattacataaaaccgatgaaaatggtaatcgaattaaaatgaaatttgtcaccatgctcgctaagaaaaaataa

SEQ ID NO: 1961 - protein, 286 aa, Pasteurella multocida subsp. multocida str. Pm70
MQNELICYKRMPIWTASSLPQMFQEKHNTKIGTWGKLSVLKGKLKFYELTETGETIQEHIFTPETAIPLVEPQAWHKVEAMSEDLECVLEFHCKKKDYFHKKYNMTPTHSEVKSAVEILSPCKVLDLGCGQGRNSLFLSLLGYNVTAWDHNENSIKFLQDTAEKENLTIQTALYDINSAKISENYDFILSTVVFMFLKPQCISQIIENMQTHTNVGGYNLIVAAMSTEEVPCPVPFSFTFKENELKTYYQDWELVKYNEEMGELHKTDENGNRIKMKFVTMLAKKK

SEQ ID NO: 1962 - DNA, 870 bp, Neisseria meningitidis MC58
  CDS (1)..(870): transl_table=11
atgaaggagcggatagtgggtcaaagtggcgagttgttttgtttcggacagatgcctgtatggaaagtggaaaacctgccggaagttttgttgtcgggctattcgtctgaggaaggggagtgggtctgcctgaatgtgttgcagggcgatgtcgaagttcgtgcaccggacgggtcggcagaagtttggtcggcagacggcggcgattgtgtgtttgcgccgcagcaggtgttttctgtcaaaccgaaaacggacgatgccgaaatccgtttgtcgctgtattgcgcggcggcagactattttcacaaaaaatacgggatgagtgccacgcattctgcggtcgcggcggcacgggataccgtaccggcgggcagggcgttggatatgggctgcggacaggggcgcaacgcgctgtttctcggtttgaaggggtttgaagttactgcagtcgatcacaatcccgccgccttggcaaacgtggcggagctggcagaggcggagggtttgaacgtccgcacgctggaatatgatttgaacgccgccgccttgcagggcgagtttgattatattgtggcaacagtggtgctgatgttcctgatgccgcagcgcgtacccgacgtgattgccgatatgcaggcgcatacggcggcgggcgggtacaacttgattgtatcggcaatggatacggcggatttcccctgtccgatgccgttcccttttaaatttaaagagggcgagctgaaggattattatcgggattgggaactggtcgaatataaagaagaattgggttctatgcatgccaaagacgaaaacggcaatccgatacggtttaaatttgtaacgatgctggcgaaaaagcctgaataa

SEQ ID NO: 1963 - protein, 289 aa, Neisseria meningitidis MC58
MKERIVGQSGELFCFGQMPVWKVENLPEVLLSGYSSEEGEWVCLNVLQGDVEVRAPDGSAEVWSADGGDCVFAPQQVFSVKPKTDDAEIRLSLYCAAADYFHKKYGMSATHSAVAAARDTVPAGRALDMGCGQGRNALFLGLKGFEVTAVDHNPAALANVAELAEAEGLNVRTLEYDLNAAALQGEFDYIVATVVLMFLMPQRVPDVIADMQAHTAAGGYNLIVSAMDTADFPCPMPFPFKFKEGELKDYYRDWELVEYKEELGSMHAKDENGNPIRFKFVTMLAKKPE

SEQ ID NO: 1964 - DNA, 855 bp, Neisseria meningitidis Z2491
  CDS (1)..(855): transl_table=11
gtgggtcaaagcggcgagttgttttgtttcggacaaatgcccgtatggaaggcggaaaacctgccggaaattttgttgtcgggttattcgtccgaaggaggggaatgggtctgcctgaatgtgttgcagggcgatgtcgaagttcgtgcaccggacgggtcggcagaagtttggtcggcagacggcggcgattgtgtgtttgcgccgcagcaggtgttttctgtcaaaccgaaaacggacgatgccgaaatccgtttgtcgctgtattgcgcggcggcagactattttcacaaaaaatacgggatgagtgccacgcattctgcggtcgcggcggcacaggataccgtaccggcgggcagggcgttggatatgggctgcggacaggggcgcaacgcgctgtttcttggtttgaaggggtttgaagttactgcagtcgatcacaatcccgccgccttggcaaacgtggcggagctggcagaggcggagggtttgaacgtccgcacgctggaatatgatttgaacgccgccgccttgcagggtgagtttgattatattgtggcaacagtggtgctgatgttcctgatgccgcagcgcgtgcctgacgtgattgccgatatgcaggcgcatacggcggcgggcgggtacaacttaatcgtatcggcaatggatacggcggatttcccttgtccgatgccgttcccttttaaatttaaagagggagagctgaaggattattatcgggattgggagctggtcgaatataaagaagaattgggcgcgatgcacgccaaagacgaaaacggcaatccgatacggtttaaatttgtaacgatgctggcgaaaaagcctgaataa

SEQ ID NO: 1965 - protein, 284 aa, Neisseria meningitidis Z2491
MGQSGELFCFGQMPVWKAENLPEILLSGYSSEGGEWVCLNVLQGDVEVRAPDGSAEVWSADGGDCVFAPQQVFSVKPKTDDAEIRLSLYCAAADYFHKKYGMSATHSAVAAAQDTVPAGRALDMGCGQGRNALFLGLKGFEVTAVDHNPAALANVAELAEAEGLNVRTLEYDLNAAALQGEFDYIVATVVLMFLMPQRVPDVIADMQAHTAAGGYNLIVSAMDTADFPCPMPFPFKFKEGELKDYYRDWELVEYKEELGAMHAKDENGNPIRFKFVTMLAKKPE

SEQ ID NO: 1966 - DNA, 594 bp, Escherichia coli O157:H7 EDL933
  CDS (1)..(594): transl_table=11
atgatcattcgtgacgaaaattattttactgataaatatgaattaacccgcacacactctgaagtactggaagcggtgaaagtggttaaaccgggtaaaacgctggatctgggctgtggcaatggtcgtaacagtctttacctggcagccaatggttatgatgttgacgcatgggataaaaatgccatgagtatcgccaacgtcgagcgcattaaatccattgaaaatctggataatttacacacccgggtcgttgatctgaataacctcacatttgatggagagtacgattttattctttcgactgtggtgctgatgttccttgaggctaaaaccatcccagggctgattgccaatatgcaacgttgcactaaacctggcggttacaacctgattgtggcggcgatggataccgctgattatccatgtaccgtcggcttcccgtttgccttcaaagagggagaattacgtcgatattacgaaggctgggagatggtgaaatacaatgaagacgtcggcgagctgcaccgcaccgacgccaacggtaatcgtattaaactgcgtttcgccacgatgctggcacgtaaaaaatga

SEQ ID NO: 1967 - protein, 197 aa, Escherichia coli O157:H7 EDL933
MIIRDENYFTDKYELTRTHSEVLEAVKVVKPGKTLDLGCGNGRNSLYLAANGYDVDAWDKNAMSIANVERIKSIENLDNLHTRVVDLNNLTFDGEYDFILSTVVLMFLEAKTIPGLIANMQRCTKPGGYNLIVAAMDTADYPCTVGFPFAFKEGELRRYYEGWEMVKYNEDVGELHRTDANGNRIKLRFATMLARKK

SEQ ID NO: 1968 - DNA, 861 bp, Streptococcus pneumoniae TIGR4
  CDS (1)..(861): transl_table=11
atggaaaaattagttgcctataaacgcatgcctttgtggaataaacaaacaatgcctgaagctgttcagcaaaagcacaatacaaaagttgggacttgggggaaaattactgtcttgaagggagctctcaagtttattgaattgacagaagaaggggaagttctagctgaacacctctttgaagcaggggcagacaatccaatggcccaacctcaagcctggcaccgagtggaagctgccacagatgatgtggaatggtacttggaattttattgtaaacctgaggattattttgctaaaaaatacaataccaatcctgttcattcagaggtcctagaggccatgcagacagtgaaacaagggaaagctttggatttgggttgtggtcaggggcgtaattctctttttctagcccagcaagattttgatgtgacggctgtagatcaaaatggactagctcttgaaatcttgcaaagcattgtggagcaggaagatttggacatgcctgttggcctttacgatatcaattcagctagcattgaacaagaatatgattttatcgtttcaacagttgttctcatgtttctacaagcggaccgcattccagctattattcaaaatatgcaggagaaaaccagtgttggtggttacaaccttatcgtttgtgccatggacacggaggattatccttgctcggttaacttcccattcacctttaaagaaggagaactggcagactattacaaggattgggaattggttaagtacaatgaaaatccaggccatttgcaccgtcgcgatgagaatggcaatcgtattcaactacgctttgcgaccttactagctaagaaaatcaagtaa

SEQ ID NO: 1969 - protein, 286 aa, Streptococcus pneumoniae TIGR4
MEKLVAYKRMPLWNKQTMPEAVQQKHNTKVGTWGKITVLKGALKFIELTEEGEVLAEHLFEAGADNPMAQPQAWHRVEAATDDVEWYLEFYCKPEDYFAKKYNTNPVHSEVLEAMQTVKQGKALDLGCGQGRNSLFLAQQDFDVTAVDQNGLALEILQSIVEQEDLDMPVGLYDINSASIEQEYDFIVSTVVLMFLQADRIPAIIQNMQEKTSVGGYNLIVCAMDTEDYPCSVNFPFTFKEGELADYYKDWELVKYNENPGHLHRRDENGNRIQLRFATLLAKKIK

SEQ ID NO: 1970 - DNA, 867 bp, Streptococcus pneumoniae R6
  CDS (1)..(867): transl_table=11
ttgaaaatggaaaaattagttgcctataaacgcatgcctttgtggaataaacaaacaatgcctgaagctgttcagcaaaagcacaatacaaaagttgggacttgggggaaaattactgtcttgaagggagctctcaagtttattgaattgacagaagaaggggaagttctagctgaacacctctttgaagcaggggcagacaatccaatggcccaacctcaagcctggcaccgagtggaagctgccacagatgatgtggaatggtacttggaattttattgtaaacctgaggattattttgctaaaaaatacaataccaatcctgttcattcagaggtcctagaggccatgcagacagtgaaacaagggaaagctttggatttgggttgtggtcaggggcgtaattctctttttctagcccagcaagattttgatgtgacggctgtagatcaaaatggactagctcttgaaatcttgcaaagcattgtggagcaggaagatttggacatgcctgttggcctttacgatatcaattcagctagcattgaacaagaatatgattttatcgtttcaacagttgttctcatgtttctacaagcggaccgcattccagctattattcaaaatatgcaggagaaaaccagtgttggtggttacaaccttatcgtttgtgccatggacacggaggattatccttgctcggttaacttcccattcacctttaaagaaggagaactggcagactattacaaggattgggaattggttaagtacaatgaaaatccaggccatttgcaccgtcgcgatgagaatggcaatcgtattcaactacgctttgcgaccttactagctaagaaaatcaagtaa

SEQ ID NO: 1971 - protein, 288 aa, Streptococcus pneumoniae R6
MKMEKLVAYKRMPLWNKQTMPEAVQQKHNTKVGTWGKITVLKGALKFIELTEEGEVLAEHLFEAGADNPMAQPQAWHRVEAATDDVEWYLEFYCKPEDYFAKKYNTNPVHSEVLEAMQTVKQGKALDLGCGQGRNSLFLAQQDFDVTAVDQNGLALEILQSIVEQEDLDMPVGLYDINSASIEQEYDFIVSTVVLMFLQADRIPAIIQNMQEKTSVGGYNLIVCAMDTEDYPCSVNFPFTFKEGELADYYKDWELVKYNENPGHLHRRDENGNRIQLRFATLLAKKIK

SEQ ID NO: 1972 - DNA, 597 bp, Salmonella typhimurium LT2
  CDS (1)..(597): transl_table=11
atgaccgttcgtgacgaaaattactttactgagaaatacggtttaacccgcacgcattcggatgtgctggcggcggcaaaggttgtcgcgccaggccgaacgctggatttaggatgtggcaatggccgtaatagtctgtatctggccgcgaacggttatgacgttaccgcgtgggataaaaatccggccagtatggctaaccttgagcgtattaaagcggcagaagggctggataatctgcaaaccgaccttgtcgatctgaatacattgacctttgacggcgaatacgattttattctctcgacggtggttatgatgtttcttgaggcgcaaaccattcccggtttaattgccaatatgcaacgctgcacaaaacccggcgggtataatttgattgttgcggcaatggatacgccggactttccctgtacggtgggattcccgttcgcttttaaagaaggcgaattacgccgctattacgaaggatgggacatgctgaaatacaacgaagatgtcggcgagcttcaccgcacggacgaaaatggcaaccgtatcaaactgcgctttgctacgatgctggcgagaaaaacggcctga

SEQ ID NO: 1973 - protein, 198 aa, Salmonella typhimurium LT2
MTVRDENYFTEKYGLTRTHSDVLAAAKVVAPGRTLDLGCGNGRNSLYLAANGYDVTAWDKNPASMANLERIKAAEGLDNLQTDLVDLNTLTFDGEYDFILSTVVMMFLEAQTIPGLIANMQRCTKPGGYNLIVAAMDTPDFPCTVGFPFAFKEGELRRYYEGWDMLKYNEDVGELHRTDENGNRIKLRFATMLARKTA

SEQ ID NO: 1974 - DNA, 888 bp, Yersinia pestis KIM
  CDS (1)..(888): transl_table=11
atggaaaacacctctgcacagctagcacccacactgctatgttacaagaaactccctgtctggaaccgtgatggcgtaccggcaatgtttcaggaaaagcacaatacgaaagcgggcacgtgggcaaaactgaccattttggctggagagatggatttcttaattcttgatgaagccggtaataccgtggaaaagcaccagttctcctgcgaacagcaaccaccatttatcgagccacaagtctggcatcgcattgctacctgctcagatgatctgcaatgtcagctcagtttctactgccagccagaagatttttaccataaaaaatataatttaaccccgacccattctgaagtcattgaagcggtaaaaacagttaagccggggaaggcgctggacttggggtgtggctctggacgcaactcgctgtacctgaacctattgggtttcgatgttactgctgtagataaaaataacgacagcattggtaatttacagcagatcattgataaggaagccctgaaagggattactgccagcagctataatattaatgaggccagtctggatgagcgctacgattttattctatcaaccgtggtcttgatgttcctgcaaccagaaagaatcccacatattatcagtaatatgcaggagtgtactttacccggcggctataacctgattatctccgcaatgtcgaccgatgacttcccttgcaccgtacctttctctttcacattccagtctggtgagttaaaagattattatcaggattgggcgatcctcaagtacaacgaggatgtcgggcaacttcacaagaccgatgcacaaggtaaccggataaaactacgttttgcgactttattggcaaaaaaaatctcataa

SEQ ID NO: 1975 - protein, 295 aa, Yersinia pestis KIM
MENTSAQLAPTLLCYKKLPVWNRDGVPAMFQEKHNTKAGTWAKLTILAGEMDFLILDEAGNTVEKHQFSCEQQPPFIEPQVWHRIATCSDDLQCQLSFYCQPEDFYHKKYNLTPTHSEVIEAVKTVKPGKALDLGCGSGRNSLYLNLLGFDVTAVDKNNDSIGNLQQIIDKEALKGITASSYNINEASLDERYDFILSTVVLMFLQPERIPHIISNMQECTLPGGYNLIISAMSTDDFPCTVPFSFTFQSGELKDYYQDWAILKYNEDVGQLHKTDAQGNRIKLRFATLLAKKIS

SEQ ID NO: 1976 - DNA, 594 bp, Shigella flexneri 2a str. 301
  CDS (1)..(594): transl_table=11
atgaacattcgtgacgaaaactattttactgataaatatgaattaacccgcacacactctgaagtactggaagcggtgaaagtggttaaaccgggtaaaacgctggatctgggctgtggcaatggtcgtaacagtctttacctggcagccaatggttatgatgttgacgcatgggataaaaatgccatgagtatcgccaacgtcgagcgcattaaatccattgaaaatctggataatttacacacccgggtcgttgatctgaataacctcacatttgatggacagtacgattttattctttcgactgtggtgctgatgttccttgaggctaaaaccatcccagggttgattgccaatatgcaacgttgcactaaacctggtggttacaacctgattgtggcggcgatggataccgctgattatccatgtaccgtcggcttcacgtttgccttcaaagagggagaattacgtcgatattacgaaggctgggagagggtgaaatacaatgaagacgtcggcgagctgcaccgcaccgacgccaacggtaatcgtattaaactgcgtttcgccacgatgctggcacgtaaaaaatga

SEQ ID NO: 1977 - protein, 197 aa, Shigella flexneri 2a str. 301
MNIRDENYFTDKYELTRTHSEVLEAVKVVKPGKTLDLGCGNGRNSLYLAANGYDVDAWDKNAMSIANVERIKSIENLDNLHTRVVDLNNLTFDGQYDFILSTVVLMFLEAKTIPGLIANMQRCTKPGGYNLIVAAMDTADYPCTVGFTFAFKEGELRRYYEGWERVKYNEDVGELHRTDANGNRIKLRFATMLARKK

SEQ ID NO: 1978 - DNA, 882 bp, Streptococcus mutans UA159
  CDS (1)..(882): transl_table=11
atgatgcctaacagaaatacaaatatgctgctggcttataaacgtcttcctaattggactgccaatagcatcccagaaacacttttaaacccgcacaacactaaagtcggaacttgggaacagttaactgtcctttctggaaagcttgatgtttatttttttgataaagatgatcatgttttagaaaagctgacttttgataaggattcccaaatgccttttattcaacctcaagtttgctataaaattgaacctgcttctaatgatttggaatgtcaccttaccctttactgtcaaaagggagattattttaacaaaaaatatgggatgaccaagacacattcagaagtccttttctcggcaccttatttaaaagaaaacagtaaaatactagaccttggatccggtcaaggacgtaattccctctatttgaccatgttaggacatgatgtcacttctgttgataccaatgaacaaagtcttattcatctgaaaaatatagccaatgaagaaaatctaccaagcaagattaactggtatgatatcaatacagcaaatttgcaagagacctatgattttattctatcaacagtggtttttatgttcttaaatagaccagttgtaccagatattatcaaagatatgcaaaaacatactgctattggcggctataatcttatcgtttgcgctatggataccaaatcctatccttgtcccattccttttccttttacctttaagaagggggaacttaaagattattataaagaatggtatctgattaaatataatgaagatttggggcagcttcataaaaccgatgccaatggcaatcgcctgcaaatgcaatttgctaccttgttggccaaaaaggtgaaataa

SEQ ID NO: 1979 - protein, 293 aa, Streptococcus mutans UA159
MMPNRNTNMLLAYKRLPNWTANSIPETLLNPHNTKVGTWEQLTVLSGKLDVYFFDKDDHVLEKLTFDKDSQMPFIQPQVCYKIEPASNDLECHLTLYCQKGDYFNKKYGMTKTHSEVLFSAPYLKENSKILDLGSGQGRNSLYLTMLGHDVTSVDTNEQSLIHLKNIANEENLPSKINWYDINTANLQETYDFILSTVVFMFLNRPVVPDIIKDMQKHTAIGGYNLIVCAMDTKSYPCPIPFPFTFKKGELKDYYKEWYLIKYNEDLGQLHKTDANGNRLQMQFATLLAKKVK

SEQ ID NO: 1980 - DNA, 876 bp, Streptococcus agalactiae NEM316
  CDS (1)..(876): transl_table=11
atggttaatacaaaaacacttctcccctacaaaactatgccggtttggactgcacagtctattccaaaggcatttttagaaaagcataatactaaggaaggcacctgggcaaaactaaccattctaagtggttctttagtattttaccagttatctcctgatggagaggaaatctcgcggcatatttttgatgctagtagtgatattccttttgttgatccacaagtctggcataaagtttcgccgaatagtccagacttaagttgctatctaactttttactgccaaaaagaagattacttccataaaaaatatggtctcacgcgcacacattctgaggttatcgccagtgcacctctcttatctgagaagagtaatatattagaccttgggtgtggtcaagggcgaaactcactttatttatcgctgctgggacatcaagtgacttctgtcgattcaaacggacagagccttgtagctttagaaaatatggcattagaagaagagcttccttacaatataaaaaggtatgatattaatactgctgctattgaagggcactatgattttattttatcaactgtggtatttatatttttaaatcccgactgcatttctgatattattttacaaatgcaatcacatactcagattggaggatacaatcttatcgtttctgctatggataccgctgaaaatccttgcccgcttccattcccttttaccttcaaagaaggacaattgaaatcttattacaatgactgggaaatcatcaaatataatgaaaatttaggtgaattgcacagggtggatgaaaacggtaatcgcttaaaattacagtttgcgactttattagctcgaaaattaagatcataa

SEQ ID NO: 1981 - protein, 291 aa, Streptococcus agalactiae NEM316
MVNTKTLLPYKTMPVWTAQSIPKAFLEKHNTKEGTWAKLTILSGSLVFYQLSPDGEEISRHIFDASSDIPFVDPQVWHKVSPNSPDLSCYLTFYCQKEDYFHKKYGLTRTHSEVIASAPLLSEKSNILDLGCGQGRNSLYLSLLGHQVTSVDSNGQSLVALENMALEEELPYNIKRYDINTAAIEGHYDFILSTVVFIFLNPDCISDIILQMQSHTQIGGYNLIVSAMDTAENPCPLPFPFTFKEGQLKSYYNDWEIIKYNENLGELHRVDENGNRLKLQFATLLARKLRS

SEQ ID NO: 1982 - DNA, 594 bp, Escherichia coli CFT073
  CDS (1)..(594): transl_table=11
atgatcattcgtgatgaaaactattttactgataaatatgaattaacccgcacacactctgaagtgctggaagcggtgaaagtggttaaaccgggtaaaacgctggatctgggctgtggcaatggtcgtaacagtctttacctggcagccaatggttatgatgttgacgcatgggataaaaatgccatgagtatcgccaacgtcgagcgcattaagtccattgaaaatctggataatttacacacccgggtcgttgatctgaataacctcacatttgatggacagtacgattttattctttcgactgtggtgctgatgttccttgaggctaaaaccatcccagggctgattgccaatatgcaacgttgcactaaacctggcggttacaacctgattgtggcggcgatggataccgctgattatccatgtaccgtcggcttcccgtttgccttcaaagagggggaattacgtcgatattacgaaggctgggagagggtgaaatacaatgaagacgtcggcgagctgcaccgcaccgacgccaacggtaatcgtattaaactgcgtttcgccacgatgctggcacgtaaaaaatga

SEQ ID NO: 1983 - protein, 197 aa, Escherichia coli CFT073
MIIRDENYFTDKYELTRTHSEVLEAVKVVKPGKTLDLGCGNGRNSLYLAANGYDVDAWDKNAMSIANVERIKSIENLDNLHTRVVDLNNLTFDGQYDFILSTVVLMFLEAKTIPGLIANMQRCTKPGGYNLIVAAMDTADYPCTVGFPFAFKEGELRRYYEGWERVKYNEDVGELHRTDANGNRIKLRFATMLARKK

SEQ ID NO: 1984 - DNA, 597 bp, Salmonella enterica subsp. enterica serovar Typhi Ty2
  CDS (1)..(597): transl_table=11
atgaccgttcgtgacgaaaattactttactgagaaatacggtttaacccgcacgcattcggatgtgctggcggcggcaaaggttgtcgcgccaggccgaacgctggatttgggatgtggcaatggccgtaatagtctgtatctggccgcgaacggttatgacgttaccgcgtgggataaaaatccggccagtatggctaaccttgagcgtattaaagcggcagaagggctggataatctgcaaaccgaccttgtcgatctgaatacattgacctttgacggcgaatacgattttattctctcgacagtggttatgatgtttcttgaggcgcaaaccattcccggtttaattgccaatatgcaacgctgcacaaaacccggcgggtataatttgattgttgcggcaatggatacgccgggctttccctgtacggtgggattcccgttcgcttttaaagaaggcgaattacgccgctattacgaaggatgggacatgctgaaatacaacgaagatgtcggcgagcttcaccgcacggacgaaaacggcaaccgtatcaaactgcgctttgctacgatgctggcgagaaaaacggcctga

SEQ ID NO: 1985 - protein, 198 aa, Salmonella enterica subsp. enterica serovar Typhi Ty2
MTVRDENYFTEKYGLTRTHSDVLAAAKVVAPGRTLDLGCGNGRNSLYLAANGYDVTAWDKNPASMANLERIKAAEGLDNLQTDLVDLNTLTFDGEYDFILSTVVMMFLEAQTIPGLIANMQRCTKPGGYNLIVAAMDTPGFPCTVGFPFAFKEGELRRYYEGWDMLKYNEDVGELHRTDENGNRIKLRFATMLARKTA

SEQ ID NO: 1986 - DNA, 594 bp, Shigella flexneri 2a str. 2457T
  CDS (1)..(594): transl_table=11
atgatcattcgtgacgaaaactattttactgataaatatgaattaacccgcacacactctgaagtactggaagcggtgaaagtggttaaaccgggtaaaacgctggatctgggctgtggcaatggtcgtaacagtctttacctggcagccaatggttatgatgttgacgcatgggataaaaatgccatgagtatcgccaacgtcgagcgcattaaatccattgaaaatctggataatttacacacccgggtcgttgatctgaataacctcacatttgatggacagtacgattttattctttcgactgtggtgctgatgttccttgaggctaaaaccatcccagggttgattgccaatatgcaacgttgcactaaacctggtggttacaacctgattgtggcggcgatggataccgctgattatccatgtaccgtcggcttcacgtttgccttcaaagagggagaattacgtcgatattacgaaggctgggagagggtgaaatacaatgaagacgtcggcgagctgcaccgcaccgacgccaacggtaatcgtattaaactgcgtttcgccacgatgctggcacgtaaaaaatga

SEQ ID NO: 1987 - protein, 197 aa, Shigella flexneri 2a str. 2457T
MIIRDENYFTDKYELTRTHSEVLEAVKVVKPGKTLDLGCGNGRNSLYLAANGYDVDAWDKNAMSIANVERIKSIENLDNLHTRVVDLNNLTFDGQYDFILSTVVLMFLEAKTIPGLIANMQRCTKPGGYNLIVAAMDTADYPCTVGFTFAFKEGELRRYYEGWERVKYNEDVGELHRTDANGNRIKLRFATMLARKK

SEQ ID NO: 1988 - DNA, 858 bp, Photorhabdus luminescens subsp. laumondii TTO1
  CDS (1)..(858): transl_table=11
atgagtgacctcatttgttataaacgaatacccatctggcagaaaaatacccttcctgaaatgttcactgaaaggcataacacaaaagaggggacttatgcttgtcttgagatctttgaaggtgaactggaatttgtgattttcgatggtgatcaggaagaaactgcatattttaatgtacaaaagcagcctcccattattcagccacagatttggcataaaattaaatgggtaagtgatgatattaaatgccagctctcttttttatgtgaaccacaatatctgttttataaacaaaataatttgtcattacctcactctgaaattatatatttggcaaatattatttctccttgtaagacattagatctgggggccggtcatggccggaatactttctatctggcagaaagaggttatgacgttacagccgtggatattagtcagcaatgtattaacacaattaatgttattaaagaaaaacagcaatttaaaaatatccgtacggctgtttatgatatcaactctcacaatatcaccgaaaaatatgatttaattatttcaactgtggtactgatgtttctacaacgggaaaaaatcaccgatattatttacaatatgcaaaaacagacgaataaaggtggtattaatctgattgtttgcccgattgaaacagattttgcaccatattcattattgccattcaaaagtttcctcatgccaggtgaattggagaattattattctgactgggaaatcattaaatataatgaaaaccctggtcatcttcataaaacagatgaaaatggtaatagaataaaattaaattttgctacgcttctcgccagaaagcgatga

SEQ ID NO: 1989 - protein, 285 aa, Photorhabdus luminescens subsp. laumondii TTO1
MSDLICYKRIPIWQKNTLPEMFTERHNTKEGTYACLEIFEGELEFVIFDGDQEETAYFNVQKQPPIIQPQIWHKIKWVSDDIKCQLSFLCEPQYLFYKQNNLSLPHSEIIYLANIISPCKTLDLGAGHGRNTFYLAERGYDVTAVDISQQCINTINVIKEKQQFKNIRTAVYDINSHNITEKYDLIISTVVLMFLQREKITDIIYNMQKQTNKGGINLIVCPIETDFAPYSLLPFKSFLMPGELENYYSDWEIIKYNENPGHLHKTDENGNRIKLNFATLLARKR

SEQ ID NO: 1990 - DNA, 861 bp, Erwinia carotovora subsp. atroseptica SCRI1043
  CDS (1)..(861): transl_table=11
atgcaagatctcatttgttataagaagatgccacagtggaacagccagacgctacctgccgcgtttcaggaaaagcacaacacacaagaaggcacttgggcaaaactgaccgtgttgaaaggggaaatgaccttttccatgctgaccgaagatggcgatacgctggagacgttccacttctctgagcaaaatcagccgccgtttgtggagccgcaggcgtggcatcgcatcgtctcgttctctgacgatctggaatgtcagcttagctttttctgttcggcggaagatttctaccataaaaaatacggtctgacgcaaacccattccgaagtgatcaacgcagtacagcacattaagccgggcaaaacgctggatttaggctgcggtggcgggcgcaactcgctgtatctaaacctgcgcgggtttgacgtaactgcctgtgacaagcacgagcaaagcattgattcgctgaataacatcatccagagcgaagcactggaaaacatccgggcgggcgtttacaacatcaatctggcagaaatcaaagagcagtacgatttcatcctgtcgaccgttgtgctgatgttcctagaacgtgaccgtattccgcacatcatcagtaatatgcaaggcagcaccgttgacggtggctataaccttattatcgcagcgatgtcgacggaagattgtccgtgcccgatgcccttctcgtttacctttaaagaagacgagttgaagaactattacgccgattgggagatcctcaaatataacgaggatatgggcgaactacacaagacagatgcacagggtaatcgcatcaagctgcgtttcgctacgctgctggcaagaaagccctaa

SEQ ID NO: 1991 - protein, 286 aa, Erwinia carotovora subsp. atroseptica SCRI1043
MQDLICYKKMPQWNSQTLPAAFQEKHNTQEGTWAKLTVLKGEMTFSMLTEDGDTLETFHFSEQNQPPFVEPQAWHRIVSFSDDLECQLSFFCSAEDFYHKKYGLTQTHSEVINAVQHIKPGKTLDLGCGGGRNSLYLNLRGFDVTACDKHEQSIDSLNNIIQSEALENIRAGVYNINLAEIKEQYDFILSTVVLMFLERDRIPHIISNMQGSTVDGGYNLIIAAMSTEDCPCPMPFSFTFKEDELKNYYADWEILKYNEDMGELHKTDAQGNRIKLRFATLLARKP

SEQ ID NO: 1992 - DNA, 864 bp, Mannheimia succiniciproducens MBEL55E
  CDS (1)..(864): transl_table=11
atgaaatccgagcttatttgctataaaaaaatgcctgtgtggaacaaaaattcactgccgaaaatgtttcaggaaaaacacaataccaaagcaggcacttggggaaaattaacggttttacaaggtaaattaaaattctatacgctgaatgaagacggctctatagtaaacgaacatattttctccgctaatacggataccccttttgttgagccgcaacaatggcacaaagttgaagcgctttccgacgatttagaatgctatttggaattttattgcacaaaagaagattatttcggcaaaaaatataatatgacggcaacccacagcgatgtactgaaaaccgctaaaataattacaccctgtaaagtgctggatttaggttgcggtcacggacgaaattcgctttatttggcactgaaaggctatgatgtgacatcttgggatcataatgcagccagtattgcctttttagccgatagcgccgcgaaagaaaatctgcaaattcagaccgcagtttacgatataaacaatgcaaatattcaagaaaattatgatcttattctctctacggtggtatttatgtttttagaccgggaagccgtaccagcgattattgataatatgcaaaaacacacgaatgcgggtggttataatttaattgttgcggcgatgtccactgaggatatgccttgcccgattcctttcgcttttacttttggcgaaaacgaattgaaaaattattatcagggctgggagtttgtggaatataacgaaaacataggtgaattacacaaaaccgataaaaacggcaatcgttataaaatgaagtttgtgaccatgttggcgaagaaagttaaataa

SEQ ID NO: 1993 - protein, 287 aa, Mannheimia succiniciproducens MBEL55E
MKSELICYKKMPVWNKNSLPKMFQEKHNTKAGTWGKLTVLQGKLKFYTLNEDGSIVNEHIFSANTDTPFVEPQQWHKVEALSDDLECYLEFYCTKEDYFGKKYNMTATHSDVLKTAKIITPCKVLDLGCGHGRNSLYLALKGYDVTSWDHNAASIAFLADSAAKENLQIQTAVYDINNANIQENYDLILSTVVFMFLDREAVPAIIDNMQKHTNAGGYNLIVAAMSTEDMPCPIPFAFTFGENELKNYYQGWEFVEYNENIGELHKTDKNGNRYKMKFVTMLAKKVK

SEQ ID NO: 1994 - DNA, 870 bp, Neisseria gonorrhoeae FA 1090
  CDS (1)..(870): transl_table=11
atgaaggagcggatagtgggtcaaagtggcgagttgttttgtttcggacaaatgcctgtatggaaagtggaaaacctgccggaagttttattgtcgggttattcgtccgaggaaggggaatgggtctgcctgaatgtgttgcagggcgatgtcgaagtccgtgcaccggacggggcggcagaggtttggtcggcggaaagcggcgattgcgtgtttgcgccgcagcaggtgttttcggtcaaaccgaaaacggacgatgccgaaatccgtttgtcgctgtattgcgcggcggcagactattttcacaaaaaatacgggatgagtgccacgcattctgcggtcgcggcggcacaggataccgtaccggcgggcagggcgttggatatgggctgcggacaggggcgcaacgcgctgttcctgggtttgaaggggtttgatgtaaccgctgccgattgcaatcccgccgcgttggcaaacgtggcggaactggcagaggcggagggtttgaacgtccgcacgctggaatatgatttgaacgccgccgcccttcagggcgagtttgattatattgtggcaacggtggtgctgatgttcctgatgccgcagcgcgtgcccgacgtgattgccgatatgcaggcgcatacggcggcgggcgggtacaacttaatcgtatcggcaatggatacggcggatttcccctgcccgatgccgttccccttcaaatttaaagagggcgagctgaaggattattatcgggattgggagctggtcgaatataaagaagaattgggcgcgatgcacgccaaagacgaaaacggcaacccgatacggtttaaatttgtaactatgctggcgaaaaaaccaggataa

SEQ ID NO: 1995 - protein, 289 aa, Neisseria gonorrhoeae FA 1090
MKERIVGQSGELFCFGQMPVWKVENLPEVLLSGYSSEEGEWVCLNVLQGDVEVRAPDGAAEVWSAESGDCVFAPQQVFSVKPKTDDAEIRLSLYCAAADYFHKKYGMSATHSAVAAAQDTVPAGRALDMGCGQGRNALFLGLKGFDVTAADCNPAALANVAELAEAEGLNVRTLEYDLNAAALQGEFDYIVATVVLMFLMPQRVPDVIADMQAHTAAGGYNLIVSAMDTADFPCPMPFPFKFKEGELKDYYRDWELVEYKEELGAMHAKDENGNPIRFKFVTMLAKKPG

SEQ ID NO: 1996 - DNA, 861 bp, Haemophilus influenzae 86-028NP
  CDS (1)..(861): transl_table=11
atgaaaaacgaattaatctgctataaacaaatgccagtgtggacaaaagacaaattgccacaaatgttccaagaaaagcacaacacaaaagtcggcacttggggaaaattaaccgtattaaaaggtaagcttaaattttatgagctaacagaaaatggcgatgttattgccgagcatatttttaccccagaaagccacattccttttgttgaacctcaagcatggcatcgtgttgaagctctttctgatgacctagaatgtaccctaggtttctattgcaaaaaagaagattatttcagtaaaaaatacaacatgactgccattcacggcgatgtggtggatgcagcaaaaattatctcgccttgtaaagtattagatttaggttgcggacaagggcgtaattcactttatttaagtttattaggctatgatgtaacctcttgggatcacaatgaaaacagcattgcctttttaaatgaaaccaaagagaaagaaaaccttaatatttctaccgcactttacgacattaacgccgccaacattcaagaaaactatgattttattgtttcaacggtggtgtttatgttcttaaatcgtgaacgtgtgccgtcaatcatcaaaaatatgcaagaacataccaatgttggcggatataatttaatcgttgccgcaatgtccacagatgatgtgccttgcccacttccattctcattcacttttgctgaaaacgaattgaaagaatattacaaagattgggaattcttagaatataacgaaaatatgggcgaattacacaaaaccgatgaaaacggcaatcgcattaaaatgaaatttgccaccatgttagcgagaaagaaataa

SEQ ID NO: 1997 - protein, 286 aa, Haemophilus influenzae 86-028NP
MKNELICYKQMPVWTKDKLPQMFQEKHNTKVGTWGKLTVLKGKLKFYELTENGDVIAEHIFTPESHIPFVEPQAWHRVEALSDDLECTLGFYCKKEDYFSKKYNMTAIHGDVVDAAKIISPCKVLDLGCGQGRNSLYLSLLGYDVTSWDHNENSIAFLNETKEKENLNISTALYDINAANIQENYDFIVSTVVFMFLNRERVPSIIKNMQEHTNVGGYNLIVAAMSTDDVPCPLPFSFTFAENELKEYYKDWEFLEYNENMGELHKTDENGNRIKMKFATMLARKK

SEQ ID NO: 1998 - DNA, 567 bp, Colwellia psychrerythraea 34H
  CDS (1)..(567): transl_table=11
atggtagttgatctaaatagccgttacggtttaagccctacacacagtgaagtggtagaagcgtgtaaaattattgagccgtgcgatgccttagatatgggttgttcaaatgggcgaaatgctgttcacctaggccaacttggatttaatgtaaccgccatagatgctaatcctggtgccattaatatgctacaaagcattattgatgaagagaaaatgaacaatattaaggcgcaagcatacgacattaacaatgcgaaccttggcgaggactatggttttattagctgtaccgtaacgttaatgtttatggacccaactcgtgttgataacattcttgccgatatgcaaaagcgtactctggcaggtggttataacttaattgtttgcgccatgagtactgaagaacacccatgccctgttggtttcccatttaccctaaaaacagatcagttacgtgaaacttatgaaggatgggagctgattaagtacaatgaagatgttggtactatgcacaatggcgcaaaattgcagtttgcgactatattggcgcgtaaacctttctaa

SEQ ID NO: 1999 - protein, 188 aa, Colwellia psychrerythraea 34H
MVVDLNSRYGLSPTHSEVVEACKIIEPCDALDMGCSNGRNAVHLGQLGFNVTAIDANPGAINMLQSIIDEEKMNNIKAQAYDINNANLGEDYGFISCTVTLMFMDPTRVDNILADMQKRTLAGGYNLIVCAMSTEEHPCPVGFPFTLKTDQLRETYEGWELIKYNEDVGTMHNGAKLQFATILARKPF

SEQ ID NO: 2000 - DNA, 876 bp, Streptococcus agalactiae A909
  CDS (1)..(876): transl_table=11
atggttaatacaaaaacacttctcccctacaaaactatgccggtttggactgcacagtctattccaaaggcatttttagaaaagcataatactaaggaaggcacctgggcaaaactaaccattctaagtggttctttagtattttaccagttatctcctgatggagaggaaatctcgcggcatatttttgatgctagtagtgatattccttttgttgatccacaagtctggcataaagtttcgccgaatagtccagacttaagttgctatctaactttttactgccaaaaagaagattacttccataaaaaatatggtctcacgcgcacacattctgaggttatcgccagtgcacctctcttatctgagaagagtaatatattagaccttgggtgtggtcaagggcgaaactcactttatttatcgctgctgggacatcaagtgacttctgtcgattcaaacggacagagccttgtagctttagaaaatatggcattagaagaagagcttccttacaatataaaaaggtatgatattaatactgctgctattgaagggcactatgattttattttatcaactgtggtatttatgtttttaaatcccgactgcatttctgatattattttacaaatgcaatcacatactcagattggaggatacaatcttatcgtttctgctatggataccgctgaaaatccttgcccgcttccattcccttttaccttcaaagaaggacaattgaaatcttattacaatgactgggaaatcatcaaatataatgaaaatttaggtgaattgcacagggtggatgaaaacggtaatcgcttaaaattacagtttgcgactttattagctcgaaaattaagatcataa

SEQ ID NO: 2001 - protein, 291 aa, Streptococcus agalactiae A909
MVNTKTLLPYKTMPVWTAQSIPKAFLEKHNTKEGTWAKLTILSGSLVFYQLSPDGEEISRHIFDASSDIPFVDPQVWHKVSPNSPDLSCYLTFYCQKEDYFHKKYGLTRTHSEVIASAPLLSEKSNILDLGCGQGRNSLYLSLLGHQVTSVDSNGQSLVALENMALEEELPYNIKRYDINTAAIEGHYDFILSTVVFMFLNPDCISDIILQMQSHTQIGGYNLIVSAMDTAENPCPLPFPFTFKEGQLKSYYNDWEIIKYNENLGELHRVDENGNRLKLQFATLLARKLRS

SEQ ID NO: 2002 - DNA, 861 bp, Haemophilus influenzae R2846
  CDS (1)..(861): transl_table=11
atgaaaaacgaattaatttgctataaacaaatgccagtgtggacaaaagacaaattgccacaaatgttccaagaaaagcacaacacaaaagtcggcacttggggaaaattaactgtattaaaaggtaagctcaaattttatgagctaaccgaaaatggcgatatcattgccaaacatatttttacgccagaaagcgacattccttttgttgaacctcaagcatggcatcgtgttgaagcgctttctgatgatttagaatgtaccctaggtttctattgcaaaaaagaagattacttcagtaaaaaatacaacatgacagccactcacggcgatgtggtggatgcagcaaaaattatctcgccttgtaaagtattagatttaggttgtggacaagggcgtaattcactttatttaagtttattgggttatgatgtgacctcttgggatcacaatgaaaacagcattgcctttttaaatgaaaccaaagagaaagaaaaccttaatatttctaccgcactttacgacattaactctgccaacattcaagaaaactatgattttattgtttcaacggtggtgtttatgttcttaaatcgtgaacgtgtgccgtcaatcattaaaaatatgcaagaacataccaatgttggcgggtataacttaatcgttgccgccatctccactgatgatgtgccttgcccacttccgttctctttcacttttgctgaaaacgaattgaaagaatattacaaagattgggaatttttagaatataacgaaaatatgggcgaattacataaaaccgatgaaaacggcaatcgcattaaaatgaaatttgctacgatgttagcgagaaagaaataa

SEQ ID NO: 2003 - protein, 286 aa, Haemophilus influenzae R2846
MKNELICYKQMPVWTKDKLPQMFQEKHNTKVGTWGKLTVLKGKLKFYELTENGDIIAKHIFTPESDIPFVEPQAWHRVEALSDDLECTLGFYCKKEDYFSKKYNMTATHGDVVDAAKIISPCKVLDLGCGQGRNSLYLSLLGYDVTSWDHNENSIAFLNETKEKENLNISTALYDINSANIQENYDFIVSTVVFMFLNRERVPSIIKNMQEHTNVGGYNLIVAAISTDDVPCPLPFSFTFAENELKEYYKDWEFLEYNENMGELHKTDENGNRIKMKFATMLARKK

SEQ ID NO: 2004 - DNA, 861 bp, Haemophilus influenzae R2866
  CDS (1)..(861): transl_table=11
atgaaaaacgaattaatttgctataaacaaatgccagtgtggacaaaagacaacttgccacaaatgttccaagaaaagcacaatacaaaagtcggcacttggggaaaattaactgtattaaaaggcaaactcaaattttatgagctaaccgaaaatggcgatgttattgccgagcatatttttaccccagaaagcgagattccttttgtcgaacctcaagcatggcatcgtgtagaagcactttctgatgatttagaatgtaccctaggtttctattgcaaaaaagaagattatttcagtaaaaaatacaacatgactgccattcacggcgatgtggtggatgcagcaaaaattatctcgccttgtaaagtattagatttaggttgcggacaagggcgtaattcactttatttaagtttattaggctatgatgtaacctcttgggatcacaatgaaaacagcattgcctttttaaatgaaaccaaagagaaagaaaaccttaatatttctaccgcactttacgacattaacgccgccaacattcaagaaaactatgattttattgtttcaacggtggtgtttatgttcttaaatcgtgaacgtgtgccgtcaatcattaaaaatatgcaagaacataccaatgttggcggatataacttaatcgttgctgcaatatccactgatgatgtgccttgcccacttccattctctttcacttttgctgaaaacgaattgaaagaatattacaaagattgggaattcttagaatataacgaaaatatgggcgaattacacaaaaccgatgaaaacggcaatcgcattaaaatgaaatttgccaccatgttagcgagaaagaaataa

SEQ ID NO: 2005 - protein, 286 aa, Haemophilus influenzae R2866
MKNELICYKQMPVWTKDNLPQMFQEKHNTKVGTWGKLTVLKGKLKFYELTENGDVIAEHIFTPESEIPFVEPQAWHRVEALSDDLECTLGFYCKKEDYFSKKYNMTAIHGDVVDAAKIISPCKVLDLGCGQGRNSLYLSLLGYDVTSWDHNENSIAFLNETKEKENLNISTALYDINAANIQENYDFIVSTVVFMFLNRERVPSIIKNMQEHTNVGGYNLIVAAISTDDVPCPLPFSFTFAENELKEYYKDWEFLEYNENMGELHKTDENGNRIKMKFATMLARKK

SEQ ID NO: 2006 - DNA, 864 bp, Eikenella corrodens
  CDS (1)..(864): transl_table=11
atgaatccagaactcatctgctacaaaaccatgccggtatgggataaagccactattccggcggcagttttgtcgcagcacaacacacaggttggcacatatggcaagctgcgcgtattgcgtgggcggctgaagttttatgaattgcaagaagatggcgtggtactcgcggaacatgtgttgcagccggaaagtgggctgtggacgatttacccgcaggcttggcataaagtggaaccactggatgatgattttgccgtgcagctggaatttcattgcgaaaaagccgactttttccacaaaaaatacggcatgactgctacccattccgccatccgcgaagcagtgcagactgtgccgccgtgtaaaacgttggatttaggctgtgggcaagggcgtaatgcgctgtttttgagcttggccggatacgatgtgcatgctgtggatcacagcccggcggcagtagcttcagtgctggatatggctgcgcgcgaacagttgccgctgcgggcagatgcttacgatattaatgctgccgctttgagtgaagattacgattttatcttctccactgtggtgtttatgtttctccaagccaaccgtgtgtcggagattattgccgatatgcaggtacatacccgatccggtggctataacctgattgtgtcggcaatggatacggcagactacccctgccatatgccgttttcgttcacatttaaagaagacgaattgcggcagtattacgccggctgggaattgctgaaatacgaagaagcggtgggttcgatgcacgctaccgatgcgcaaggtcgaccgattcaattgaagtttgtgacgatgttggcgaaaaagcccggttga

SEQ ID NO: 2007 - protein, 287 aa, Eikenella corrodens
MNPELICYKTMPVWDKATIPAAVLSQHNTQVGTYGKLRVLRGRLKFYELQEDGVVLAEHVLQPESGLWTIYPQAWHKVEPLDDDFAVQLEFHCEKADFFHKKYGMTATHSAIREAVQTVPPCKTLDLGCGQGRNALFLSLAGYDVHAVDHSPAAVASVLDMAAREQLPLRADAYDINAAALSEDYDFIFSTVVFMFLQANRVSEIIADMQVHTRSGGYNLIVSAMDTADYPCHMPFSFTFKEDELRQYYAGWELLKYEEAVGSMHATDAQGRPIQLKFVTMLAKKPG

SEQ ID NO: 2008 - DNA, 858 bp, Photorhabdus luminescens
  CDS (1)..(858): transl_table=11
atgagcgacctcatttgttataaacgaataccaatctggcagaaaaatactattcctgaaatgttcactgaaagacataacactaaagaagggacttacgcttgtcttgagatctttgaaggtgaactggaatttgtgattttcgatggtgatcaggaagaaaccgcttattttaatgtgcaaaagcagcctcccattattcagccacaggtctggcataaaattaaatgggtgagtgatgatattaagtgccagctctcttttctatgtgaaccacaatatctgttttataaacaaaataatttgtcattacctcactctgaaattagatatctggcaaatattatttctccttgtaagacattagatctgggggctggtcgtggccggaatactttctatctggcagaaagaggttatgatgttacagccgtggatattaatccacaatatattaacgcaattaatgctattaaagaaaaacagcggattaaaaatatctgtacggctgtttatgatatcaactctcacaatattatcgaaaaatatgatttaattatttcaacggtggtgctgatgtttctgcaacgggaaaagatcaccgatattatttacaatatgcagaaacagacgaataaaggtggtattaatctgattgtttgcccggttgaaacagattctgcgccatattcattattgccattcaaaagtttcctcatgtcaagtgaattggagaattattattctgactgggaaattattaaatataatgaaaatcctggtcatcttcataaaacagatgaaaatggtaatagaataaaattaaattttgctacgcttattgccagaaagcgatga

SEQ ID NO: 2009 - protein, 285 aa, Photorhabdus luminescens
MSDLICYKRIPIWQKNTIPEMFTERHNTKEGTYACLEIFEGELEFVIFDGDQEETAYFNVQKQPPIIQPQVWHKIKWVSDDIKCQLSFLCEPQYLFYKQNNLSLPHSEIRYLANIISPCKTLDLGAGRGRNTFYLAERGYDVTAVDINPQYINAINAIKEKQRIKNICTAVYDINSHNIIEKYDLIISTVVLMFLQREKITDIIYNMQKQTNKGGINLIVCPVETDSAPYSLLPFKSFLMSSELENYYSDWEIIKYNENPGHLHKTDENGNRIKLNFATLIARKR

SEQ ID NO: 2010 - DNA, 1112 bp, Streptococcus pneumoniae
  CDS (129)..(989): transl_table=11
ttcttttaggacttgccaaagggaagcatgactatgacaaacgggagtctatcaaacgtcgtgagcaaaatcgagatatcgcgcgtgtgatgaaagctgttaatcagcgataaaaagaggaattgaaaatggaaaaattagttgcctataaacgcatgcctttgtggaataaacaaacaatgcctgaagctgttcagcaaaagcacaatacaaaagttgggacttgggggaaaattactgtcttgaagggagctctcaagtttattgaattgacagaagaaggggaagttctagctgaacacctctttgaagcaggggcagacaatccaatggcccaacctcaagcctggcaccgagtggaagctgccacagatgatgtggaatggtacttggaattttattgtaaacctgaggattattttgctaaaaaatacaataccaatcctgttcattcagaggtcctagaggccatggagacagtgaaacaagggaaagctttggatttgggttgtggtcaggggcgtaattctctttttctagcccagcaagattttgatgtgacggctgtagatcaaaatggactagctcttgaaatcttgcaaagcattgtggagcaggaagatttggacatgcctgttggcctttacgatatcaattcagctagcattgaacaagaatatgattttatcgtttcaacagttgttctcatgtttctacaagcggaccgcattccagctattattcaaaatatgcaggagaaaaccagtgttggtggttacaaccttatcgtttgtgccatggacacggaggattatccttgctcggttaacttcccattcacctttaaagaaggagaactggcagactattacaaggattgggaattggttaagtacaatgaaaatccaggccatttgcaccgtcgcgatgagaatggcaatcgtattcaactacgctttgcgaccttactagctaagaaaatcaagtaaacacacatgaagattaggaattttcctgatcttttttcttttttacgaatgatatagaaaaggagggaattcatgtttgttgcgagagatgctaggggagaattggtaaatgtgttagaggat

SEQ ID NO: 2011 - protein, 286 aa, Streptococcus pneumoniae
MEKLVAYKRMPLWNKQTMPEAVQQKHNTKVGTWGKITVLKGALKFIELTEEGEVLAEHLFEAGADNPMAQPQAWHRVEAATDDVEWYLEFYCKPEDYFAKKYNTNPVHSEVLEAMETVKQGKALDLGCGQGRNSLFLAQQDFDVTAVDQNGLALEILQSIVEQEDLDMPVGLYDINSASIEQEYDFIVSTVVLMFLQADRIPAIIQNMQEKTSVGGYNLIVCAMDTEDYPCSVNFPFTFKEGELADYYKDWELVKYNENPGHLHRRDENGNRIQLRFATLLAKKIK

SEQ ID NO: 2012 - DNA, 903 bp, Eikenella corrodens
  CDS (1)..(903): transl_table=11
atggtaagtgctctttcatgtacacatgagaggagatgctatgcaatccgaactcatctgctacaaaactatgccggtatgggattaagccactattccggcagcagttttgtcgcagcacaacacacaggttggtacctacggcaagctgcgcgtattgcgcgggcggctgaagtttttgaattgcaggaagacggtacggtgctggcggagcatattttgcagccggattccggtgtgtggacgctttatccacaggctcaacacaaggtggagccgttggatgatgattttgccgtgcagctggaatttcattgcgaaaaagcagattatttccacaaaaaacacggcatgactaccacccattccgccatccgcgaggcggtgcaaaccgtggcgccgtgtaagaccttggatttgggctgtgggcaggggcacaatgcgctgtttttgagcttggccggatatgatgtgcgcgctgtggaccacagcccggcggcagtggcttcggtgctggatatggctgcacgcgaacagttgccgctgcgggcggatgcttacgatattaacgctgctgctttgaatgaagattacgattttatctttgccacggtagtgtttatattcctccaggcaggccgtgtgccggagattattgccgatatgcaggcgcatactcggcctggtggctataacttgatcgtgtcggcaatggatacagcagactacccctgtcatatgccgttttcgttcacattcaaagaagacgagctgcggcagtattatgccgactgggaattgttgaaatacgaagaagccgtgggcttgatgcacgctactgatgcgcaagggcggccgattcaattgaaatttgtgacgatgttggcgaagaagcccggctaa

SEQ ID NO: 2013 - protein, 300 aa, Eikenella corrodens
MVSALSCTHERRCYAIRTHLLQNYAGMGLSHYSGSSFVAAQHTGWYLRQAARIARAAEVFELQEDGTVLAEHILQPDSGVWTLYPQAQHKVEPLDDDFAVQLEFHCEKADYFHKKHGMTTTHSAIREAVQTVAPCKTLDLGCGQGHNALFLSLAGYDVRAVDHSPAAVASVLDMAAREQLPLRADAYDINAAALNEDYDFIFATVVFIFLQAGRVPEIIADMQAHTRPGGYNLIVSAMDTADYPCHMPFSFTFKEDELRQYYADWELLKYEEAVGLMHATDAQGRPIQLKFVTMLAKKPG

SEQ ID NO: 2014 - DNA, 26 bp, Artificial sequence
  primer
atgatcattcgtgacgaaaactattt

SEQ ID NO: 2015 - DNA, 26 bp, Artificial sequence
  primer
ttattttttacgtgccagcatcgtgg

SEQ ID NO: 2016 - protein, 190 aa, Artificial sequence
  consensus sequence
  Variant (2)..(3): Xaa in position 2 to 3 is any amino acid
  Variant (6)..(10): Xaa in position 6 to 10 is any amino acid
  Variant (13)..(13): Xaa in position 13 is any amino acid
  Variant (15)..(26): Xaa in position 15 to 26 is any amino acid
  Variant (27)..(27): Xaa in position 27 is any or no amino acid
  Variant (34)..(34): Xaa in position 34 is any amino acid
  Variant (38)..(38): Xaa in position 38 is any amino acid
  Variant (40)..(40): Xaa in position 40 is any amino acid
  Variant (42)..(44): Xaa in position 42 to 44 is any amino acid
  Variant (46)..(47): Xaa in position 46 to 47 is any amino acid
  Variant (49)..(51): Xaa in position 49 to 51 is any amino acid
  Variant (53)..(53): Xaa in position 53 is any amino acid
  Variant (55)..(67): Xaa in position 55 to 67 is any amino acid
  Variant (69)..(69): Xaa in position 69 is any amino acid
  Variant (71)..(77): Xaa in position 71 to 77 is any amino acid
  Variant (78)..(78): Xaa in position 78 is any or no amino acid
  Variant (80)..(80): Xaa in position 80 is any amino acid
  Variant (82)..(88): Xaa in position 82 to 88 is any amino acid
  Variant (91)..(91): Xaa in position 91 is any amino acid
  Variant (93)..(93): Xaa in position 93 is any amino acid
  Variant (98)..(98): Xaa in position 98 is any amino acid
  Variant (102)..(109): Xaa in position 102 to 109 is any amino acid
  Variant (111)..(112): Xaa in position 111 to 112 is any amino acid
  Variant (115)..(116): Xaa in position 115 to 116 is any amino acid
  Variant (118)..(119): Xaa in position 118 to 119 is any amino acid
  Variant (127)..(127): Xaa in position 127 is any amino acid
  Variant (130)..(130): Xaa in position 130 is any amino acid
  Variant (132)..(134): Xaa in position 132 to 134 is any amino acid
  Variant (136)..(136): Xaa in position 136 is any amino acid
  Variant (138)..(140): Xaa in position 138 to 140 is any amino acid
  Variant (142)..(142): Xaa in position 142 is any amino acid
  Variant (144)..(144): Xaa in position 144 is any amino acid
  Variant (146)..(146): Xaa in position 146 is any amino acid
  Variant (148)..(148): Xaa in position 148 is any amino acid
  Variant (151)..(152): Xaa in position 151 to 152 is any amino acid
  Variant (155)..(156): Xaa in position 155 to 156 is any amino acid
  Variant (159)..(161): Xaa in position 159 to 161 is any amino acid
  Variant (165)..(166): Xaa in position 165 to 166 is any amino acid
  Variant (168)..(169): Xaa in position 168 to 169 is any amino acid
  Variant (171)..(172): Xaa in position 171 to 172 is any amino acid
  Variant (174)..(174): Xaa in position 174 is any amino acid
  Variant (178)..(178): Xaa in position 178 is any amino acid
  Variant (180)..(182): Xaa in position 180 to 182 is any amino acid
  Variant (184)..(184): Xaa in position 184 is any amino acid
  Variant (186)..(186): Xaa in position 186 is any amino acid
  Variant (189)..(189): Xaa in position 189 is any amino acid
FXXKYXXXXXHSXVXXXXXXXXXXXXXLDLGCGXGRNXLXLXXXGXXVXXXDXNXXXXXXXXXXXXXEXLXXXXXXXXDXNXXXXXXXYDXIXSTVVXMFLXXXXXXXXIXXMQXXTXXGGYNLIVXAMXTXXXPXCXXXFXFXFXEXELXXYYXXWEXXXYNEXXGXXHXXDXNGNXIXXXFXTXLAXK

SEQ ID NO: 2017 - protein, 43 aa, Artificial sequence
  protein pattern
  Variant (3)..(3): Xaa in position 3 is Phe or Leu
  Variant (5)..(5): Xaa in position 5 is Phe, Ile, Leu or Val
  Variant (10)..(10): Xaa in position 10 is Phe, Leu or Met
  Variant (11)..(11): Xaa in position 11 is Ile or Met
  Variant (14)..(17): Xaa in position 14 to 17 is any amino acid
  Variant (18)..(18): Xaa in position 18 is Ile or Val
  Variant (19)..(19): Xaa in position 19 is Pro, Ser or Thr
  Variant (20)..(20): Xaa in position 20 is any amino acid
  Variant (21)..(21): Xaa in position 21 is Ile or Leu
  Variant (23)..(23): Xaa in position 23 is any amino acid
  Variant (24)..(24): Xaa in position 24 is Asp, Asn or Gln
  Variant (27)..(28): Xaa in position 27 to 28 is any amino acid
  Variant (30)..(31): Xaa in position 30 to 31 is any amino acid
  Variant (34)..(34): Xaa in position 34 is any amino acid
  Variant (38)..(38): Xaa in position 38 is Ile or Val
  Variant (39)..(39): Xaa in position 39 is Ala, Cys or Ser
  Variant (40)..(40): Xaa in position 40 is Ala or Pro
  Variant (41)..(41): Xaa in position 41 is Ile, Met or Val
  Variant (42)..(42): Xaa in position 42 is Asp, Glu or Ser
YDXIXSTVVXXFLXXXXXXXXIXXMQXXTXXGGXNLIXXXXXT

SEQ ID NO: 2018 - protein, 41 aa, Artificial sequence
  protein pattern
  Variant (3)..(3): Xaa in position 3 is Pro, Ser or Thr
  Variant (4)..(4): Xaa in position 4 is Ile, Leu, Met or Val
  Variant (5)..(5): Xaa in position 5 is Gly, Asn or Pro
  Variant (7)..(7): Xaa in position 7 is Ala, Pro, Ser or Thr
  Variant (9)..(9): Xaa in position 9 is any amino acid
  Variant (11)..(12): Xaa in position 11 to 12 is any amino acid
  Variant (13)..(13): Xaa in position 13 is Asp, Gly or Asn
  Variant (14)..(14): Xaa in position 14 is Glu or Gln
  Variant (16)..(17): Xaa in position 16 to 17 is any amino acid
  Variant (20)..(20): Xaa in position 20 is any amino acid
  Variant (21)..(21): Xaa in position 21 is Asp, Glu or Gly
  Variant (23)..(24): Xaa in position 23 to 24 is any amino acid
  Variant (25)..(25): Xaa in position 25 is Ile, Leu or Val
  Variant (26)..(26): Xaa in position 26 is Glu or Lys
  Variant (28)..(28): Xaa in position 28 is any amino acid
  Variant (30)..(30): Xaa in position 30 is Asp, Glu or Asn
  Variant (31)..(31): Xaa in position 31 is any amino acid
  Variant (33)..(33): Xaa in position 33 is any amino acid
  Variant (34)..(34): Xaa in position 34 is Leu or Met
  Variant (36)..(37): Xaa in position 36 to 37 is any amino acid
  Variant (39)..(39): Xaa in position 39 is any amino acid
  Variant (40)..(40): Xaa in position 40 is Asn or Gln
PCXXXFXFXFXXXXLXXYYXXWXXXXYXEXXGXXHXXDXXG

SEQ ID NO: 2019 - protein, 39 aa, Artificial sequence
  protein pattern
  Variant (2)..(3): Xaa in position 2 to 3 is any amino acid
  Variant (4)..(4): Xaa in position 4 is any or no amino acid
  Variant (6)..(13): Xaa in position 6 to 13 is any amino acid
  Variant (14)..(14): Xaa in position 14 is any or no amino acid
  Variant (17)..(17): Xaa in position 17 is Leu or Met
  Variant (20)..(20): Xaa in position 20 is Gly or Ser
  Variant (21)..(21): Xaa in position 21 is any amino acid
  Variant (25)..(25): Xaa in position 25 is Ala or Ser
  Variant (26)..(26): Xaa in position 26 is Leu or Val
  Variant (27)..(27): Xaa in position 27 is Phe, His or Tyr
  Variant (29)..(29): Xaa in position 29 is Ala, Gly, Asn or Ser
  Variant (30)..(31): Xaa in position 30 to 31 is any amino acid
  Variant (32)..(32): Xaa in position 32 is Asp or Gly
  Variant (33)..(33): Xaa in position 33 is Phe, His or Tyr
  Variant (34)..(34): Xaa in position 34 is Asp, Glu, Asn or Gln
  Variant (36)..(36): Xaa in position 36 is Asp or Thr
  Variant (37)..(37): Xaa in position 37 is Ala or Ser
  Variant (38)..(38): Xaa in position 38 is any amino acid
VXXXAXXXXXXXXXLDXGCXXGRNXXXLXXXXXXVXXXD

SEQ ID NO: 2020 - protein, 16 aa, Artificial sequence
  protein pattern
  Variant (2)..(3): Xaa in position 2 to 3 is any or no amino acid
  Variant (5)..(6): Xaa in position 5 to 6 is any amino acid
  Variant (7)..(8): Xaa in position 7 to 8 is any or no amino acid
  Variant (10)..(10): Xaa in position 10 is Ala or Val
  Variant (12)..(12): Xaa in position 12 is Leu or Met
  Variant (15)..(15): Xaa in position 15 is Lys or Arg
NXXRXXXXFXTXLAXK

SEQ ID NO: 2021 - DNA, 186 bp, Escherichia coli
  CDS (1)..(186): transl_table=11
atgctgattctgactcgtcgagttggtgagaccctcatgattggggatgaggtcaccgtgacagttttaggggtaaagggcaaccaggtacgtattggcgtaaatgccccgaaggaagtttctgttcaccgtgaagagatctaccagcgtatccaggctgaaaaatcccagcagtccagttactaa

SEQ ID NO: 2022 - protein, 61 aa, Escherichia coli
MLILTRRVGETLMIGDEVTVTVLGVKGNQVRIGVNAPKEVSVHREEIYQRIQAEKSQQSSY

SEQ ID NO: 2023 - DNA, 222 bp, Treponema pallidum subsp. pallidum str. Nichols
  CDS (1)..(222): transl_table=11
atgttgatcctttcgcgcaagacaaatcagaaaatctttattggggactcgattgaactgactattattgagattcgcggcgatcaggtaaaagtcggtgtggaagcgccgcgttcggtgaaaatattccgacaagaggtatacgaagagatccagagagagaaccgcgctgcgtccgactccccctggtctcctaactcattgcctcagttgcctgtgtag

SEQ ID NO: 2024 - protein, 73 aa, Treponema pallidum subsp. pallidum str. Nichols
MLILSRKTNQKIFIGDSIELTIIEIRGDQVKVGVEAPRSVKIFRQEVYEEIQRENRAASDSPWSPNSLPQLPV

SEQ ID NO: 2025 - DNA, 252 bp, Thermotoga maritima MSB8
  CDS (1)..(252): transl_table=11
gtgctggttctcactagaagagtaggggaaaagatcgtgattggtgaagacatagtgattactgtcctgaagatagaggggaattctgttaaaattggtatagaggcacccaaacatgtgaagattcttcgtgaggaactctacgaagaactcaagagtgagaacataaaagcttctgaagtttcaaaagatgacctgaagggggttttaaggaatgataaaggttacaaaggacctagtgcttcatcttga

SEQ ID NO: 2026 - protein, 83 aa, Thermotoga maritima MSB8
MLVLTRRVGEKIVIGEDIVITVLKIEGNSVKIGIEAPKHVKILREELYEELKSENIKASEVSKDDLKGVLRNDKGYKGPSASS

SEQ ID NO: 2027 - DNA, 198 bp, Vibrio cholerae O1 biovar eltor str. N16961
  CDS (1)..(198): transl_table=11
atgcttattttgactcgccgtgttggcgaaaccctgatgatcggtgacgaagtgaccgtgacagtattaggtgtaaaaggtaaccaagtccgtatcggtgtaaacgcaccgaaagaagtgtctgtgcaccgtgaagaaatctacatgcgcattcaagctgagaaaggtaatggtggcgttgcgtctggcaactactaa

SEQ ID NO: 2028 - protein, 65 aa, Vibrio cholerae O1 biovar eltor str. N16961
MLILTRRVGETLMIGDEVTVTVLGVKGNQVRIGVNAPKEVSVHREEIYMRIQAEKGNGGVASGNY

SEQ ID NO: 2029 - DNA, 174 bp, Buchnera aphidicola str. APS (Acyrthosiphon pisum)
  CDS (1)..(174): transl_table=11
atgcttattctaactcgtcgggtcggcgaaacattaataattggcgatgaaataactgtaacagtactaggagtaaaaggaaaccaagtacgtattggtgtaaatgcccctaaagaagtttcggtacatcgtgaagaaatatatcaacgtattcaagctgagaaaaaaaaataa

SEQ ID NO: 2030 - protein, 57 aa, Buchnera aphidicola str. APS (Acyrthosiphon pisum)
MLILTRRVGETLIIGDEITVTVLGVKGNQVRIGVNAPKEVSVHREEIYQRIQAEKKK

SEQ ID NO: 2031 - DNA, 189 bp, Pasteurella multocida subsp. multocida str. Pm70
  CDS (1)..(189): transl_table=11
atgctaatcttaacccgtaaagttggcgaaagcttactcatcggtgatgatatttctatcacgattctaaatatacgtggaaatcaggtaaaaattggaatcaaagcccctaaagacgtttctgtacatagagaggaaatttatcaacgtattaaacaagcattagaagcacctcatgtgggtgagtga

SEQ ID NO: 2032 - protein, 62 aa, Pasteurella multocida subsp. multocida str. Pm70
MLILTRKVGESLLIGDDISITILNIRGNQVKIGIKAPKDVSVHREEIYQRIKQALEAPHVGE

SEQ ID NO: 2033 - DNA, 186 bp, Pseudomonas aeruginosa PAO1
  CDS (1)..(186): transl_table=11
atgctgattctgactcgtcgggtcggagagaccctgatggtaggtgacgacgtcaccgtgacggtactgggtgtcaaagggaaccaggtgcgcatcggcgtcaacgcgccgaaggaagtcgccgtacaccgggaggaaatttaccagcgcatccagaaagagaaagatcaagagccaaaccattaa

SEQ ID NO: 2034 - protein, 61 aa, Pseudomonas aeruginosa PAO1
MLILTRRVGETLMVGDDVTVTVLGVKGNQVRIGVNAPKEVAVHREEIYQRIQKEKDQEPNH

SEQ ID NO: 2035 - DNA, 186 bp, Yersinia pestis CO92
  CDS (1)..(186): transl_table=11
atgcttattctgactcgtcgagttggtgaaacactcatgattggcgatgaggttacggttactgtattaggggttaaaggcaaccaggttcgaattggtgtaaatgctccgaaagaggtttctgttcaccgtgaagaaatctaccagcgcatccaagcagaaaagtctcaaccgacgacttactga

SEQ ID NO: 2036 - protein, 61 aa, Yersinia pestis CO92
MLILTRRVGETLMIGDEVTVTVLGVKGNQVRIGVNAPKEVSVHREEIYQRIQAEKSQPTTY

SEQ ID NO: 2037 - DNA, 192 bp, Haemophilus influenzae Rd KW20
  CDS (1)..(192): transl_table=11
atgttaatcttaactcgtaaagttggcgaaagtgtacttattggagatgatatttctatcacggttttgagtgtacgtggaaaccaagttaaactcggtgttgaagcgcctaaagaagtatccgttcaccgagaagaaatttaccaacgaattaaacaaacgaaagatgaaccctatttaggttcctcttag

SEQ ID NO: 2038 - protein, 63 aa, Haemophilus influenzae Rd KW20
MLILTRKVGESVLIGDDISITVLSVRGNQVKLGVEAPKEVSVHREEIYQRIKQTKDEPYLGSS

SEQ ID NO: 2039 - DNA, 213 bp, Xanthomonas campestris pv. campestris str. ATCC 33913
  CDS (1)..(213): transl_table=11
atgttgatcctcactcgccgagtaggcgaaaccctgatgatcggcgacttggtcaccgtgaccgtgctcggcgtcaagggaaatcaggtgcgcattggcattgacgcgcctaaggatgttgccgtgcatcgcgaagaaatctatcagcgcatccagcgcggtgacgagccggttgcgtccggtgcgcatcacaacgacgattgttcggactga

SEQ ID NO: 2040 - protein, 70 aa, Xanthomonas campestris pv. campestris str. ATCC 33913
MLILTRRVGETLMIGDLVTVTVLGVKGNQVRIGIDAPKDVAVHREEIYQRIQRGDEPVASGAHHNDDCSD

SEQ ID NO: 2041 - DNA, 213 bp, Xanthomonas axonopodis pv. citri str. 306
  CDS (1)..(213): transl_table=11
atgttgatcctcactcgccgggtaggcgaaaccttgatgatcggcgactcggtcaccgtgaccgttctcggcgtcaagggcaatcaggtgcgcatcggtatcaccgcacccaaggatgtggctgtgcatcgcgaagaaatctatcagcgcatccagcgtggggatgagcctgtcgcctccggcgcacatcacggcgacgattcttcgaattga

SEQ ID NO: 2042 - protein, 70 aa, Xanthomonas axonopodis pv. citri str. 306
MLILTRRVGETLMIGDSVTVTVLGVKGNQVRIGITAPKDVAVHREEIYQRIQRGDEPVASGAHHGDDSSN

SEQ ID NO: 2043 - DNA, 183 bp, Buchnera aphidicola str. Sg (Schizaphis graminum)
  CDS (1)..(183): transl_table=11
atgcttattctaactcgtcgagttggcgaaacattaataattggcgatgaaataactgtaacagtactaggagttaaaggtaaccaagttcgcattggtgtaaacgcccctaaagaagtttcggtacatcgtgaagaaatatatcaacgtattcaagctgaaaaaaaacaaaaaaaaagttga

SEQ ID NO: 2044 - protein, 60 aa, Buchnera aphidicola str. Sg (Schizaphis graminum)
MLILTRRVGETLIIGDEITVTVLGVKGNQVRIGVNAPKEVSVHREEIYQRIQAEKKQKKS

SEQ ID NO: 2045 - DNA, 198 bp, Shewanella oneidensis MR-1
  CDS (1)..(198): transl_table=11
atgctgattttgactcgtcgtgttggcgaaacactgatgattggtgatgaagtcacagttactgtgctaggggtaaaaggcaatcaagtgcgtattggtgtgaatgcaccgaaagaggtttctgttcaccgcgaagaaatctaccaacgcattcaatctgaaaaatcaggtacgccttctgaaggcggtaacttttaa

SEQ ID NO: 2046 - protein, 65 aa, Shewanella oneidensis MR-1
MLILTRRVGETLMIGDEVTVTVLGVKGNQVRIGVNAPKEVSVHREEIYQRIQSEKSGTPSEGGNF

SEQ ID NO: 2047 - DNA, 180 bp, Pseudomonas putida KT2440
  CDS (1)..(180): transl_table=11
atgctggtaatagggcgcgaagtaggggaggtcatcgtgattggcgatgacatccggatcatggtggtagagacccgggacggcgtggtgcgctttggtgtggctgctccgcgtgaggtgccggtgcatcgagccgaagtttacaagcgcatcaaggcgtccaagcagagcaaggcctga

SEQ ID NO: 2048 - protein, 59 aa, Pseudomonas putida KT2440
MLVIGREVGEVIVIGDDIRIMVVETRDGVVRFGVAAPREVPVHRAEVYKRIKASKQSKA

SEQ ID NO: 2049 - DNA, 198 bp, Pseudomonas putida KT2440
  CDS (1)..(198): transl_table=11
atgctgatactcacccgtaaggttggcgaaagcatcgtcatcaacgatgacatcaaagtcaccattctgggcgtcaaagggatgcaggtgaggatcggtatcgatgcaccgaaagatgttcaggtccatcgagaagagattttcaaacgcatccaggccggcagcccggctccggagaaacacgaagacacacactga

SEQ ID NO: 2050 - protein, 65 aa, Pseudomonas putida KT2440
MLILTRKVGESIVINDDIKVTILGVKGMQVRIGIDAPKDVQVHREEIFKRIQAGSPAPEKHEDTH

SEQ ID NO: 2051 - DNA, 192 bp, Vibrio vulnificus CMCP6
  CDS (1)..(192): transl_table=11
atgctaattttgactcgccgcgtaggcgaaacactgatgattggtgacgaagtgacagtaacggtactgggtgtgaaaggcaaccaggttcgtattggtgtgaacgctcctaaagacgtttctgtacaccgtgaagagatctacatgcgcattcaggctgagaaaggcaacgttaccccaggtaactactaa

SEQ ID NO: 2052 - protein, 63 aa, Vibrio vulnificus CMCP6
MLILTRRVGETLMIGDEVTVTVLGVKGNQVRIGVNAPKDVSVHREEIYMRIQAEKGNVTPGNY

SEQ ID NO: 2053 - DNA, 183 bp, Buchnera aphidicola str. Bp (Baizongia pistaciae)
  CDS (1)..(183): transl_table=11
atgcttattttaactcgtcgagttggcgaaacacttataatcggtgacaatatatctataactgtattaggagtaaaagggaatcaagtgcgaattggagttaacgctccaaaagaaatatcagtacatagagaagaaatttaccaaagaattcaaactgaaaaaaaaacacaaactcaataa

SEQ ID NO: 2054 - protein, 60 aa, Buchnera aphidicola str. Bp (Baizongia pistaciae)
MLILTRRVGETLIIGDNISITVLGVKGNQVRIGVNAPKEISVHREEIYQRIQTEKKTQTQ

SEQ ID NO: 2055 - DNA, 189 bp, Pseudomonas syringae pv. tomato str. DC3000
  CDS (1)..(189): transl_table=11
atgctgattctgactcgtcggtgcgcggaaagcctgatcattggtgacggtgagattaccgtgaccgtgctcggagtgaagggtaatcaggtgcgtattggtgtcaatgcgcccaaggaagtcgctgtccatcgtgaagagatttaccttcgcatcaagaaagagaaggacgaagaaccaagccattaa

SEQ ID NO: 2056 - protein, 62 aa, Pseudomonas syringae pv. tomato str. DC3000
MLILTRRCAESLIIGDGEITVTVLGVKGNQVRIGVNAPKEVAVHREEIYLRIKKEKDEEPSH

SEQ ID NO: 2057 - DNA, 189 bp, Pseudomonas syringae pv. tomato str. DC3000
  CDS (1)..(189): transl_table=11
atgttgatactcactcgcaaagtaggcgaaagcataaacatcggtgacgagatcactgtcacgattcttggcgttcaagggcttcaggtccgcctgggcatcaatgcaccaaaaaatgtttcagtgcatcgtgaagaaatctacaaacgtatccaggcagaactggctccgaaccaggacccacaataa

SEQ ID NO: 2058 - protein, 62 aa, Pseudomonas syringae pv. tomato str. DC3000
MLILTRKVGESINIGDEITVTILGVQGLQVRLGINAPKNVSVHREEIYKRIQAELAPNQDPQ

SEQ ID NO: 2059 - DNA, 198 bp, Vibrio parahaemolyticus RIMD 2210633
  CDS (1)..(198): transl_table=11
atgctaattttgactcgccgcgtaggcgaaacacttatgattggtgatgaagtgactgtaactgtactaggtgttaaaggtaaccaagtacgtatcggtgttaacgctccgaaagaggtttcagttcaccgtgaagaaatctacatgcgcattcaggctgaaaaaggcaatggcaacgttgcttcaggtaactactaa

SEQ ID NO: 2060 - protein, 65 aa, Vibrio parahaemolyticus RIMD 2210633
MLILTRRVGETLMIGDEVTVTVLGVKGNQVRIGVNAPKEVSVHREEIYMRIQAEKGNGNVASGNY

SEQ ID NO: 2061 - DNA, 207 bp, Coxiella burnetii RSA 493
  CDS (1)..(207): transl_table=11
atgttagtcttaacacgaacaaatggtcaggctataaagattgggaacgagggtgaaattaccgtcaccgtcctcgaagtacgcggaaaccaagtgcgcatgggtatcgatgcgcctaagcacatcgcggtccaccgagaagagatttaccagcgcattcaagaagaaaagccaaaagcgccacctattcttgaggaagttgaataa

SEQ ID NO: 2062 - protein, 68 aa, Coxiella burnetii RSA 493
MLVLTRTNGQAIKIGNEGEITVTVLEVRGNQVRMGIDAPKHIAVHREEIYQRIQEEKPKAPPILEEVE

SEQ ID NO: 2063 - DNA, 213 bp, Coxiella burnetii RSA 493
  CDS (1)..(213): transl_table=11
atgttaatactaaccagacgtatcggtgaatcggtaatcattggagacgacatcaagataaccgttcttggtgtaaaaggtaaccaagtccgtctagggatagacgccccgaaagatatttctgttcaccgcgaagaaatttatgagcggattcaacaggagaaattggctcagtcagaagaccagggtgagaagactgacgaatttgaataa

SEQ ID NO: 2064 - protein, 70 aa, Coxiella burnetii RSA 493
MLILTRRIGESVIIGDDIKITVLGVKGNQVRLGIDAPKDISVHREEIYERIQQEKLAQSEDQGEKTDEFE

SEQ ID NO: 2065 - DNA, 189 bp, Haemophilus ducreyi 35000HP
  CDS (1)..(189): transl_table=11
atgcttgtactaacacgtaaagttggtgaaagtttattaattggcgatgatattgaaattaccgtgcttagtgtaagaggcaatcaagttaaattgggcgtcaatgcacctaaaaatattgtagttcatcgtgaagaaatttatcaccaaattaaagcattagcagataatataccggaatcagtataa

SEQ ID NO: 2066 - protein, 62 aa, Haemophilus ducreyi 35000HP
MLVLTRKVGESLLIGDDIEITVLSVRGNQVKLGVNAPKNIVVHREEIYHQIKALADNIPESV

SEQ ID NO: 2067 - DNA, 198 bp, Candidatus Blochmannia floridanus
  CDS (1)..(198): transl_table=11
atgctcattttaactcgacgggttggtgaaactcttattattggtgatgatatcacagttactgtattgggtgttaaaggaaatcaaattcgtattggtataaatgctcctaaaaaagtgtctatacatcgagaagagatttatcaacgtattcaggatgaaaaaacaaaacaggatcatatattagatgaagtttaa

SEQ ID NO: 2068 - protein, 65 aa, Candidatus Blochmannia floridanus
MLILTRRVGETLIIGDDITVTVLGVKGNQIRIGINAPKKVSIHREEIYQRIQDEKTKQDHILDEV

SEQ ID NO: 2069 - DNA, 240 bp, Geobacter sulfurreducens PCA
  CDS (1)..(240): transl_table=11
atgttagtactgaccagaaaaatgggagaagtagtcaccatcggcgattccatcaggatcaaggtggtggagatgaaaggaaaccaagtgcggctcggcatcgaggctcccaacgacatgcgcatctaccgtgaggaaatctatatcaaggttcagcgcgaaaaccagattgccgcttcgtggagcctggcggacctggagaaggcggtaacctgcctcggcgcggacgggaaggagtaa

SEQ ID NO: 2070 - protein, 79 aa, Geobacter sulfurreducens PCA
MLVLTRKMGEVVTIGDSIRIKVVEMKGNQVRLGIEAPNDMRIYREEIYIKVQRENQIAASWSLADLEKAVTCLGADGKE

SEQ ID NO: 2071 - DNA, 228 bp, Treponema denticola ATCC 35405
  CDS (1)..(228): transl_table=11
atgctcatactatcccgtaaaacaaaccaaaaaatacttatcggagatgatatagagattaccataatcgatattcggggagatcaggtaaaaataggtgtagatgcaccgccttcggtcaaggttttccgtgaagaaatctaccaagaaattcaaaacgaaaacagggcagccttagtccgcgataccgagcttaacctacctgaactgcatattaaaaagaaatag

SEQ ID NO: 2072 - protein, 75 aa, Treponema denticola ATCC 35405
MLILSRKTNQKILIGDDIEITIIDIRGDQVKIGVDAPPSVKVFREEIYQEIQNENRAALVRDTELNLPELHIKKK

SEQ ID NO: 2073 - DNA, 216 bp, Halorhodospira halophila SL1
  CDS (1)..(216): transl_table=11
atgctgatactcacgaggagagtgggcgagacgctgatgatcggtgacgacgtcagtgtcacggtgctcggggtcaagggtaaccaggtacggatcggcgtgaatgccccgcgggatgtctccgtgcaccgcgaagagatctatgagcggatccggcatgagaaggacggtgacgtcccggaggcggcgcccgggcagggtgcggatccgcagtag

SEQ ID NO: 2074 - protein, 71 aa, Halorhodospira halophila SL1
MLILTRRVGETLMIGDDVSVTVLGVKGNQVRIGVNAPRDVSVHREEIYERIRHEKDGDVPEAAPGQGADPQ

SEQ ID NO: 2075 - DNA, 195 bp, Actinobacillus pleuropneumoniae L20
  CDS (1)..(195): transl_table=11
atgcttatactcactcgtaaaattggggaaagtttactaataggagataatgttgagattaccgttctcagcgttcgaggcaatcaagttaaattaggtgtgaatgcgccgaaagaagtttctgttcatcgagaagaaatttatcaaagaatcaaagcattagcggatgatgtcgctagtgacacgcaacagtaa

SEQ ID NO: 2076 - protein, 64 aa, Actinobacillus pleuropneumoniae L20
MLILTRKIGESLLIGDNVEITVLSVRGNQVKLGVNAPKEVSVHREEIYQRIKALADDVASDTQQ

SEQ ID NO: 2077 - DNA, 198 bp, Shewanella loihica PV-4
  CDS (1)..(198): transl_table=11
atgctgatattgactcgtcgtgttggtgaaacactgatgattggtgatgaagttactgtcaccgttttaggcgtaaagggtaatcaagttcgtattggtgttaatgcaccaaaagaagtttcagttcatcgtgaagagatttatcagcgtattcagtctgaaaagtcaggtagctcttctgaaggcggcaatttttaa

SEQ ID NO: 2078 - protein, 65 aa, Shewanella loihica PV-4
MLILTRRVGETLMIGDEVTVTVLGVKGNQVRIGVNAPKEVSVHREEIYQRIQSEKSGSSSEGGNF

SEQ ID NO: 2079 - DNA, 249 bp, Geobacillus thermodenitrificans NG80-2
  CDS (1)..(249): transl_table=11
atgcttgtactaacgcgcaaattgaaagaagcgattcaaatcggcgatgacatcgaaatcaccgtcctcgccatccaaggcgatcaagtgaaacttggcatcaacgcaccgaaacacgtcgaaatccatcgcaaagaaatttacctcgccatccaagccgaaaacaacgccgcctcccacgcctccaaatcatcgctcaagcgattgaacgagcaattgaaacacttgaaaggggggaaacaagcatga

SEQ ID NO: 2080 - protein, 82 aa, Geobacillus thermodenitrificans NG80-2
MLVLTRKLKEAIQIGDDIEITVLAIQGDQVKLGINAPKHVEIHRKEIYLAIQAENNAASHASKSSLKRLNEQLKHLKGGKQA

SEQ ID NO: 2081 - DNA, 189 bp, Aeromonas salmonicida subsp. salmonicida A449
  CDS (1)..(189): transl_table=11
atgcttattttgactcgtcgtgtaggggaaaccctgatgattggtgacgaagtgactgtcaccgtactgggcgttaaaggcaatcaggttcgtatcggtgttaacgcaccgaaagaggtctccgtacaccgtgaagagatctacatgcggatacaggccgagaaagtgccgggccaaccgaatttctaa

SEQ ID NO: 2082 - protein, 62 aa, Aeromonas salmonicida subsp. salmonicida A449
MLILTRRVGETLMIGDEVTVTVLGVKGNQVRIGVNAPKEVSVHREEIYMRIQAEKVPGQPNF

SEQ ID NO: 2083 - DNA, 186 bp, Pseudomonas mendocina ymp
  CDS (1)..(186): transl_table=11
atgctgattctgactcgccgggtcggagagaccctgatggtcggtgatgatgtgactgtcaccgtgttgggcgtgaaaggtaaccaggtgcgtattggtgtcaatgcgccgaaagaggttgccgtacaccgtgaagaaatctaccagcgcatccagaaagagaagggtgacgaaccaagccactaa

SEQ ID NO: 2084 - protein, 61 aa, Pseudomonas mendocina ymp
MLILTRRVGETLMVGDDVTVTVLGVKGNQVRIGVNAPKEVAVHREEIYQRIQKEKGDEPSH

SEQ ID NO: 2085 - DNA, 189 bp, Pseudomonas fluorescens SBW25
  CDS (1)..(189): transl_table=11
atgctcgtacttactcgaaacagcggtcaatcaatcaagattggtgatgacatcacgattactgtcctgagctgcgttggtacccaggtccgcttggggatcactgctccgaaagatgttgatgttcatcgagatgagatctatcaacgcattcaagatcagcgccagctggagaagggcagtgcctag

SEQ ID NO: 2086 - protein, 62 aa, Pseudomonas fluorescens SBW25
MLVLTRNSGQSIKIGDDITITVLSCVGTQVRLGITAPKDVDVHRDEIYQRIQDQRQLEKGSA

SEQ ID NO: 2087 - DNA, 195 bp, Dichelobacter nodosus VCS1703A
  CDS (1)..(195): transl_table=11
atgttaattctaacgcgtcgtgtgggtgagacaattatcatcgatgatcagatcaaggtgactgttctcgctgtaaaaggaaatcaggtgcggttgggcgtgcaagcccctgatgagattgcgattcatcgcgaagaaatttatcatcgtttgatgaacggggtcggcgatgacgccgaaatggagaaaaaatga

SEQ ID NO: 2088 - protein, 64 aa, Dichelobacter nodosus VCS1703A
MLILTRRVGETIIIDDQIKVTVLAVKGNQVRLGVQAPDEIAIHREEIYHRLMNGVGDDAEMEKK

SEQ ID NO: 2089 - DNA, 240 bp, Geobacter uraniireducens Rf4
  CDS (1)..(240): transl_table=11
atgctggttctgaccagaaaaatcggggaagccgttaccatcggcgatcagatacggatcatggtggtggaggtgaagggcaaccaggtgcgcctcggcatagaggcaccccaggacatgcgcatctaccgggaagagatctatctgcaggtgcaggaggaaaacaggcatgccgccgactggaatctgaccgaccttgaaaatgccgtgagtttgctcggcagtggcgataaggagtga

SEQ ID NO: 2090 - protein, 79 aa, Geobacter uraniireducens Rf4
MLVLTRKIGEAVTIGDQIRIMVVEVKGNQVRLGIEAPQDMRIYREEIYLQVQEENRHAADWNLTDLENAVSLLGSGDKE

SEQ ID NO: 2091 - DNA, 198 bp, Pseudomonas putida F1
  CDS (1)..(198): transl_table=11
atgctgatactcacccgtaaggttggcgaaagcatcgtcatcaacgatgacatcaaagtcaccattctgggcgtcaaagggatgcaggtgaggatcggtatcgatgcaccgaaagatgttcaggtccatcgagaagagatcttcaaacgtatccaggccggcagcccggctccggagaaacacgaagactcacactga

SEQ ID NO: 2092 - protein, 65 aa, Pseudomonas putida F1
MLILTRKVGESIVINDDIKVTILGVKGMQVRIGIDAPKDVQVHREEIFKRIQAGSPAPEKHEDSH

SEQ ID NO: 2093 - DNA, 246 bp, Psychrobacter sp. PRwf-1
  CDS (1)..(246): transl_table=11
atgttaattttaactcgccgtgtgggtgaaactttaatggttggtgacgaggtaagtgtcactgtattgggcgttaagggcaatcaagttcgtattggggttaatgcacccaaagatatcgcggtgcaccgtgaagagatttatcagcgcattcaacatgagcgtgctatgcagtctcaaatgcagcatttagaacaaggtaacttccctacctcattcgatgatgacgatttttttaatagatag

SEQ ID NO: 2094 - protein, 81 aa, Psychrobacter sp. PRwf-1
MLILTRRVGETLMVGDEVSVTVLGVKGNQVRIGVNAPKDIAVHREEIYQRIQHERAMQSQMQHLEQGNFPTSFDDDDFFNR

SEQ ID NO: 2095 - DNA, 192 bp, Haemophilus influenzae PittEE
  CDS (1)..(192): transl_table=11
atgttaatcttaactcgaaaagttggcgaaagtgtactcattggagatgatatttctatcacggttttgagtgtacgtggaaaccaagttaaactcggtgttgaagcgcctaaagaagtatccgttcaccgagaagaaatttaccaacgaattaaacaaacgaaagatgaaccctatttagcttcctcttag

SEQ ID NO: 2096 - protein, 63 aa, Haemophilus influenzae PittEE
MLILTRKVGESVLIGDDISITVLSVRGNQVKLGVEAPKEVSVHREEIYQRIKQTKDEPYLASS

SEQ ID NO: 2097 - DNA, 228 bp, Thermosipho melanesiensis BI429
  CDS (1)..(228): transl_table=11
gtgcttgtattagctagaaaagttggtgaaagtatatttattggtaatgatgtagaagttaaaattttaaagatagatggcggagaggtaaagattggtatttctgcaccaaagagtgtaagaatcttgcgaaaagagttgtatgaagaaattatggcggagaataaaaaagcaatagagtttgatataaaggatatctcggaggtgagtaaatttgaaaatagatga

SEQ ID NO: 2098 - protein, 75 aa, Thermosipho melanesiensis BI429
MLVLARKVGESIFIGNDVEVKILKIDGGEVKIGISAPKSVRILRKELYEEIMAENKKAIEFDIKDISEVSKFENR

SEQ ID NO: 2099 - DNA, 219 bp, Clostridium beijerinckii NCIMB 8052
  CDS (1)..(219): transl_table=11
atgttaataattacaagaaaaaaaggtgaatcgctcatgataggtgatgatatagaaattactataagtaaaattgatgatggcagtgtgaaaattgggataaatgctcctaaaaacatatcaatattaaggaaagaattgtatgaagaggtaatggaagaaaataaacaagcaataaaaattgatatgaatttgctaaagaatatcaagaaaagataa

SEQ ID NO: 2100 - protein, 72 aa, Clostridium beijerinckii NCIMB 8052
MLIITRKKGESLMIGDDIEITISKIDDGSVKIGINAPKNISILRKELYEEVMEENKQAIKIDMNLLKNIKKR

SEQ ID NO: 2101 - DNA, 213 bp, Marinomonas sp. MWYL1
  CDS (1)..(213): transl_table=11
atgctagtcattactcgacaccccggtgaaaccattaacattggtgatgatacggaagttaccgtattaggggtacaagggactcaagttcgcatcggcatcaaagccccgcaaaagataagcgttcatcgagaagaaatttacaaacgtattcaagcagaaaaactactggaaacttacagtgagcaggtcaaagaaaaccaacctacttag

SEQ ID NO: 2102 - protein, 70 aa, Marinomonas sp. MWYL1
MLVITRHPGETINIGDDTEVTVLGVQGTQVRIGIKAPQKISVHREEIYKRIQAEKLLETYSEQVKENQPT

SEQ ID NO: 2103 - DNA, 189 bp, Marinomonas sp. MWYL1
  CDS (1)..(189): transl_table=11
atgcttattcttactcgccgtgttggtgaaactttgatggttggtgatgaagtttctgtcactgttttaggtgtaaagggaaatcaagtgcgtattggtatcaatgcgcctaaagatgtgtctgttcaccgtgaagagatttatcttcgcatccaaaaagaacaagacgatcaaatttctgaagattaa

SEQ ID NO: 2104 - protein, 62 aa, Marinomonas sp. MWYL1
MLILTRRVGETLMVGDEVSVTVLGVKGNQVRIGINAPKDVSVHREEIYLRIQKEQDDQISED

SEQ ID NO: 2105 - DNA, 186 bp, Actinobacillus succinogenes 130Z
  CDS (1)..(186): transl_table=11
atgttgatattaacccggaaagttggtgaaacggtgctgattggcgacgatatatccattactgtgttaaatattcggggaaatcaagtgaaaatcggtatagaagccccgaaggatgtgacggtgcatcgtgaagaaatttacgaacgcatcaaactcgcagctgaagacaataatcatgtatag

SEQ ID NO: 2106 - protein, 61 aa, Actinobacillus succinogenes 130Z
MLILTRKVGETVLIGDDISITVLNIRGNQVKIGIEAPKDVTVHREEIYERIKLAAEDNNHV

SEQ ID NO: 2107 - DNA, 252 bp, Fervidobacterium nodosum Rt17-B1
  CDS (1)..(252): transl_table=11
atgctggttctttcgagaaaaattggagaaagtataattataggtgataatatcgaagtaaaagttttaaaaatagaaagcggaactgtaaaaataggaataatagcaccaacaaatgtaaaaatataccggcaagagatttatcaaacagttgctgagcaaaataaaaaaactattagtgaaatagtaaatagtcctgatgatttgaaacatctaaaggaggtacttaaaaatgtcaataaaaatagatga

SEQ ID NO: 2108 - protein, 83 aa, Fervidobacterium nodosum Rt17-B1
MLVLSRKIGESIIIGDNIEVKVLKIESGTVKIGIIAPTNVKIYRQEIYQTVAEQNKKTISEIVNSPDDLKHLKEVLKNVNKNR

SEQ ID NO: 2109 - DNA, 225 bp, Bacillus amyloliquefaciens FZB42
  CDS (1)..(225): transl_table=11
atgctagttctctcaagaaaagtgaatgagtccattcagatcgggccggatattgaaataaaggtgatcgccatcgaaggagaacaagtgaagctgggaattgaagcgcctcagcacgtagatattcacaggaaagaaatctacttgtcgatcctggaagagaacaacagagctgtatcttttaatactgatttattacttaacctatcctcacaaaaaaagtga

SEQ ID NO: 2110 - protein, 74 aa, Bacillus amyloliquefaciens FZB42
MLVLSRKVNESIQIGPDIEIKVIAIEGEQVKLGIEAPQHVDIHRKEIYLSILEENNRAVSFNTDLLLNLSSQKK

SEQ ID NO: 2111 - DNA, 231 bp, Thermotoga lettingae TMO
  CDS (1)..(231): transl_table=11
ttgctggtgatctcaagaaaatctggagaaagttttatgataggtgatagcatagaagtaaaaatcttgaggatagagggaagcgaagttaagataggtatatctgcaccgtctcatgttaaaatatatagagcagagatataccaaaagatagtaaaagaaaacaagatggctgttcaggttgatattgtggatctgagtgaggtgatttttcttgatagaaataaatga

SEQ ID NO: 2112 - protein, 76 aa, Thermotoga lettingae TMO
MLVISRKSGESFMIGDSIEVKILRIEGSEVKIGISAPSHVKIYRAEIYQKIVKENKMAVQVDIVDLSEVIFLDRNK

SEQ ID NO: 2113 - DNA, 198 bp, Shewanella sediminis HAW-EB3
  CDS (1)..(198): transl_table=11
atgctgatattgactcgtcgtgttggtgaaacactgatgattggtgatgaagtaactgtcactgttttaggcgttaaaggtaatcaagtacgtatcggtgtgaatgcacctaaagaagtctcggtacatcgtgaagagatctaccagcgcattcagtctgaaaaagctggcaacccttctgaaggtggcaatttttag

SEQ ID NO: 2114 - protein, 65 aa, Shewanella sediminis HAW-EB3
MLILTRRVGETLMIGDEVTVTVLGVKGNQVRIGVNAPKEVSVHREEIYQRIQSEKAGNPSEGGNF

SEQ ID NO: 2115 - DNA, 219 bp, Clostridium phytofermentans ISDg
  CDS (1)..(219): transl_table=11
atgctagctttatcaagaaaattaaacgaatccatcatgcttggcaatgatattgaaattaccattttagaaatcaaaggtgatcaagtaaaaataggaattaaagcaccaaaatcggttccgatttatcgaaaggaaatatatcttcagattcaagaatccaataaggaggctattgacggaggcgtttccttagaagcaataagtaagttattttaa

SEQ ID NO: 2116 - protein, 72 aa, Clostridium phytofermentans ISDg
MLALSRKLNESIMLGNDIEITILEIKGDQVKIGIKAPKSVPIYRKEIYLQIQESNKEAIDGGVSLEAISKLF

SEQ ID NO: 2117 - DNA, 213 bp, Coxiella burnetii RSA 331
  CDS (1)..(213): transl_table=11
atgttaatactaaccagacgtatcggtgaatcggtaatcattggagacgacatcaagataaccgttcttggtgtaaaaggtaaccaagtccgtctagggatagacgccccgaaagatatttctgttcaccgcgaagaaatttatgagcggattcaacaggagaaattggctcactcagaagaccagggtgagaagactgacgaatttgaataa

SEQ ID NO: 2118 - protein, 70 aa, Coxiella burnetii RSA 331
MLILTRRIGESVIIGDDIKITVLGVKGNQVRLGIDAPKDISVHREEIYERIQQEKLAHSEDQGEKTDEFE

SEQ ID NO: 2119 - DNA, 183 bp, Pseudomonas putida GB-1
  CDS (1)..(183): transl_table=11
atgctggtaataggacgcgaagtgggtgagaccatcgtgattggcgatgatattcgcatcagggtggtggaaacccgtgagggggtggtgcgctttggcgtggatgcgccgcgcgaggtcccggtgcatcgggccgaggtatacaagcgcatccaggaggccaaacaaggcaagagctgctag

SEQ ID NO: 2120 - protein, 60 aa, Pseudomonas putida GB-1
MLVIGREVGETIVIGDDIRIRVVETREGVVRFGVDAPREVPVHRAEVYKRIQEAKQGKSC

SEQ ID NO: 2121 - DNA, 198 bp, Pseudomonas putida GB-1
  CDS (1)..(198): transl_table=11
atgctgatactcacccgtaaggttggcgaaagcatcgtcatcaacgatgacatcaaagtcaccattctgggcgtcaaagggatgcaggtgaggatcggtatcgatgcacctaaagatgtccaggtccatcgcgaagaaatcttcaagcgcatccaggccggcagcccagccccggagaagcacgacgactcgcactga

SEQ ID NO: 2122 - protein, 65 aa, Pseudomonas putida GB-1
MLILTRKVGESIVINDDIKVTILGVKGMQVRIGIDAPKDVQVHREEIFKRIQAGSPAPEKHDDSH

SEQ ID NO: 2123 - DNA, 264 bp, Heliobacterium modesticaldum Ice1
  CDS (1)..(264): transl_table=11
gtgctcgtcttgacacggcgcaacggcgaaagcatcgtcatcggggagaacatcaccatctccattttggaagtgcggggcgaccagatccgcatcggcatcgaagcgccacggcatgtgacagtgcatcgcggggaggtttttgaagcgattcaacgggccaaccgcgacgccgtacagtctgtggccgacaagagtggcctcacggcattcttgcagaaagacaaagggtcagatcataaaaaagaaaaaagtgcaaaatag

SEQ ID NO: 2124 - protein, 87 aa, Heliobacterium modesticaldum Ice1
MLVLTRRNGESIVIGENITISILEVRGDQIRIGIEAPRHVTVHRGEVFEAIQRANRDAVQSVADKSGLTAFLQKDKGSDHKKEKSAK

SEQ ID NO: 2125 - DNA, 189 bp, Pseudomonas putida W619
  CDS (1)..(189): transl_table=11
atgttggtcattggacgtgaggtcggcgaagtcatcaacattggtgacgatattcagatcaaagtggtggaaacacgcaacggcatggtgcgttttggcgtcagtgcgccgcgtgaagtgtcggtgcaccgggcagaggtatacaagcggataaaggcgggggagaagcgcaagggcaattcggcctga

SEQ ID NO: 2126 - protein, 62 aa, Pseudomonas putida W619
MLVIGREVGEVINIGDDIQIKVVETRNGMVRFGVSAPREVSVHRAEVYKRIKAGEKRKGNSA

SEQ ID NO: 2127 - DNA, 198 bp, Pseudomonas putida W619
  CDS (1)..(198): transl_table=11
atgctgatactcacccgtaaggttggcgaaagcatcgtcatcaacgatgacatcaaagtcaccattctgggcgtgaaggggatgcaggtgaggattggcatcgatgcaccaaaggatgttcaggtgcaccgtgaagaaatcttcaagcgtatccaggccggcagccctgccccggaaaagcacgacgaccaacactga

SEQ ID NO: 2128 - protein, 65 aa, Pseudomonas putida W619
MLILTRKVGESIVINDDIKVTILGVKGMQVRIGIDAPKDVQVHREEIFKRIQAGSPAPEKHDDQH

SEQ ID NO: 2129 - DNA, 198 bp, Shewanella woodyi ATCC 51908
  CDS (1)..(198): transl_table=11
atgctgatattgactcgtcgtgttggtgaaacactgatgattggtgatgaagtaactgtcaccgtattaggcgtcaagggtaatcaagtgcgtataggtgttaatgcgcctaaagaagtttcggtacatcgtgaagagatttatcaacgtattcagtctgagaaagctgggaactcttcagaaggcggcaatttttag

SEQ ID NO: 2130 - protein, 65 aa, Shewanella woodyi ATCC 51908
MLILTRRVGETLMIGDEVTVTVLGVKGNQVRIGVNAPKEVSVHREEIYQRIQSEKAGNSSEGGNF

SEQ ID NO: 2131 - DNA, 240 bp, Leptospira biflexa serovar Patoc strain 'Patoc 1 (Paris)'
  CDS (1)..(240): transl_table=11
gtgttagttttagcgaggagaagtaaccaatccattatgattggcgatgatattgaaattgtcatcgttgatatcaaaggggatcaagtaaagattggtgtcaaagctcctaaaaatgtttctgtccatcgtgcagaagtatacaaagaaatccaagaagagaacaaaaaagcagctggtacgaatattaaaccggaagatttaggcaagttaggagacctgtttaagaaaaaaacttaa

SEQ ID NO: 2132 - protein, 79 aa, Leptospira biflexa serovar Patoc strain 'Patoc 1 (Paris)'
MLVLARRSNQSIMIGDDIEIVIVDIKGDQVKIGVKAPKNVSVHRAEVYKEIQEENKKAAGTNIKPEDLGKLGDLFKKKT

SEQ ID NO: 2133 - DNA, 213 bp, Xanthomonas campestris pv. campestris str. B100
  CDS (1)..(213): transl_table=11
atgttgatcctcactcgccgagtaggcgaaaccctgatgatcggcgacttggtcaccgtgaccgtgatcggcgtcaagggaaatcaggtgcgcattggcattgccgcgcctaagcatgttgccgtgcatcgcgaagaaatctatcagcgcatccagcgcggtgacgagccggttgcgtccggtgcgcatcacaacgacgattgttcggactga

SEQ ID NO: 2134 - protein, 70 aa, Xanthomonas campestris pv. campestris str. B100
MLILTRRVGETLMIGDLVTVTVIGVKGNQVRIGIAAPKHVAVHREEIYQRIQRGDEPVASGAHHNDDCSD

SEQ ID NO: 2135 - DNA, 186 bp, Erwinia tasmaniensis Et1/99
  CDS (1)..(186): transl_table=11
atgcttattctaactcgtcgagttggtgaaaccctcatgatcggtgatgaggtgactgtaactgtgctgggagtcaaaggtaaccaggtgcgtattggtgtgaacgcccctaaagaagtttcggtgcatcgcgaagagatctatcagcgcattcaggccgaaaagacgcagcaaacgagttactaa

SEQ ID NO: 2136 - protein, 61 aa, Erwinia tasmaniensis Et1/99
MLILTRRVGETLMIGDEVTVTVLGVKGNQVRIGVNAPKEVSVHREEIYQRIQAEKTQQTSY

SEQ ID NO: 2137 - DNA, 237 bp, Natranaerobius thermophilus JW/NM-WN-LF
  CDS (1)..(237): transl_table=11
atgcttgtactcactagaaagcaaaacgaatccattatgataggtgatgacatagaaattacggtagtgggtacagaaggagacaaagtgcgcctgggtatcaaagcccccaaagatgtggaaattcacagggcagaagtatatcaaaagatccaggaggagaatgtgaaagcttcccaggtttcagaaaatgtgttggataaactgtccgatgcactgcaaaagaaaaataaatga

SEQ ID NO: 2138 - protein, 78 aa, Natranaerobius thermophilus JW/NM-WN-LF
MLVLTRKQNESIMIGDDIEITVVGTEGDKVRLGIKAPKDVEIHRAEVYQKIQEENVKASQVSENVLDKLSDALQKKNK

SEQ ID NO: 2139 - DNA, 204 bp, Stenotrophomonas maltophilia K279a
  CDS (1)..(204): transl_table=11
atgttgatcctgactcgccgcgtcggcgaaaccctgatgatcggtgactcggtgagcgtcaccgtgcttggcgtcaagggtaaccaggtgcgtatcggcatcactgcgccgaaggacgtcgctgtgcatcgcgaagagatctaccagcgcatccagcgtggtgacgaagccggtggcaccggcagtgaaaattctgccgaataa

SEQ ID NO: 2140 - protein, 67 aa, Stenotrophomonas maltophilia K279a
MLILTRRVGETLMIGDSVSVTVLGVKGNQVRIGITAPKDVAVHREEIYQRIQRGDEAGGTGSENSAE

SEQ ID NO: 2141 - DNA, 192 bp, Cellvibrio japonicus Ueda107
  CDS (1)..(192): transl_table=11
atgttaattttgactcgccgcattggcgaaactctgatggtaggtgacgaagttactgttactgtattgggtgttaaaggcaaccaggtacgtatcggcgtcaacgcaccaaaagacattgctgtacaccgtgaagagatatatcagcgtatacagcgtgaaaagcaaaatcaggaagagcaggataattaa

SEQ ID NO: 2142 - protein, 63 aa, Cellvibrio japonicus Ueda107
MLILTRRIGETLMVGDEVTVTVLGVKGNQVRIGVNAPKDIAVHREEIYQRIQREKQNQEEQDN

SEQ ID NO: 2143 - DNA, 240 bp, Burkholderia pseudomallei S13
  CDS (1)..(240): transl_table=11
atgcttatcttgtaccgccatccgcaagaaacgctgcacattggcgacgagatcaccgtcacggtacttggcgttcacggcaatcaggttcgcctcggcatccaggccccggcccacgtcggcctccatcgcgaagaaatctaccgacgcatccaggctgagaagcgcgccgccgcgaacacgttatccgctcatccccaggtcattgttcgtcgcgcccgcacccggcatcgccaatag

SEQ ID NO: 2144 - protein, 79 aa, Burkholderia pseudomallei S13
MLILYRHPQETLHIGDEITVTVLGVHGNQVRLGIQAPAHVGLHREEIYRRIQAEKRAAANTLSAHPQVIVRRARTRHRQ

SEQ ID NO: 2145 - DNA, 192 bp, Alteromonas macleodii 'Deep ecotype'
  CDS (1)..(192): transl_table=11
atgcttattttgactcgtcgagttggtgaaacacttatggtaggtgacgatgtaaccgttactgtactaggtgtaaaagggaatcaggtacgtataggtgtgaatgcaccaaaagaagtttctgtgcaccgtgaagagatttatatgcgcattcaggcagaaaaaggcggtcagccaggttctgcagaataa

SEQ ID NO: 2146 - protein, 63 aa, Alteromonas macleodii 'Deep ecotype'
MLILTRRVGETLMVGDDVTVTVLGVKGNQVRIGVNAPKEVSVHREEIYMRIQAEKGGQPGSAE

SEQ ID NO: 2147 - DNA, 189 bp, Unknown
  Unidentified
  CDS (1)..(189)
atgcttattctaactcgtcgagttggtgaaacgcttatgataggcgatgatgtaaccgtaaccgttttaggggttaaaggtaatcaggtacgtattggcgtaaatgcccccaaagaagtatctgtccatcgtgaagagatctatcaacgaattcaggccgagaaaactcagcccacagataactactaa

SEQ ID NO: 2148 - protein, 62 aa, Unknown
  Unidentified
MLILTRRVGETLMIGDDVTVTVLGVKGNQVRIGVNAPKEVSVHREEIYQRIQAEKTQPTDNY

SEQ ID NO: 2149 - DNA, 186 bp, Mannheimia haemolytica PHL213
  CDS (1)..(186): transl_table=11
atgcttattctaactcgtaagattggggaagttttactcgtaggagatgatgttgagattacggtactcagcatccgaggaaatcaagttaaattaggtgtgaatgcaccaaaagaaatctctgtacaccgccgagagatttatgaaagaataaaagcctcagtagaagaggaaaatgcggaataa

SEQ ID NO: 2150 - protein, 61 aa, Mannheimia haemolytica PHL213
MLILTRKIGEVLLVGDDVEITVLSIRGNQVKLGVNAPKEISVHRREIYERIKASVEEENAE

SEQ ID NO: 2151 - DNA, 201 bp, Aliivibrio salmonicida LFI1238
  CDS (1)..(201): transl_table=11
atgctaattttgactcgccgtgtaggtgaaacgctaatgattggtgacgaagtaacagttactgtacttggcgttaaaggcaaccaagtacgtatcggtgttaacgcgcctaaagaagtatctgtacaccgtgaagagatttacatgcgtattcaagcagaaaagggaactactcctgctgctgcaccaggtaacttttaa

SEQ ID NO: 2152 - protein, 66 aa, Aliivibrio salmonicida LFI1238
MLILTRRVGETLMIGDEVTVTVLGVKGNQVRIGVNAPKEVSVHREEIYMRIQAEKGTTPAAAPGNF

SEQ ID NO: 2153 - DNA, 213 bp, Coxiella burnetii CbuK_Q154
  CDS (1)..(213): transl_table=11
atgttaatactaaccagacgtatcggtgaatcggtaatcattagagacgacatcaagataatcgttcttggtgtaaaaggtaaccaagtccgtctagggatagacgccccgaaagatatttctgttcaccgcgaagaaatttatgagcggattcaacaggagaaattggctcagtcagaagaccagggtgagaaggctgacgaatttgaataa

SEQ ID NO: 2154 - protein, 70 aa, Coxiella burnetii CbuK_Q154
MLILTRRIGESVIIRDDIKIIVLGVKGNQVRLGIDAPKDISVHREEIYERIQQEKLAQSEDQGEKADEFE

SEQ ID NO: 2155 - DNA, 198 bp, Shewanella piezotolerans WP3
  CDS (1)..(198): transl_table=11
atgctgatattgactcgtcgtgttggtgaaacactgatgattggtgatgaagttactgtcactgtattaggcgttaaaggtaaccaagttagaattggtgttaatgcacctaaagaagtctctgtccatcgtgaagagatttaccaacgcattcaatctgaaaaatcaggctctgccccagaaggcggaaatttctga

SEQ ID NO: 2156 - protein, 65 aa, Shewanella piezotolerans WP3
MLILTRRVGETLMIGDEVTVTVLGVKGNQVRIGVNAPKEVSVHREEIYQRIQSEKSGSAPEGGNF

SEQ ID NO: 2157 - DNA, 249 bp, Anoxybacillus flavithermus WK1
  CDS (1)..(249): transl_table=11
atgcttgtattaacacgcaaattaaaagaagcgattcaaatcggtgatgatatcgaagtcgtcgttctcgccatcgatggcgaccaagtgaagctcggcattcgcgcaccgaaacatatcgatgtgcatcgcaaagaaatatatctcgccatccaagcagaaaataacgctgcctctctcgcctctataacttcgcttcaacagttatctgatcaattaaagaaaggagggaagtatgatgagcgttag

SEQ ID NO: 2158 - protein, 82 aa, Anoxybacillus flavithermus WK1
MLVLTRKLKEAIQIGDDIEVVVLAIDGDQVKLGIRAPKHIDVHRKEIYLAIQAENNAASLASITSLQQLSDQLKKGGKYDER

SEQ ID NO: 2159 - DNA, 198 bp, Vibrio splendidus LGP32
  CDS (1)..(198): transl_table=11
atgctaattttgactcgccgcgttggcgaaacactgatgattggtgacgaagtaacagttactgtactaggcgttaaaggtaaccaagtacgtattggtgttaacgcacctaaagaagtatctgttcaccgtgaagagatctacatgcgcattcaagctgaaaaaggtaatggtaacgttgcacccggcaactactaa

SEQ ID NO: 2160 - protein, 65 aa, Vibrio splendidus LGP32
MLILTRRVGETLMIGDEVTVTVLGVKGNQVRIGVNAPKEVSVHREEIYMRIQAEKGNGNVAPGNY

SEQ ID NO: 2161 - DNA, 186 bp, Haemophilus parasuis SH0165
  CDS (1)..(186): transl_table=11
atgcttattctaacccgtaagattggcgaaagtttattgatcggtgatgatgtagaaattactgtcctaagtattcgtggtagtcaagttaaattaggggtgaaagcacctaaggaaatttcggttcaccgtgaagaaatttatcaaagaatcaaagtgttagcagatgaaaatccctcggaataa

SEQ ID NO: 2162 - protein, 61 aa, Haemophilus parasuis SH0165
MLILTRKIGESLLIGDDVEITVLSIRGSQVKLGVKAPKEISVHREEIYQRIKVLADENPSE

SEQ ID NO: 2163 - DNA, 237 bp, Desulfovibrio vulgaris subsp. vulgaris str. Hildenborough
  CDS (1)..(237): transl_table=11
atgctcatcctcacacgtaaggcgggcgagagcctgcaccttggtgacgacatccgcatcaccgtcctcggcatacaggggaagcaggtgaagataggtatcgaggtgcccggcgacatggtcgtctaccgggaagaggtgtacaggcgcgtcatcgaagagaaccgtatggcgctcgacatcagcaacgcagaccttctggcggcgacgaagatatggcacggcagaacgaaatag

SEQ ID NO: 2164 - protein, 78 aa, Desulfovibrio vulgaris subsp. vulgaris str. Hildenborough
MLILTRKAGESLHLGDDIRITVLGIQGKQVKIGIEVPGDMVVYREEVYRRVIEENRMALDISNADLLAATKIWHGRTK

SEQ ID NO: 2165 - DNA, 213 bp, Acinetobacter sp. ADP1
  CDS (1)..(213): transl_table=11
atgctgattctgacccgtcgtgtcggggaaacattaatgattggggatcaagtcagtgttactgtgcttggtgttaaaggtaatcaggttcgtattggtgtgaatgctccgaaagaagtctctgttcatcgtgaagagatttatcaacgtattcaacacgaacgtgcaatgcatgtgatcctagccaaaataatggacagtacttccctctaa

SEQ ID NO: 2166 - protein, 70 aa, Acinetobacter sp. ADP1
MLILTRRVGETLMIGDQVSVTVLGVKGNQVRIGVNAPKEVSVHREEIYQRIQHERAMHVILAKIMDSTSL

SEQ ID NO: 2167 - DNA, 186 bp, Pectobacterium atrosepticum SCRI1043
  CDS (1)..(186): transl_table=11
atgcttattttgactcgtcgagttggcgaaaccctcatgatcggcgatgaggtaacggttaccgtattaggagtgaaaggcaaccaggtgcgtattggtgttaatgcgcctaaagaggtttctgtccaccgtgaagagatctatcagcgtattcaggccgaaaaatctcaaccgacgtcatattga

SEQ ID NO: 2168 - protein, 61 aa, Pectobacterium atrosepticum SCRI1043
MLILTRRVGETLMIGDEVTVTVLGVKGNQVRIGVNAPKEVSVHREEIYQRIQAEKSQPTSY

SEQ ID NO: 2169 - DNA, 225 bp, Bacillus licheniformis ATCC 14580
  CDS (1)..(225): transl_table=11
atgctagtcttatcccgcaagctcaatgaagcgattcaaatcggagacgatatcgaagtgaaaatcatatccgttgacggagatcaggtgaaaatcggcatcgacgcgccgaagcatatcgaaattcaccgcaaggaaatctatttggcgatccaggaagaaaacagccgggccgcttccatctcaaacgatttgcttgcgaaattatcctcacaaaaaaagtga

SEQ ID NO: 2170 - protein, 74 aa, Bacillus licheniformis ATCC 14580
MLVLSRKLNEAIQIGDDIEVKIISVDGDQVKIGIDAPKHIEIHRKEIYLAIQEENSRAASISNDLLAKLSSQKK

SEQ ID NO: 2171 - DNA, 186 bp, Mannheimia succiniciproducens MBEL55E
  CDS (1)..(186): transl_table=11
atgctgatattaacccgtaaagttggcgagagcctgctcatcggtgatgacatatctatcacaattttaaacgtacgtggtaatcaggtgaaaattggtgtaaacgcacctaaagatgtatctgttcatcgtgaggaaatttatcaacgtatcaaacaagcggaagagaaagagtcaacctcttaa

SEQ ID NO: 2172 - protein, 61 aa, Mannheimia succiniciproducens MBEL55E
MLILTRKVGESLLIGDDISITILNVRGNQVKIGVNAPKDVSVHREEIYQRIKQAEEKESTS

SEQ ID NO: 2173 - DNA, 249 bp, Legionella pneumophila subsp. pneumophila str. Philadelphia 1
  CDS (1)..(249): transl_table=11
atggaagcgttctatggagaagtaggtagctgctatgttagggagattttagtcatgttgattttgactcggcgtataggtgaaacattaatcataggtgatgatgtcaatattactgttttaggtgtaaaaggcaatcaagttcgcttaggaattaatgctccaaaagatgtttctgttcatcgtgaagaaatttatttacgcatacaacaagaaaaagaatctgatgattcggaacaagcagtataa

SEQ ID NO: 2174 - protein, 82 aa, Legionella pneumophila subsp. pneumophila str. Philadelphia 1
MEAFYGEVGSCYVREILVMLILTRRIGETLIIGDDVNITVLGVKGNQVRLGINAPKDVSVHREEIYLRIQQEKESDDSEQAV

SEQ ID NO: 2175 - DNA, 237 bp, Legionella pneumophila subsp. pneumophila str. Philadelphia 1
  CDS (1)..(237): transl_table=11
atgttgagtttaactagaagagtcggtgaaagcattgttattggagaagatatatttatcacagttctatgttgtaaagggaatcaggtacgcattgggtttaatgcacccaattcagtagccatccaccgttatgaaatttatcaaaaaattcaatctgaaaagcacgatggtttggctgatccaacaaagaaattttgcccatcaatgcagcaatcaatcctcaatcaccattaa

SEQ ID NO: 2176 - protein, 78 aa, Legionella pneumophila subsp. pneumophila str. Philadelphia 1
MLSLTRRVGESIVIGEDIFITVLCCKGNQVRIGFNAPNSVAIHRYEIYQKIQSEKHDGLADPTKKFCPSMQQSILNHH

SEQ ID NO: 2177 - DNA, 195 bp, Methylococcus capsulatus str. Bath
  CDS (1)..(195): transl_table=11
atgctgattttgactcgtagagtgggtgaaaccctgatgattggtgatgacgtgacagtcactgtgctgggtgtgaagggaaaccaggtgcgcatcggagtcaatgcgccgaaggacgtgtccgttcatcgcgaagagatttacgaaaggatcaagaaagagcagcaggccggtcccgagcacgacagcgattga

SEQ ID NO: 2178 - protein, 64 aa, Methylococcus capsulatus str. Bath
MLILTRRVGETLMIGDDVTVTVLGVKGNQVRIGVNAPKDVSVHREEIYERIKKEQQAGPEHDSD

SEQ ID NO: 2179 - DNA, 195 bp, Legionella pneumophila str. Lens
  CDS (1)..(195): transl_table=11
atgttgattttgactcggcgtataggtgaaacattaatcataggtgatgatgtcaatattactgttttaggtgtaaaaggcaatcaagttcgcttaggaattaatgctccgaaagatgtttctgttcatcgtgaagaaatttatttgcgcatacaacaagaaaaagaatctgatgattcggaacaagcagtataa

SEQ ID NO: 2180 - protein, 64 aa, Legionella pneumophila str. Lens
MLILTRRIGETLIIGDDVNITVLGVKGNQVRLGINAPKDVSVHREEIYLRIQQEKESDDSEQAV

SEQ ID NO: 2181 - DNA, 198 bp, Photobacterium profundum SS9
  CDS (1)..(198): transl_table=11
atgctaattttgactcgtcgcgttggtgaaacgctaatgattggtgatgaagtaacagttactgtacttggtgttaagggtaaccaagttcgcattggtgttaacgcacctaaagaagtgtctgttcaccgtgaagaaatctacatgcgaattcaagcagaaaaagaaaacggaactcaaggtactggtaacttctaa

SEQ ID NO: 2182 - protein, 65 aa, Photobacterium profundum SS9
MLILTRRVGETLMIGDEVTVTVLGVKGNQVRIGVNAPKEVSVHREEIYMRIQAEKENGTQGTGNF

SEQ ID NO: 2183 - DNA, 249 bp, Geobacillus kaustophilus HTA426
  CDS (1)..(249): transl_table=11
atgcttgtactaacgcgcaaactgaaagaagcaattcaaatcggcgatgacatcgaaatcactgtccttgttatccaaggcgatcaagtgaagcttggcattaacgcaccgaaacatgtcgaaatccatcgcaaagaaatttatcttgccatccaagccgaaaacaacgccgcctcctttgcctcgaaaacatcgcttgagcggctgaccgagcagttgaaacacttgaaaggggggaaacaagcatga

SEQ ID NO: 2184 - protein, 82 aa, Geobacillus kaustophilus HTA426
MLVLTRKLKEAIQIGDDIEITVLVIQGDQVKLGINAPKHVEIHRKEIYLAIQAENNAASFASKTSLERLTEQLKHLKGGKQA

SEQ ID NO: 2185 - DNA, 189 bp, Idiomarina loihiensis L2TR
  CDS (1)..(189): transl_table=11
atgctaattttaactcgccgtgtaggtgaaacattaatgataggtgatgatgtttcggtcaccgttctcggcgttaagggaaaccaagtacgtattggtgttaatgccccgaaagacgtttccgttcatcgcgaagaaatatacatgcgcattcagtctgagaaagacgatgagcaagacaaagaataa

SEQ ID NO: 2186 - protein, 62 aa, Idiomarina loihiensis L2TR
MLILTRRVGETLMIGDDVSVTVLGVKGNQVRIGVNAPKDVSVHREEIYMRIQSEKDDEQDKE

SEQ ID NO: 2187 - DNA, 240 bp, Bacillus clausii KSM-K16
  CDS (1)..(240): transl_table=11
gtgcttgttttgtcaagaaaggcaggcgaagcgatccgcatcatggatgatatcgaaatcaaggtgttggctgtcgagggcgaccaagtaaagcttggcatttcggctcccaaatctgtcgatgtccaccgtggagaagtatatgaagcgatacaggaggaaaataaacacgctgcaaaaccggtatcagcagaaattttgcaagcgtttattaaccatgccaataaagcaagcacctaa

SEQ ID NO: 2188 - protein, 79 aa, Bacillus clausii KSM-K16
MLVLSRKAGEAIRIMDDIEIKVLAVEGDQVKLGISAPKSVDVHRGEVYEAIQEENKHAAKPVSAEILQAFINHANKAST

SEQ ID NO: 2189 - DNA, 198 bp, Vibrio fischeri ES114
  CDS (1)..(198): transl_table=11
atgctaattttgactcgccgtgtaggtgaaactctgatgattggtgacgaagtaacagttactgtactaggcgttaaaggcaaccaagtacgtattggtgtaaatgcacctaaagaagtatctgttcaccgtgaagagatttatatgcgcattcaagcggaaaaaggtacacctgcggcttcgcaaggtaacttttaa

SEQ ID NO: 2190 - protein, 65 aa, Vibrio fischeri ES114
MLILTRRVGETLMIGDEVTVTVLGVKGNQVRIGVNAPKEVSVHREEIYMRIQAEKGTPAASQGNF

SEQ ID NO: 2191 - DNA, 195 bp, Pseudomonas fluorescens Pf-5
  CDS (1)..(195): transl_table=11
atgctgatactcacccgcaaagtcggtgaaagcataaacatcggtgacgacattacgatcaccattctcggcgtcagcggccagcaagtgcgcattggtatcaacgcgccaaaagacgtcgcggtacaccgggaagaaatctatcaacgcattcaggcaggcctgaccgctccggacaaacgcgaaaccccctga

SEQ ID NO: 2192 - protein, 64 aa, Pseudomonas fluorescens Pf-5
MLILTRKVGESINIGDDITITILGVSGQQVRIGINAPKDVAVHREEIYQRIQAGLTAPDKRETP

SEQ ID NO: 2193 - DNA, 198 bp, Colwellia psychrerythraea 34H
  CDS (1)..(198): transl_table=11
atgcttatattaacaaggcgcgttggcgaaacattaatgattggtgacgaagttactgtgactgttttgggcgttaaaggaaatcaggtaagaataggtgttaatgcaccaaaagaaatctcagtacatcgtgaagaaatttacatgcgcattcaagccgaaaaaggcgataatgaagcttcaggtaataaagtctaa

SEQ ID NO: 2194 - protein, 65 aa, Colwellia psychrerythraea 34H
MLILTRRVGETLMIGDEVTVTVLGVKGNQVRIGVNAPKEISVHREEIYMRIQAEKGDNEASGNKV

SEQ ID NO: 2195 - DNA, 186 bp, Candidatus Blochmannia pennsylvanicus str. BPEN
  CDS (1)..(186): transl_table=11
atgcttattctgactcgacgagttggtgaaactctcgtcattggagatgaggttacagtaactgtattaggtattaaagggaaccaagtccgtattggtgtaaatgctcccaaggagatatctatacaccgagaagaaatttatcaacgtatcaaatctgaaaaatcacaacagaatttgtgctaa

SEQ ID NO: 2196 - protein, 61 aa, Candidatus Blochmannia pennsylvanicus str. BPEN
MLILTRRVGETLVIGDEVTVTVLGIKGNQVRIGVNAPKEISIHREEIYQRIKSEKSQQNLC

SEQ ID NO: 2197 - DNA, 192 bp, Pseudoalteromonas haloplanktis TAC125
  CDS (1)..(192): transl_table=11
atgctaatactaactcgtagagtaggtgaaaccctaatgattggtgacgaagtaaccgttactgttctaggtgttaaagggaatcaagttcgaatcggtgttaacgcaccaaaagacgtttcagtgcatcgtgaagagatttacatgcgtattcaagctgaaaagtctaaccctgaacctggcaatgcttaa

SEQ ID NO: 2198 - protein, 63 aa, Pseudoalteromonas haloplanktis TAC125
MLILTRRVGETLMIGDEVTVTVLGVKGNQVRIGVNAPKDVSVHREEIYMRIQAEKSNPEPGNA

SEQ ID NO: 2199 - DNA, 258 bp, Nitrosococcus oceani ATCC 19707
  CDS (1)..(258): transl_table=11
atgttgattttgactcggcgcgttggcgaagccttgatgattggagatcaggtcacggtgacagtgctaggcgtaaagggtaatcaggtaagaattggggtgacagcacctaaggaagtcacggttcatagggaagagatttacgcacgcattcagcgtgaaaaggagcaagctaacggtagggggcaagtcagcgagtcagagtttacggaagaagcgtttcgggctgcgcctgctatttccggaagtggcgagtaa

SEQ ID NO: 2200 - protein, 85 aa, Nitrosococcus oceani ATCC 19707
MLILTRRVGEALMIGDQVTVTVLGVKGNQVRIGVTAPKEVTVHREEIYARIQREKEQANGRGQVSESEFTEEAFRAAPAISGSGE

SEQ ID NO: 2201 - DNA, 195 bp, Pseudomonas fluorescens Pf0-1
  CDS (1)..(195): transl_table=11
atgctgatactcacccgcaaagtcggtgaaagcataaacattggtgatgacatcacgatcaccattctcggcgtcagcggccagcaagttcgaatcggcatcaatgctccgaagaacgttgcagtacaccgggaagagatctaccagcgcatccaggcgggcctgaccgctccggacaagccacaaacgccctga

SEQ ID NO: 2202 - protein, 64 aa, Pseudomonas fluorescens Pf0-1
MLILTRKVGESINIGDDITITILGVSGQQVRIGINAPKNVAVHREEIYQRIQAGLTAPDKPQTP

SEQ ID NO: 2203 - DNA, 237 bp, Geobacter metallireducens GS-15
  CDS (1)..(237): transl_table=11
atgctggtattaacgagaaaaatgggcgaaacgatcactatcggcgatcagatcaggatcaaggtggtggagatgaaggggaaccaggtgcggctcggcatcgaggctcccggcgacatgcgcatctaccgggaggagatctacctcaaggtccagaaggaaaaccaactggcggccgcctggagcctggaagaccttgagagtgcagtcaactttgccggtgccgggaaggagtaa

SEQ ID NO: 2204 - protein, 78 aa, Geobacter metallireducens GS-15
MLVLTRKMGETITIGDQIRIKVVEMKGNQVRLGIEAPGDMRIYREEIYLKVQKENQLAAAWSLEDLESAVNFAGAGKE

SEQ ID NO: 2205 - DNA, 213 bp, Thiomicrospira crunogena XCL-2
  CDS (1)..(213): transl_table=11
atgttggtattaacacgtcgggtgggtgagacgttgatgattggtgatgatattaaactgacagtggttgggattaaaagtggtcaggttcgattgggaattgacgcgccaaaagatgttcagattcagagagaagagttgcttctgaaaaacgacaaagctgaaaatcaggctgctgagtcattagaaattgagattgttgccgcagattaa

SEQ ID NO: 2206 - protein, 70 aa, Thiomicrospira crunogena XCL-2
MLVLTRRVGETLMIGDDIKLTVVGIKSGQVRLGIDAPKDVQIQREELLLKNDKAENQAAESLEIEIVAAD

SEQ ID NO: 2207 - DNA, 204 bp, Hahella chejuensis KCTC 2396
  CDS (1)..(204): transl_table=11
atgctaatcttaacccgccgtgtaggcgaaactctgatggttggtgatgatgtaaccgttaccgttctgggggtgaaaggtaatcaggtgcgtatcggcgtcaatgcgccgaaggaagtagctgtacaccgcgaagaaatttatcagcgtatccagcgtgagaagtctgctcaggctggcgagtcggaccatcaggacgattaa

SEQ ID NO: 2208 - protein, 67 aa, Hahella chejuensis KCTC 2396
MLILTRRVGETLMVGDDVTVTVLGVKGNQVRIGVNAPKEVAVHREEIYQRIQREKSAQAGESDHQDD

SEQ ID NO: 2209 - DNA, 186 bp, Sodalis glossinidius str. 'morsitans'
  CDS (1)..(186): transl_table=11
atgcttattctgactcgtcgagttggtgaaaccctcatgattggcgatgaggttacggttactgttttaggcgtcaaaggcaaccaagtccgtatcggtgttaatgctcctaaagaagtttctgtgcaccgcgaagaaatataccagcgtatccaggctgagaagtcacaacagactccttactga

SEQ ID NO: 2210 - protein, 61 aa, Sodalis glossinidius str. 'morsitans'
MLILTRRVGETLMIGDEVTVTVLGVKGNQVRIGVNAPKEVSVHREEIYQRIQAEKSQQTPY

SEQ ID NO: 2211 - DNA, 240 bp, Syntrophus aciditrophicus SB
  CDS (1)..(240): transl_table=11
atgctcatcctgacaaggaagttgggagaatccatcgtaataggcgatcagatacaaattacccttctggatattaaaggaaaacatgtccgtatcggtgtcaatgcgcctaaaggcattgccgtccatcgtggtgaagtatatgaaatgatacaggatgaaaacaaaaaggcctttgaatccgacgttaaaaacagtgagatgctgtccgctctatgggcgcaagtgaagatattatag

SEQ ID NO: 2212 - protein, 79 aa, Syntrophus aciditrophicus SB
MLILTRKLGESIVIGDQIQITLLDIKGKHVRIGVNAPKGIAVHRGEVYEMIQDENKKAFESDVKNSEMLSALWAQVKIL

SEQ ID NO: 2213 - DNA, 198 bp, Shewanella denitrificans OS217
  CDS (1)..(198): transl_table=11
atgctgattttgactcgtcgtgtgggcgaaacattaatgataggtgatgaagttactgtgaccgttttaggtgtaaagggtaaccaagtccggatcggtgtgaatgcacctaaagaagtctctgtgcatcgtgaagagatttaccaacggattcaaaacgagaaatctgatccatcttctgaaagcggaaatttctga

SEQ ID NO: 2214 - protein, 65 aa, Shewanella denitrificans OS217
MLILTRRVGETLMIGDEVTVTVLGVKGNQVRIGVNAPKEVSVHREEIYQRIQNEKSDPSSESGNF

SEQ ID NO: 2215 - DNA, 198 bp, Chromohalobacter salexigens DSM 3043
  CDS (1)..(198): transl_table=11
atgctcatcctgacccgtcgcgtcggtgaaacactgatgattggcgacgatatcaccgtcactgtacttggcgtgaaaggcaaccaagtgcgcattggcgtcaatgcgccgaaagacgtggccgtccatcgcgaggaaatctatcagcgcattcagcgcgagaagaccgatagcgaggatgacggttcaagcgtctga

SEQ ID NO: 2216 - protein, 65 aa, Chromohalobacter salexigens DSM 3043
MLILTRRVGETLMIGDDITVTVLGVKGNQVRIGVNAPKDVAVHREEIYQRIQREKTDSEDDGSSV

SEQ ID NO: 2217 - DNA, 246 bp, Psychrobacter cryohalolentis K5
  CDS (1)..(246): transl_table=11
atgttaattttgacacgccgcgtgggcgaaacgctaatgattggcgacgaggtcagtgtgactgtcctaggtgtcaaaggcaatcaagtacgtatcggcgttgatgcgccaaaagatattgccgtacaccgcgaagagatttatcagcgcattcaacatgagcgcacggtacagtcgcaaatgcagcatcttgagcaaggcagctttgcgccttcatttgatgatgaagactattttaatcgctaa

SEQ ID NO: 2218 - protein, 81 aa, Psychrobacter cryohalolentis K5
MLILTRRVGETLMIGDEVSVTVLGVKGNQVRIGVDAPKDIAVHREEIYQRIQHERTVQSQMQHLEQGSFAPSFDDEDYFNR

SEQ ID NO: 2219 - DNA, 186 bp, Baumannia cicadellinicola str. Hc (Homalodisca coagulata)
  CDS (1)..(186): transl_table=11
atgcttattctgactcgtagagttggtgaaaccctcatgattggtgatgaggtaactgtgactattttaggcatcaagggcaaccaggttcgtatcggtgttagtgctcctaaagaagtgtcagtacaccgtgaagaaatataccatcgtattcaatttgagaaatcgcaacagtctatttgctaa

SEQ ID NO: 2220 - protein, 61 aa, Baumannia cicadellinicola str. Hc (Homalodisca coagulata)
MLILTRRVGETLMIGDEVTVTILGIKGNQVRIGVSAPKEVSVHREEIYHRIQFEKSQQSIC

SEQ ID NO: 2221 - DNA, 198 bp, Pseudomonas entomophila L48
  CDS (1)..(198): transl_table=11
atgctgatactcacccgcaaggttggcgaaagtatcgtcatcaacgatgacatcaaagtcaccattctgggcgtcaaggggatgcaagtgaggatcggcatcgatgcgccaaaggatgtccaggtgcaccgtgaagagattttcaagcgtatccaggccggtagcccagccccggagaaaggtgacgagcaccactga

SEQ ID NO: 2222 - protein, 65 aa, Pseudomonas entomophila L48
MLILTRKVGESIVINDDIKVTILGVKGMQVRIGIDAPKDVQVHREEIFKRIQAGSPAPEKGDEHH

SEQ ID NO: 2223 - DNA, 216 bp, Pseudoalteromonas atlantica T6c
  CDS (1)..(216): transl_table=11
atgctaattttgacccgtcgtgttggtgaaaccttaatggtcggtgacgaagtcacagtaacggtattaggggtaaaaggtaatcaggtaagaattggtgttaacgcgcctaaagaagtatctgtgcacagagaggagatttacatgcgaattcaagctgaaaaaaatggtcagcttgcaggacatgactcatcatcatcggatgaagataattaa

SEQ ID NO: 2224 - protein, 71 aa, Pseudoalteromonas atlantica T6c
MLILTRRVGETLMVGDEVTVTVLGVKGNQVRIGVNAPKEVSVHREEIYMRIQAEKNGQLAGHDSSSSDEDN

SEQ ID NO: 2225 - DNA, 189 bp, Alcanivorax borkumensis SK2
  CDS (1)..(189): transl_table=11
atgttaattcttacgcgtcgagttggtgagaccttgatggtgggtgacgaagtcactgttactgtgctgggagtaaaaggcaatcaagttcgtattggtgtgaatgcgccaaaagaagttgccgtgcaccgtgaagaaatttatcagcgaattcagcacgaaaaatcatcagatggcgagtctgcctga

SEQ ID NO: 2226 - protein, 62 aa, Alcanivorax borkumensis SK2
MLILTRRVGETLMVGDEVTVTVLGVKGNQVRIGVNAPKEVAVHREEIYQRIQHEKSSDGESA

SEQ ID NO: 2227 - DNA, 201 bp, Alkalilimnicola ehrlichei MLHE-1
  CDS (1)..(201): transl_table=11
atgttgattctcactcggcgcgttggtgagacgctgatgatcggagacgacgtcagcgtgaccgtgctcggtgtcaagggcaaccaggtgcgtattggcgtgaatgcgccgcgtgatgtgtccgtgcatcgtgaagagatttacgaccgtatccgccacgaaaaagagggtggtccggaagacaagggcaattccgagtag

SEQ ID NO: 2228 - protein, 66 aa, Alkalilimnicola ehrlichei MLHE-1
MLILTRRVGETLMIGDDVSVTVLGVKGNQVRIGVNAPRDVSVHREEIYDRIRHEKEGGPEDKGNSE

SEQ ID NO: 2229 - DNA, 198 bp, Shewanella frigidimarina NCIMB 400
  CDS (1)..(198): transl_table=11
atgctaattttgactcgtcgagtaggcgaaacattaatgatcggtgatgaagtcaccgttactgtgctaggtgttaaaggtaatcaggtacgtattggtgtaaatgcacctaaagaagtatctgttcaccgtgaagagatctaccaacgtattcaatctgagaagtcaggaaccccttctgaaggtggtaattactaa

SEQ ID NO: 2230 - protein, 65 aa, Shewanella frigidimarina NCIMB 400
MLILTRRVGETLMIGDEVTVTVLGVKGNQVRIGVNAPKEVSVHREEIYQRIQSEKSGTPSEGGNY

SEQ ID NO: 2231 - DNA, 231 bp, Syntrophomonas wolfei subsp. wolfei str. Goettingen
  CDS (1)..(231): transl_table=11
atgctgatactgggacggaggaagggtgaaagcatattaatcggtgatgatatagagataactattgtggatatccagggcgattacatccgcatggggattcaagccccccgggaggtaagcatagtccgcaaggagatcaaggagcaaatccgggaggagaacataaaagcagcggaaaaaccggaaggcttgcccgcactactggaagaaatgaagaagtttatataa

SEQ ID NO: 2232 - protein, 76 aa, Syntrophomonas wolfei subsp. wolfei str. Goettingen
MLILGRRKGESILIGDDIEITIVDIQGDYIRMGIQAPREVSIVRKEIKEQIREENIKAAEKPEGLPALLEEMKKFI

SEQ ID NO: 2233 - DNA, 255 bp, Leptospira borgpetersenii serovar Hardjo-bovis L550
  CDS (1)..(255): transl_table=11
gtgctggtcttagcaagacgaaccaacgaatcgattatgatcggtgacgacatagaaattgtcattgtagatataaaaggtgatcaagtgaaaattggagttaaagctccgagaaacgtttcggtacatagagctgaagtttacaaagacattcaggaggaaaatagaaaggcggcggaaacaaaaattaaaccggaagatcttggtaagatcggagacattttaaaaaagaaggattccgggaaaaaaggctga

SEQ ID NO: 2234 - protein, 84 aa, Leptospira borgpetersenii serovar Hardjo-bovis L550
MLVLARRTNESIMIGDDIEIVIVDIKGDQVKIGVKAPRNVSVHRAEVYKDIQEENRKAAETKIKPEDLGKIGDILKKKDSGKKG

SEQ ID NO: 2235 - DNA, 189 bp, Aeromonas hydrophila subsp. hydrophila ATCC 7966
  CDS (1)..(189): transl_table=11
atgcttattttgactcgtcgtgtaggggaaaccctgatgattggtgacgaagtgactgtcaccgtactgggcgtgaaaggcaatcaggttcgtatcggtgtgaacgcaccgaaagaggtctccgtacaccgcgaagagatctaccagcgcatccaggccgagaaagttccgggccaatccggcttctaa

SEQ ID NO: 2236 - protein, 62 aa, Aeromonas hydrophila subsp. hydrophila ATCC 7966
MLILTRRVGETLMIGDEVTVTVLGVKGNQVRIGVNAPKEVSVHREEIYQRIQAEKVPGQSGF

SEQ ID NO: 2237 - DNA, 252 bp, Nocardioides sp. JS614
  CDS (1)..(252): transl_table=11
atgctggtcttgagccgtcgtgccggagagagcgtggtgctcggcgaggacgtcgtcgtgacgatcctcgaggtccgcggcgacgtcgtccgggtcggcatcgacgcgccccgctcggtcagggtgcaccgcgccgagctgctcgcccagctcgaggagaccaaccgccaggccgcgtcccccagcgaggacgtgatcgccaacctggcccgcgccctcgaccacggcaccggcaccgacccctcctcctga

SEQ ID NO: 2238 - protein, 83 aa, Nocardioides sp. JS614
MLVLSRRAGESVVLGEDVVVTILEVRGDVVRVGIDAPRSVRVHRAELLAQLEETNRQAASPSEDVIANLARALDHGTGTDPSS

SEQ ID NO: 2239 - DNA, 195 bp, Shewanella amazonensis SB2B
  CDS (1)..(195): transl_table=11
atgctgattttgacacgtcgtgttggcgaaacactgatgatcggtgacgaagtcacggtgacagtgctgggtgtaaagggaaatcaggtgcgcatcggtgtgaatgcacctaaagaagtgtctgttcaccgcgaagagatttaccagcgtattcaatctgaaaaaacaggttcgcccgagggcggtaactactga

SEQ ID NO: 2240 - protein, 64 aa, Shewanella amazonensis SB2B
MLILTRRVGETLMIGDEVTVTVLGVKGNQVRIGVNAPKEVSVHREEIYQRIQSEKTGSPEGGNY

SEQ ID NO: 2241 - DNA, 177 bp, Psychromonas ingrahamii 37
  CDS (1)..(177): transl_table=11
atgcttatattaacacgccgagttggtgaaacactgatgataggcgataatgttaccgtgaccgttttaggtgtaaaaggtaatcaagtaagaattggtgtaaacgcaccgaaagaagtatcggttcaccgtgaagaaatttatatgcggattcaagccgaaaaaagcggtgaataa

SEQ ID NO: 2242 - protein, 58 aa, Psychromonas ingrahamii 37
MLILTRRVGETLMIGDNVTVTVLGVKGNQVRIGVNAPKEVSVHREEIYMRIQAEKSGE

SEQ ID NO: 2243 - DNA, 198 bp, Marinobacter aquaeolei VT8
  CDS (1)..(198): transl_table=11
atgttgattttgactcgccgtgttggcgaaaccctcatgatcggcgacgaaattaccgtcaccgttctgggtgtaaaggggaatcaggtacgcatcggtgtgaacgcgccaaaagatgtggcggttcaccgcgaagaaatctatcagcgaattcaatctgaaaaaggctccgaagagccggaatcgggcaatcgttga

SEQ ID NO: 2244 - protein, 65 aa, Marinobacter aquaeolei VT8
MLILTRRVGETLMIGDEITVTVLGVKGNQVRIGVNAPKDVAVHREEIYQRIQSEKGSEEPESGNR

SEQ ID NO: 2245 - DNA, 198 bp, Shewanella sp. W3-18-1
  CDS (1)..(198): transl_table=11
atgctgattttgactcgtcgtgttggcgaaacactgatgattggtgacgaagtcactgttacagtgctgggggtaaaaggaaatcaggtgcgtatcggtgttaacgcacctaaagaggtttctgttcaccgtgaagaaatctatcaacgtatccaatctgaaaaatcgggttcaccatcggaaggtggtaacttttaa

SEQ ID NO: 2246 - protein, 65 aa, Shewanella sp. W3-18-1
MLILTRRVGETLMIGDEVTVTVLGVKGNQVRIGVNAPKEVSVHREEIYQRIQSEKSGSPSEGGNF

SEQ ID NO: 2247 - DNA, 216 bp, Xylella fastidiosa Dixon
  CDS (1)..(216): transl_table=11
atgttgatcctgactcgtcgttctggtgaaacgttgatgataggtgatcaggtcaccgtaacggtgcttggtgtaaagggtaaccaagtgcgtgttggtatcaatgctcctaagcatgtggcagtgcatcgtgaagagatctatcatcgtattcagcgtggtgacgagcttgcgtgttcttctggaacgcggggagatagcggctcttccatataa

SEQ ID NO: 2248 - protein, 71 aa, Xylella fastidiosa Dixon
MLILTRRSGETLMIGDQVTVTVLGVKGNQVRVGINAPKHVAVHREEIYHRIQRGDELACSSGTRGDSGSSI

SEQ ID NO: 2249 - DNA, 234 bp, Desulfitobacterium hafniense
  CDS (1)..(234): transl_table=11
atgctggcactcacccgtaaagcaggagagcgcatcgtgatcggcgacaacatcgtcgtaaccgtcgtcgctataaaaggggacagtatccgcctcaccattgatgctccgaaagagatcaaaatctaccggggtgaaatctatgatgccattgcagcggagaataaagaggccgccgttctcatggatctggcagagctgactgctttaaaggagtttcatatcaaaaaatag

SEQ ID NO: 2250 - protein, 77 aa, Desulfitobacterium hafniense
MLALTRKAGERIVIGDNIVVTVVAIKGDSIRLTIDAPKEIKIYRGEIYDAIAAENKEAAVLMDLAELTALKEFHIKK

SEQ ID NO: 2251 - DNA, 183 bp, Haemophilus somnus 129PT
  CDS (1)..(183): transl_table=11
atgctgatattgaccagaaaagttggcgagagcttactcattggcgacgatatttctatcacaatattaaatatacgtggcaatcaagtaaaaatcggtgttgaagcaccgaaagaggtttctgttcatagagaagaaatttatcatcgtattagagatgttaaagatgaacagcagttgtaa

SEQ ID NO: 2252 - protein, 60 aa, Haemophilus somnus 129PT
MLILTRKVGESLLIGDDISITILNIRGNQVKIGVEAPKEVSVHREEIYHRIRDVKDEQQL

SEQ ID NO: 2253 - DNA, 195 bp, Pseudomonas syringae pv. syringae B728a
  CDS (1)..(195): transl_table=11
atgctggtactgacgcgggaaattggcgaaacgttttccattggtgatgacatcaccgtgcagattctgggcatcaacggcaatcaggtcaggctcgggatcaatgccccgaaagacgtcaaggttcaccgcgccgaagtctacaagcgaatcgccaggacgcttgcgcaacaggcaacaacgccgcttcggtga

SEQ ID NO: 2254 - protein, 64 aa, Pseudomonas syringae pv. syringae B728a
MLVLTREIGETFSIGDDITVQILGINGNQVRLGINAPKDVKVHRAEVYKRIARTLAQQATTPLR

SEQ ID NO: 2255 - DNA, 237 bp, Desulfovibrio desulfuricans G20
  CDS (1)..(237): transl_table=11
atgcttatattgacgcgccgtccgggagagagcctgtacctgggcgataccatcaagatcactgtcctgagtgtgcagggcaagcagatcaagataggtctcgatgtgcccggagacatgaccgtgtaccgggaagaggtatacatgcgcgttcgtgaccagaaccgtcaggcacttgaaaccagcgatgcggacctgctcgcagcgactcaattatggcacgcgaaaaagaaatag

SEQ ID NO: 2256 - protein, 78 aa, Desulfovibrio desulfuricans G20
MLILTRRPGESLYLGDTIKITVLSVQGKQIKIGLDVPGDMTVYREEVYMRVRDQNRQALETSDADLLAATQLWHAKKK

SEQ ID NO: 2257 - DNA, 246 bp, Psychrobacter sp. 273-4
  CDS (1)..(246): transl_table=11
atgttaattttgacacgccgcgtgggcgaaacgctaatgattggcgacgaggtcagtgtgactgtcctaggtgtaaaaggcaatcaagtacgtatcggcgttgatgcgccaaaagatattgccgtacaccgcgaagagatttatcagcgcatccaacatgagcgcacgatacagtcgcaaatgcagcatcttgagcaaggtagctttgcgccttcatttgatgacgaagactattttaatcgctaa

SEQ ID NO: 2258 - protein, 81 aa, Psychrobacter sp. 273-4
MLILTRRVGETLMIGDEVSVTVLGVKGNQVRIGVDAPKDIAVHREEIYQRIQHERTIQSQMQHLEQGSFAPSFDDEDYFNR

SEQ ID NO: 2259 - DNA, 228 bp, Exiguobacterium sp. 255-15
  CDS (1)..(228): transl_table=11
atgctcgtcttaaaacgcaaaacgggagaagcgattcaaatcggggatgacatcgagctgacgattctcgccatcgaaggggatcaagtcaaactaggcatccatgcgccccggcaaatcgacattcaccggaaagaaatctatctcgcgattcaggatgaaaacgcggaagcctcacagagcaccggtctgatgagccagttgctgaaacaacggaccgattcataa

SEQ ID NO: 2260 - protein, 75 aa, Exiguobacterium sp. 255-15
MLVLKRKTGEAIQIGDDIELTILAIEGDQVKLGIHAPRQIDIHRKEIYLAIQDENAEASQSTGLMSQLLKQRTDS

SEQ ID NO: 2261 - DNA, 186 bp, Pseudomonas fluorescens PfO-1
  CDS (1)..(186): transl_table=11
atgcttgtactcagccgtgttgtcggtgaactgatttccatcggcgacaacatcactctgcgcgttctggcggtcaacggctccagcgtgcggttcggcgtcgaagcgccggagcaggtcggcgtgcatcgcgccgaggtctacgaacggatccagcgcaaacaggccagcggcaagggccgctga

SEQ ID NO: 2262 - protein, 61 aa, Pseudomonas fluorescens PfO-1
MLVLSRVVGELISIGDNITLRVLAVNGSSVRFGVEAPEQVGVHRAEVYERIQRKQASGKGR

SEQ ID NO: 2263 - DNA, 234 bp, Magnetococcus sp. MC-1
  CDS (1)..(234): transl_table=11
atgctgattttgacacggagagtcggtgagagtctgcacattggggatgatattaagatcaccctgttgggcatcaaggggaatcaggtgcgcatcggcattgacgcgccgcgagatgtggaggtgcatcgtgaggagatttacgaccgcatccgccgcgagacgcgcaaggccaaccgccgcaccgccgaagagaccctggatcaggcgtcgcgcctgctttcgcaaaaatag

SEQ ID NO: 2264 - protein, 77 aa, Magnetococcus sp. MC-1
MLILTRRVGESLHIGDDIKITLLGIKGNQVRIGIDAPRDVEVHREEIYDRIRRETRKANRRTAEETLDQASRLLSQK

SEQ ID NO: 2265 - DNA, 228 bp, Clostridium thermocellum ATCC 27405
  CDS (1)..(228): transl_table=11
atgctggttctgacgagaaagaaaaatgaatccataattattaatgacaatattgagattactgttgttgacattcaaggggagcaggtgcgtatcggcattaatgcgccgaaaagcatatctatttacaggaaggagatatacctggaaatacaggctgaaaacaaaaaggctgcggaaattaagaatgtggatctgaaggaggacttaaaggattttttgaagtaa

SEQ ID NO: 2266 - protein, 75 aa, Clostridium thermocellum ATCC 27405
MLVLTRKKNESIIINDNIEITVVDIQGEQVRIGINAPKSISIYRKEIYLEIQAENKKAAEIKNVDLKEDLKDFLK

SEQ ID NO: 2267 - DNA, 195 bp, Microbulbifer degradans 2-40
  CDS (1)..(195): transl_table=11
atgttaatattaacccgccgaataggtgaaaccttaatggttggtgacgaagttaccgtaaccgttttgggtgttaagggtaatcaggttcgtattggtgttaatgcaccaaaagaaatcgcggttcaccgagaagaaatttatcaacgcatacagcgtgagaagcaggagcaaggcgagcctggcaacagttaa

SEQ ID NO: 2268 - protein, 64 aa, Microbulbifer degradans 2-40
MLILTRRIGETLMVGDEVTVTVLGVKGNQVRIGVNAPKEIAVHREEIYQRIQREKQEQGEPGNS

SEQ ID NO: 2269 - DNA, 192 bp, Alteromonadales bacterium TW-7
  CDS (1)..(192): transl_table=11
atgctaatactaactcgtagagtaggtgaaacccttatgatcggtgacgaagtaacagtgaccgttttaggagttaaaggaaatcaagttcgaattggtgtaaatgcaccaaaagacgtttcagtgcatcgtgaagagatttacatgcgtatacaagctgaaaagtctaaccctaatccgggcaatgcttaa

SEQ ID NO: 2270 - protein, 63 aa, Alteromonadales bacterium TW-7
MLILTRRVGETLMIGDEVTVTVLGVKGNQVRIGVNAPKDVSVHREEIYMRIQAEKSNPNPGNA

SEQ ID NO: 2271 - DNA, 219 bp, marine gamma proteobacterium HTCC2143
  CDS (1)..(219): transl_table=11
atgctaattttaacgagaagagtcggtgaaaacctaatcatcggcgatgacgtcactatatctgttttgggtattaagggaaatcaggtgcggataggtatcgatgccccgaagaatgtgcaagttcatcgtgaagagatatatgatcgaattcaagctgagaaatctgcgggagatcaactcagcaatgaagttaacggaaacgttgccgataactag

SEQ ID NO: 2272 - protein, 72 aa, marine gamma proteobacterium HTCC2143
MLILTRRVGENLIIGDDVTISVLGIKGNQVRIGIDAPKNVQVHREEIYDRIQAEKSAGDQLSNEVNGNVADN

SEQ ID NO: 2273 - DNA, 189 bp, marine gamma proteobacterium HTCC2143
  CDS (1)..(189): transl_table=11
atgttgattttaacccgtcgtgttggcgaaacattaatggtaggcgaagaagtcaccgtgactgtactggaggttaaaggaagtcaggttcggattggtataaatgcgccgaaagaaatctctgttcatcgggaagaaatataccagcgaatacagaatgaatctgacgataacgcgggcaacaaataa

SEQ ID NO: 2274 - protein, 62 aa, marine gamma proteobacterium HTCC2143
MLILTRRVGETLMVGEEVTVTVLEVKGSQVRIGINAPKEISVHREEIYQRIQNESDDNAGNK

SEQ ID NO: 2275 - DNA, 213 bp, Thermosinus carboxydivorans Nor1
  CDS (1)..(213): transl_table=11
atgctggccctaactagaaagtgcggcgagcgcatcgttatcggcgataacatcaccgtcaccgtcgttgacgtcaagggcgacagcgtgcgcctcgccatcgacgccccgcgcgacgtgaaagtgtggcgcggcgaactttacgacgccatcgccgccgaaaacaaagccgccgccgtcccggtggatttgaaagttgagtttaaccgataa

SEQ ID NO: 2276 - protein, 70 aa, Thermosinus carboxydivorans Nor1
MLALTRKCGERIVIGDNITVTVVDVKGDSVRLAIDAPRDVKVWRGELYDAIAAENKAAAVPVDLKVEFNR

SEQ ID NO: 2277 - DNA, 240 bp, Bacillus coagulans 36D1
  CDS (1)..(240): transl_table=11
atgctgattttatcgcggaaaaaaggcgagtcgatccaaatcggcgatgacattgaaatcactatcgccgcgatccatggcgaccaggtcaaaatcggcatcaacgccccaaaacatgttgaaattcaccggaaagaagtgtacttggacatacaggaagaaaacgcgaacgccgcaaaaaatatcgaaggcctgctccacctgcttgcccaatccaagaaaggcagcgggggcgcgtga

SEQ ID NO: 2278 - protein, 79 aa, Bacillus coagulans 36D1
MLILSRKKGESIQIGDDIEITIAAIHGDQVKIGINAPKHVEIHRKEVYLDIQEENANAAKNIEGLLHLLAQSKKGSGGA

SEQ ID NO: 2279 - DNA, 219 bp, Bacillus sp. B14905
  CDS (1)..(219): transl_table=11
atgctagtcctttcgcgaaaaaaagatgagtcgatcatgattggtgatcaaattgaaataaagattttagccgtagaaggcgagcaaattaagctaggtattgttgccccaaaaacggtaaaagtacatcgttcggaagtttttgaagcaatacaggctcaaaataaagaagctctttcttcaacaacaaactttttagagcaattgaagaaaaaataa

SEQ ID NO: 2280 - protein, 72 aa, Bacillus sp. B14905
MLVLSRKKDESIMIGDQIEIKILAVEGEQIKLGIVAPKTVKVHRSEVFEAIQAQNKEALSSTTNFLEQLKKK

SEQ ID NO: 2281 - DNA, 198 bp, Marinobacter sp. ELB17
  CDS (1)..(198): transl_table=11
atgttgattttaacgcgccgcgtaggcgagaccctgatggtaggtgacgaaataaccgtcactgtgcttggggtaaaaggaaaccaggtacggattggtgtgaatgcacccaaagaagttgctgttcaccgcgaagaaatctatcagcgcattcaggcggagaaaaattccgatgaggctgagccgggcaaccactag

SEQ ID NO: 2282 - protein, 65 aa, Marinobacter sp. ELB17
MLILTRRVGETLMVGDEITVTVLGVKGNQVRIGVNAPKEVAVHREEIYQRIQAEKNSDEAEPGNH

SEQ ID NO: 2283 - DNA, 183 bp, Idiomarina baltica OS145
  CDS (1)..(183): transl_table=11
atgttaattcttactcgccgcaatggtgaaacgttaaaaataggcgacgatatcagcgttaccgttctcggtattaaagggaatcaggtgcgtctgggtgttgatgccccgaaaaatgttgacgttcaccgggaagagattttcttgcgcattaagtctgagtctgacgtagagagaaagtag

SEQ ID NO: 2284 - protein, 60 aa, Idiomarina baltica OS145
MLILTRRNGETLKIGDDISVTVLGIKGNQVRLGVDAPKNVDVHREEIFLRIKSESDVERK

SEQ ID NO: 2285 - DNA, 192 bp, Idiomarina baltica OS145
  CDS (1)..(192): transl_table=11
atgttaattttgactcgccgtgtaggcgaaacgctgatgataggagatgatgtctcggtcacagtgttaggtgttaaaggtaatcaagttcgaatcggcgtcaacgcacccaaagacgtctctgtgcatcgagaagaaatttatatgcggatccagtcagagacggatgaggagaagccggataaagaataa

SEQ ID NO: 2286 - protein, 63 aa, Idiomarina baltica OS145
MLILTRRVGETLMIGDDVSVTVLGVKGNQVRIGVNAPKDVSVHREEIYMRIQSETDEEKPDKE

SEQ ID NO: 2287 - DNA, 222 bp, Blastopirellula marina DSM 3645
  CDS (1)..(222): transl_table=11
atgctcgtcttgtcgaggcatcgtgacgaaagcatcatgatcggcgataacatcgtcatcacaatcgtcgatattcgcggcgacaaagtccgtcttggcatcgccgccccccaggatattcccgtacatcgccaagaggtgtacgaagcgattcaacgcgaaaaccaacaagcgtctcgtttacagccgaacgaagccgccgcactccgtaagacgaagtag

SEQ ID NO: 2288 - protein, 73 aa, Blastopirellula marina DSM 3645
MLVLSRHRDESIMIGDNIVITIVDIRGDKVRLGIAAPQDIPVHRQEVYEAIQRENQQASRLQPNEAAALRKTK

SEQ ID NO: 2289 - DNA, 210 bp, Blastopirellula marina DSM 3645
  CDS (1)..(210): transl_table=11
atgctggttctctcaaggaaaaagaacgagagtattgtcatcaacaatgacattacgatcgtggtcgtggaaattcgcggcgacaaggtacgcttgggcgtggaagctcccaaagaagtccctgtgcatcgccgcgaggtttatgatgcgattttgcgcaacgagtctcaggaaaaagcgggcgccgacacgcccagcgccgaaggctag

SEQ ID NO: 2290 - protein, 69 aa, Blastopirellula marina DSM 3645
MLVLSRKKNESIVINNDITIVVVEIRGDKVRLGVEAPKEVPVHRREVYDAILRNESQEKAGADTPSAEG

SEQ ID NO: 2291 - DNA, 192 bp, Congregibacter litoralis KT71
  CDS (1)..(192): transl_table=11
atgctaatcctgacacggaaagagggcgaatcgctgagactgggtgatgacatcacggtcaccgtggtcagcgtaaagggcggtaacgtgcgtctgggtatcaacgcgccccgcgatctggcggtgcatcgcgaggagatctacgaaaaaatcgccgaaggtgatggtaactccgtcagcgatgatggctag

SEQ ID NO: 2292 - protein, 63 aa, Congregibacter litoralis KT71
MLILTRKEGESLRLGDDITVTVVSVKGGNVRLGINAPRDLAVHREEIYEKIAEGDGNSVSDDG

SEQ ID NO: 2293 - DNA, 192 bp, Reinekea sp. MED297
  CDS (1)..(192): transl_table=11
atgctgattttaacgcgccgagttggtgaaacattaatgattggcgatgaggtaacggtgactgtactcggggtcaagggtaatcaggttcgaatcggggtgaatgcgccgaaagatgtcgcagttcaccgcgaagaaatttatcagcgtattcagaaggaaatggggcatccggaagaggatgacgagtaa

SEQ ID NO: 2294 - protein, 63 aa, Reinekea sp. MED297
MLILTRRVGETLMIGDEVTVTVLGVKGNQVRIGVNAPKDVAVHREEIYQRIQKEMGHPEEDDE

SEQ ID NO: 2295 - DNA, 210 bp, Nitrococcus mobilis Nb-231
  CDS (1)..(210): transl_table=11
atgcttattctcactcggcgagttggtgagactttgatgattggcgacgatgtgaccgtgaccgtattgggagtgaaaggcaatcaggtccgaatcggtgttaatgcgcccaagcatgtctcggtccatcgtgaagaaatctatgatcgaatccagcgcgaacagcaggagaaatccgcatccggcggcgagagcgatcgttcggaatga

SEQ ID NO: 2296 - protein, 69 aa, Nitrococcus mobilis Nb-231
MLILTRRVGETLMIGDDVTVTVLGVKGNQVRIGVNAPKHVSVHREEIYDRIQREQQEKSASGGESDRSE

SEQ ID NO: 2297 - DNA, 189 bp, Pseudoalteromonas tunicata D2
  CDS (1)..(189): transl_table=11
atgctaattctgactcgtcgcgttggagaaacccttatgataggggacgaagttacagttacggtacttggtgttaaaggtaatcaagtacgtatcggtgtaaatgcacctaaagatgtttcagtacatcgtgaagaaatttatatgcgtattcaagctgaaaaaacaaacccaatgggtaatgaataa

SEQ ID NO: 2298 - protein, 62 aa, Pseudoalteromonas tunicata D2
MLILTRRVGETLMIGDEVTVTVLGVKGNQVRIGVNAPKDVSVHREEIYMRIQAEKTNPMGNE

SEQ ID NO: 2299 - DNA, 240 bp, Vibrio cholerae MZO-2
  CDS (1)..(240): transl_table=11
atgtggttgcaagaaaatacagagattactcaaggagctaagaatgcttatttgactcgccgtgttggcgaaaccctgatgatcggtgacgaagtgaccgtgacagtattaggtgtaaaaggtaaccaagtccgtatcggtgtaaacgcaccgaaagaagtgtctgtgcaccgtgaagaaatctacatgcgcattcaagctgaaaaaggtaatggtggcgttgcgtctggcaactactaa

SEQ ID NO: 2300 - protein, 79 aa, Vibrio cholerae MZO-2
MWLQENTEITQGAKNAYLTRRVGETLMIGDEVTVTVLGVKGNQVRIGVNAPKEVSVHREEIYMRIQAEKGNGGVASGNY

SEQ ID NO: 2301 - DNA, 201 bp, Planctomyces maris DSM 8797
  CDS (1)..(201): transl_table=11
atgttagtgctcacaagacgcaaggatgaagagatcattattaacaataatatctccattaaagtactgtcagttaagggtaatcgagttcgactgggtgttgaggcacctgatgatgtttcagtgaatagagctgagattcgaaagctggtacaacagtttgaggttgaatgtattcccgcgcaaggttgtggtctgtaa

SEQ ID NO: 2302 - protein, 66 aa, Planctomyces maris DSM 8797
MLVLTRRKDEEIIINNNISIKVLSVKGNRVRLGVEAPDDVSVNRAEIRKLVQQFEVECIPAQGCGL

SEQ ID NO: 2303 - DNA, 198 bp, Planctomyces maris DSM 8797
  CDS (1)..(198): transl_table=11
atgcttgtcctcagccgaaaaaaagacgaaaagatcattattggagattccatcactttaatggtgattgaaatcaaaaacgataaagtgcgacttggtattgaagcaccaaaagatgtgaccgtacatcgggaagaagtctacgccgccattaaagaacagagcgagcacgacaacaccaactgcgaaactccgtaa

SEQ ID NO: 2304 - protein, 65 aa, Planctomyces maris DSM 8797
MLVLSRKKDEKIIIGDSITLMVIEIKNDKVRLGIEAPKDVTVHREEVYAAIKEQSEHDNTNCETP

SEQ ID NO: 2305 - DNA, 234 bp, Planctomyces maris DSM 8797
  CDS (1)..(234): transl_table=11
atgttggtcttatcccgcaaagtcaacgaaacgattcaaattggcgacaacatccagatcaccattctggataccaaaaaaggagccgtccgcatcggcatcgccgctccacgggagattcagatttcccgtcccgagtatgccaagcagacggtgacacaggaagtttccactcaggagacaacccgggaaaactcacagttttctctcgctttttgtggcacgatttcctga

SEQ ID NO: 2306 - protein, 77 aa, Planctomyces maris DSM 8797
MLVLSRKVNETIQIGDNIQITILDTKKGAVRIGIAAPREIQISRPEYAKQTVTQEVSTQETTRENSQFSLAFCGTIS

SEQ ID NO: 2307 - DNA, 246 bp, Bacillus sp. SG-1
  CDS (1)..(246): transl_table=11
atgccgggcagaaggggtgaggagatgctggtcttaacgaggaaaacaggagaagccattcaaataggggacgatatcgaaataagcattgtttcgataaaaggtgaccaggtcaagctggggatcaacgcaccaaaaaacatcgaaatccatcggaaagagatatacctgtccatccaggaagaaaatgctgaagcatcaaaaggcatcgagaaccttttgaacattttgccaaaaaaagaataa

SEQ ID NO: 2308 - protein, 81 aa, Bacillus sp. SG-1
MPGRRGEEMLVLTRKTGEAIQIGDDIEISIVSIKGDQVKLGINAPKNIEIHRKEIYLSIQEENAEASKGIENLLNILPKKE

SEQ ID NO: 2309 - DNA, 192 bp, Marinobacter algicola DG893
  CDS (1)..(192): transl_table=11
atggcactcatcttaacgcgtcgcccaggcgagacgatcatcatcgaaaccccgagcggggaagtggtggaggtcaccgtagtgggcacgaacggccctcaggtccgcatgggcatcagcgcacccaagcacacgaccattgaccgtgaggaaatctacaggcgcaagcagcgggagaaggctcatggctga

SEQ ID NO: 2310 - protein, 63 aa, Marinobacter algicola DG893
MALILTRRPGETIIIETPSGEVVEVTVVGTNGPQVRMGISAPKHTTIDREEIYRRKQREKAHG

SEQ ID NO: 2311 - DNA, 198 bp, Marinobacter algicola DG893
  CDS (1)..(198): transl_table=11
atgttgatattgacccgccgtgttggcgaaaccctgatggtcggtgatgagatcaccgtaaccgtccttggggtgaaggggaaccaggttcgcattggtgtaaacgcccccaaagaagtggcggttcaccgcgaagaaatctatcagcggattcagagcgagaaaggttctgaagagccggagcccggcaacagctga

SEQ ID NO: 2312 - protein, 65 aa, Marinobacter algicola DG893
MLILTRRVGETLMVGDEITVTVLGVKGNQVRIGVNAPKEVAVHREEIYQRIQSEKGSEEPEPGNS

SEQ ID NO: 2313 - DNA, 192 bp, Moritella sp. PE36
  CDS (1)..(192): transl_table=11
atgctaatattgacgcgccgtgttggcgaaacgcttatgattggtgatgaagttactgttacagttctaggtgtgaaaggaaatcaagttcgtatcggtgttaatgcgcctaaagaagtatctgttcaccgtgaagagatctacatgcgaattcaagcagaaaaaggcgaaagccctgaaggcaacttctaa

SEQ ID NO: 2314 - protein, 63 aa, Moritella sp. PE36
MLILTRRVGETLMIGDEVTVTVLGVKGNQVRIGVNAPKEVSVHREEIYMRIQAEKGESPEGNF

SEQ ID NO: 2315 - DNA, 249 bp, Plesiocystis pacifica SIR-1
  CDS (1)..(249): transl_table=11
atgctgacactgacgagaaaggccggccagaagatccgcatcggcgaggacatcgagatcgtcgtccgagagattcgtggtcggcaggtccgcctgggcatctctgcccccgagggtctggccgtgtaccgcgaggagctctaccagcagatcctcgccgagggcggtgaccccagcgccgatccgccgctcaagcaccgcgcccgcaagcccgaccccaaggcgggcagcgaagacaccggcgagtga

SEQ ID NO: 2316 - protein, 82 aa, Plesiocystis pacifica SIR-1
MLTLTRKAGQKIRIGEDIEIVVREIRGRQVRLGISAPEGLAVYREELYQQILAEGGDPSADPPLKHRARKPDPKAGSEDTGE

SEQ ID NO: 2317 - DNA, 201 bp, Beggiatoa sp. PS
  CDS (1)..(201): transl_table=11
atgttaattttgacaaggcgtgttggtgaatcattgatgattggagacgagatatcggtaacggtgttaggtgttaagggtaatcaagtacgaattggtgtcaacgcacctcgagatgttgcggtccatcgtgaggaaatttatcatcgaattcaacgggaaaaagtggaacccgatgaaatcaaagatgatgatgattaa

SEQ ID NO: 2318 - protein, 66 aa, Beggiatoa sp. PS
MLILTRRVGESLMIGDEISVTVLGVKGNQVRIGVNAPRDVAVHREEIYHRIQREKVEPDEIKDDDD

SEQ ID NO: 2319 - DNA, 189 bp, Pseudomonas fluorescens
  CDS (1)..(189): transl_table=11
atggtgattctgactcgtcggtgtgcagaaagcctgattattggcgatggcgaaatcaccgtgaccgtgctcggcgtcaaaggaaaccaagtgcgtatcggcgtcaacgccccgaaagaggttgctgtacaccgcgaggaaatttacctgcgtatcaagaaagagaaggacgaagaaccaagccattaa

SEQ ID NO: 2320 - protein, 62 aa, Pseudomonas fluorescens
MVILTRRCAESLIIGDGEITVTVLGVKGNQVRIGVNAPKEVAVHREEIYLRIKKEKDEEPSH

SEQ ID NO: 2321 - DNA, 219 bp, Rickettsiella grylli
  CDS (1)..(219): transl_table=11
atgcttattttgacacggcgtattggagaaacacttattattggtgacgatgttacagtaactgtgctgggcattaaagggcatcaggtaagattaggtattaacgcccctaaagaagtttcagttcatcgcgaagaaatttataagcgaattcaagaagaaaaacaaaaacaagagggacacgttgatgaagaagattcggaaagcagcaaagattaa

SEQ ID NO: 2322 - protein, 72 aa, Rickettsiella grylli
MLILTRRIGETLIIGDDVTVTVLGIKGHQVRLGINAPKEVSVHREEIYKRIQEEKQKQEGHVDEEDSESSKD

SEQ ID NO: 2323 - DNA, 198 bp, Vibrio campbellii AND4
  CDS (1)..(198): transl_table=11
atgctaattttgactcgccgcgtaggcgaaacactgatgatcggtgatgaagtaactgtaactgtactaggggtaaaaggtaaccaagtacgcattggcgttaacgctccaaaagaggtttctgttcaccgagaagaaatctacatgcgcattcaagctgaaaaaggcaacggcaacgtgccttctgggaactactaa

SEQ ID NO: 2324 - protein, 65 aa, Vibrio campbellii AND4
MLILTRRVGETLMIGDEVTVTVLGVKGNQVRIGVNAPKEVSVHREEIYMRIQAEKGNGNVPSGNY

SEQ ID NO: 2325 - DNA, 198 bp, Shewanella benthica KT99
  CDS (1)..(198): transl_table=11
atgctgatattgactcgtcgtgttggtgaaacactgatgattggtgatgaagtgactgtcactgttttaggcgtcaagggtaatcaagtacgtattggtgttaatgcacctaaagaaatatctgtgcatcgtgaagagatttaccagcgtattcagtctgaaaaagcagacaatgcgtctgagggtggaaatatctag

SEQ ID NO: 2326 - protein, 65 aa, Shewanella benthica KT99
MLILTRRVGETLMIGDEVTVTVLGVKGNQVRIGVNAPKEISVHREEIYQRIQSEKADNASEGGNI

SEQ ID NO: 2327 - DNA, 213 bp, Coxiella burnetii RSA 334
  CDS (1)..(213): transl_table=11
atgttaatactaaccagacgtatcggtgaatcggtaatcattagagacgacatcaagataaccgttcttggtgtaaaaggtaaccaagtccgtctagggatagacgccccgaaagatatttctgttcaccgcgaagaaatttatgagcggattcaacaggagaaattggctcagtcagaagaccagggtgagaaggctgacgaatttgaataa

SEQ ID NO: 2328 - protein, 70 aa, Coxiella burnetii RSA 334
MLILTRRIGESVIIRDDIKITVLGVKGNQVRLGIDAPKDISVHREEIYERIQQEKLAQSEDQGEKADEFE

SEQ ID NO: 2329 - DNA, 186 bp, Serratia plymuthica
  CDS (1)..(186): transl_table=11
atgttaattctgactcgtcgagttggtgaaaccctcatgattggcgatgaggtcactgtcacagtgttaggggtcaagggcaaccaggttcgtattggtgtgaatgcccctaaagaggtgtcagtgcaccgcgaagaaatctatcagcgcattcaggcagagaagtctcaacagacgaccttctga

SEQ ID NO: 2330 - protein, 61 aa, Serratia plymuthica
MLILTRRVGETLMIGDEVTVTVLGVKGNQVRIGVNAPKEVSVHREEIYQRIQAEKSQQTTF

SEQ ID NO: 2331 - DNA, 240 bp, Paenibacillus sp. JDR-2
  CDS (1)..(240): transl_table=11
atgctcgtattatctcgtaagacggatgaatcgattatgattggcggcaatattgagattgtcgtgcttggtgtcgagggcgagacggtaaagctgggtattcgcgcccctaaggatattgaaatattccgcaaagaactgtatatgaacattcaagcttctaaccgggaagcagcgagcagtcttctagctattaacgatgttgttcagctgctcaaacaaaatcgctcagacaaataa

SEQ ID NO: 2332 - protein, 79 aa, Paenibacillus sp. JDR-2
MLVLSRKTDESIMIGGNIEIVVLGVEGETVKLGIRAPKDIEIFRKELYMNIQASNREAASSLLAINDVVQLLKQNRSDK

SEQ ID NO: 2333 - DNA, 249 bp, Geobacillus sp. WCH70
  CDS (1)..(249): transl_table=11
atgcttgtactaacgcgcaaactgaaagaagtgattcaaatcggcgatgacatcgaaatcaccgtcctcgcgatccaaggcgatcaagtgaaacttggcatcaacgcaccgaaacacgtcgaaatccatcgcaaagaaatttatctcgccatccaagccgaaaacaacgccgcctccctcgcctccaaaacatcgctcgagcagctaaacgaacaactgaaacactggaaaggggggaaacaagcatga

SEQ ID NO: 2334 - protein, 82 aa, Geobacillus sp. WCH70
MLVLTRKLKEVIQIGDDIEITVLAIQGDQVKLGINAPKHVEIHRKEIYLAIQAENNAASLASKTSLEQLNEQLKHWKGGKQA

SEQ ID NO: 2335 - DNA, 186 bp, Providencia stuartii ATCC 25827
  CDS (1)..(186): transl_table=11
atgcttattctgactcgtcgagttggtgaaacactcatgataggcgatgaggtaacagttacggtactgggagtaaaaggcaatcaagttcgtattggtgtcaatgccccaaaggaagtttctgttcaccgtgaagaaatttatcaacggatccaggctgaaaagactcaaccagacaatcaataa

SEQ ID NO: 2336 - protein, 61 aa, Providencia stuartii ATCC 25827
MLILTRRVGETLMIGDEVTVTVLGVKGNQVRIGVNAPKEVSVHREEIYQRIQAEKTQPDNQ

SEQ ID NO: 2337 - DNA, 225 bp, Bacillus pumilus ATCC 7061
  CDS (1)..(225): transl_table=11
atgttagttctctcgcgtaaattaaaccagtcgattcaaattggcgatgatattgaagtcaagattatttcgatcgaaggcgatcaagtgaaaatcgggattgaagctcctaagcacattgatattcacaggaaagaagtgtacctgtctattcaagaagagaacagtcgtgctgcgagtttatccgtagatctcctctctcaattatcctcacaaaaaaagtga

SEQ ID NO: 2338 - protein, 74 aa, Bacillus pumilus ATCC 7061
MLVLSRKLNQSIQIGDDIEVKIISIEGDQVKIGIEAPKHIDIHRKEVYLSIQEENSRAASLSVDLLSQLSSQKK

SEQ ID NO: 2339 - DNA, 228 bp, Clostridium thermocellum DSM 4150
  CDS (1)..(228): transl_table=11
atgctggttctgacgagaaagaaaaatgaatccataattattaatgacaatattgagattactgttgttgacgttcaaggggagcaggtgcgtatcggcattaatgcgccgaaaagcatatctatttacaggaaggagatatacctggaaatacaggctgaaaacaaaaaggctgcggaaattaagaatgtggatctgaaggaggacttaaaggattttttgaagtaa

SEQ ID NO: 2340 - protein, 75 aa, Clostridium thermocellum DSM 4150
MLVLTRKKNESIIINDNIEITVVDVQGEQVRIGINAPKSISIYRKEIYLEIQAENKKAAEIKNVDLKEDLKDFLK

SEQ ID NO: 2341 - DNA, 240 bp, Geobacillus sp. G11MC16
  CDS (1)..(240): transl_table=11
atgcttgtcctaacacgcaaactgaaagaagcgattcaaattggcgatgacatcgaaattaccgtcctcgccatccaaggcgaccaagtgaagctcggcatcaacgcgcccaagcacatcgacatccaccgcaaagaagtgtacctcgccattcaagcggaaaacagcgccgcctccgaagcgtccgaagcgtcgctcgccgcactgaccgccaagctgaaacagtggaaacaaccataa

SEQ ID NO: 2342 - protein, 79 aa, Geobacillus sp. G11MC16
MLVLTRKLKEAIQIGDDIEITVLAIQGDQVKLGINAPKHIDIHRKEVYLAIQAENSAASEASEASLAALTAKLKQWKQP

SEQ ID NO: 2343 - DNA, 195 bp, gamma proteobacterium HTCC5015
  CDS (1)..(195): transl_table=11
atgttgattttgactcgtcgtgttggtgagaccctaatggtgggtgacgatgttactgtgaccgtgctaggcgtaaagggtaaccaagtccgaattggtgtgaacgcacctaaggagattgcggttcaccgcgaggaaatttacgagcgtatcaagcgagagcaagacgatcccgattctattggcaatcgctaa

SEQ ID NO: 2344 - protein, 64 aa, gamma proteobacterium HTCC5015
MLILTRRVGETLMVGDDVTVTVLGVKGNQVRIGVNAPKEIAVHREEIYERIKREQDDPDSIGNR

SEQ ID NO: 2345 - DNA, 186 bp, Oceanobacter sp. RED65
  CDS (1)..(186): transl_table=11
atgctaattttaacgcgtcgtgttggtgaaaccttaatggttggtgacgaagtaaccgttaccgtattaggtgtaaaaggcaatcaagttcgcattggtgtaaacgcccctaaagaagtggccgtgcatcgtgaggaaatctaccaacgcattcagaacgaaaaaggctcaccagaagaaaagtaa

SEQ ID NO: 2346 - protein, 61 aa, Oceanobacter sp. RED65
MLILTRRVGETLMVGDEVTVTVLGVKGNQVRIGVNAPKEVAVHREEIYQRIQNEKGSPEEK

SEQ ID NO: 2347 - DNA, 216 bp, gamma proteobacterium HTCC2207
  CDS (1)..(216): transl_table=11
atgttaatacttactagaagagtcggcgagactctggttatcggcgacgacgtcaccgtaacagttttaggagttcgaggaaaccaggttcgcctgggggtaaatgcgccaaaagaagtggccgttcaccgtgaagagatctaccagagaattcaaatggaaaaaggtggtgctgattcagctcctagtgaagattcttctgataacagtctttga

SEQ ID NO: 2348 - protein, 71 aa, gamma proteobacterium HTCC2207
MLILTRRVGETLVIGDDVTVTVLGVRGNQVRLGVNAPKEVAVHREEIYQRIQMEKGGADSAPSEDSSDNSL

SEQ ID NO: 2349 - DNA, 198 bp, Photobacterium profundum 3TCK
  CDS (1)..(198): transl_table=11
atgctaattttgactcgtcgcgttggtgaaacgctaatgattggtgatgaagtaacagttactgtacttggtgttaagggtaaccaagttcgcattggtgttaacgcgcctaaagaagtatctgttcaccgtgaagaaatctacatgcgaattcaagctgaaaaagaaaacggaactcaaggttctggcaacttctaa

SEQ ID NO: 2350 - protein, 65 aa, Photobacterium profundum 3TCK
MLILTRRVGETLMIGDEVTVTVLGVKGNQVRIGVNAPKEVSVHREEIYMRIQAEKENGTQGSGNF

SEQ ID NO: 2351 - DNA, 201 bp, Psychromonas sp. CNPT3
  CDS (1)..(201): transl_table=11
atgctaattttaacccgtcgtgtaggcgaaactttaatgatcggtgataatgttaccgttactgttttaggtgttaagggtaatcaagtgcgcgtaggtgtaaatgcacctaaagaaatttccgtgcatcgtgaagaaatttatatgcgtattcaggctgaaaaagccaatgaagcagttaaagtcgcagaagcacaataa

SEQ ID NO: 2352 - protein, 66 aa, Psychromonas sp. CNPT3
MLILTRRVGETLMIGDNVTVTVLGVKGNQVRVGVNAPKEISVHREEIYMRIQAEKANEAVKVAEAQ

SEQ ID NO: 2353 - DNA, 198 bp, Vibrio angustum S14
  CDS (1)..(198): transl_table=11
atgttaattttgacacgtcgcgtaggtgaaaccctaatgatcggtgatgaagtgaccgtaactgttttaggtgttaaaggtaaccaagtacgtattggtgttaatgcacccaaagaagtatctgttcaccgcgaagaaatttacatgcgaattcaagcggaaaaagaaacagactctcagggttctggtaactattaa

SEQ ID NO: 2354 - protein, 65 aa, Vibrio angustum S14
MLILTRRVGETLMIGDEVTVTVLGVKGNQVRIGVNAPKEVSVHREEIYMRIQAEKETDSQGSGNY

SEQ ID NO: 2355 - DNA, 234 bp, Bacillus sp. NRRL B-14911
  CDS (1)..(234): transl_table=11
atgcttgtcctcacccgcaaaacaaaagaatcaatcatgctaaatgacgacatcgaaatcacgatcgtttcgattgacggagaccaggtcaaactcggcatcaatgcacctaagaatgtagagatacatagaaaagaaatctatctctccatccagcaggaaaacagcagcgccaccaaaacagaaagcgaattgctgggcagcataacctccttctttagacaaaaaaactaa

SEQ ID NO: 2356 - protein, 77 aa, Bacillus sp. NRRL B-14911
MLVLTRKTKESIMLNDDIEITIVSIDGDQVKLGINAPKNVEIHRKEIYLSIQQENSSATKTESELLGSITSFFRQKN

SEQ ID NO: 2357 - DNA, 189 bp, Neptuniibacter caesariensis
  CDS (1)..(189): transl_table=11
atgttaattcttactcgccgggttggtgaaactctgatggttggtgacgaagttactgtcactgtattaggtgtaaaaggtaatcaggtacgtattggtgtgaatgcacctaaagatgtatctgtccatcgtgaagagatttaccagcgcatccaacgcgaaaaagcggaagaaggaaataaggaataa

SEQ ID NO: 2358 - protein, 62 aa, Neptuniibacter caesariensis
MLILTRRVGETLMVGDEVTVTVLGVKGNQVRIGVNAPKDVSVHREEIYQRIQREKAEEGNKE

SEQ ID NO: 2359 - DNA, 234 bp, Rhizobium meliloti
  CDS (1)..(234): transl_table=11
atgctcatgctcacccgccgaatcggcgagaccctaatgatcggggacaacgtcacagtgactgtgctcggggtcaacggcaaccaagtacgcatcggcatcaccgcgcccaaggacgtggccgtgcaccgtggggagatctaccagcgcatccgcgagggtgcggttcctccggctcctccgaccgtcattcagaagcgccgcaaggccgccgtccagtccaacgaggaataa

SEQ ID NO: 2360 - protein, 77 aa, Rhizobium meliloti
MLMLTRRIGETLMIGDNVTVTVLGVNGNQVRIGITAPKDVAVHRGEIYQRIREGAVPPAPPTVIQKRRKAAVQSNEE

SEQ ID NO: 2361 - DNA, 189 bp, Pseudomonas fluorescens
  CDS (1)..(189): transl_table=11
atgctgattctgactcgtcggtgcgcagaaagcctgattatcggtgatggcgaaatcaccgtgaccgtgctcgacgttaaaggaaaccaagtgcgtatcggcgtcaacgccccgaaagaggttgccgtgcaccgtgaggaaatttacctgcgtataaagaaagagaaggacgaagaaccaagccattaa

SEQ ID NO: 2362 - protein, 62 aa, Pseudomonas fluorescens
MLILTRRCAESLIIGDGEITVTVLDVKGNQVRIGVNAPKEVAVHREEIYLRIKKEKDEEPSH

SEQ ID NO: 2363 - DNA, 204 bp, Legionella pneumophila
  CDS (1)..(204): transl_table=11
atgttggttttaacacgaaaagcagggcaacagattttaattggtaagggcttaattcaaatgaaagtgctcaaggtcgatgatgacatcatcagcattggcattaaagcaccccagcatattgatattgaccgagaagagatttatctgaaaaaactccaacaagggcaggctgaatcttccatgcagaaggtggcaccatga

SEQ ID NO: 2364 - protein, 67 aa, Legionella pneumophila
MLVLTRKAGQQILIGKGLIQMKVLKVDDDIISIGIKAPQHIDIDREEIYLKKLQQGQAESSMQKVAP

SEQ ID NO: 2365 - DNA, 186 bp, Pectobacterium carotovorum subsp. carotovorum
  CDS (1)..(186): transl_table=11
atgcttattttgactcgtcgagttggcgaaaccctcatcatcggcgatgaggtaacggttaccgtattaggagtgaaaggcaaccaggtgcgtattggtgttaatgcacctaaagaggtttctgtccaccgtgaagagatctatcagcgtattcaggccgaaaaatctcaaccaacgtcatattga

SEQ ID NO: 2366 - protein, 61 aa, Pectobacterium carotovorum subsp. carotovorum
MLILTRRVGETLIIGDEVTVTVLGVKGNQVRIGVNAPKEVSVHREEIYQRIQAEKSQPTSY

SEQ ID NO: 2367 - DNA, 210 bp, Serratia marcescens
  CDS (1)..(210): transl_table=11
atgttaattctgactcgtcgagttggtgaaaccctcatgattggcgatgaggtcacggtcactgtgctaggggtaaaaggcaaccaggtgcgtattggtgtgaacgcccccaaagaggtttcggttcaccgagaagaaatctatcagcgcattcaggcagagaagtcagcagacgacttactgattccgaagcagcgtctcgttgcctga

SEQ ID NO: 2368 - protein, 69 aa, Serratia marcescens
MLILTRRVGETLMIGDEVTVTVLGVKGNQVRIGVNAPKEVSVHREEIYQRIQAEKSADDLLIPKQRLVA

SEQ ID NO: 2369 - DNA, 23 bp, Artificial sequence
  primer
atgctgattctgactcgtcgagt

SEQ ID NO: 2370 - DNA, 23 bp, Artificial sequence
  primer
atgctgattctgactcgtcgagt

SEQ ID NO: 2371 - protein, 60 aa, Artificial sequence
  consensus sequence
  Variant (3)..(3): Xaa in position 3 is any amino acid
  Variant (7)..(8): Xaa in position 7 to 8 is any amino acid
  Variant (11)..(13): Xaa in position 11 to 13 is any amino acid
  Variant (17)..(20): Xaa in position 17 to 20 is any amino acid
  Variant (21)..(24): Xaa in position 21 to 24 is any or no amino acid
  Variant (26)..(26): Xaa in position 26 is any amino acid
  Variant (28)..(30): Xaa in position 28 to 30 is any amino acid
  Variant (32)..(32): Xaa in position 32 is any amino acid
  Variant (35)..(36): Xaa in position 35 to 36 is any amino acid
  Variant (38)..(39): Xaa in position 38 to 39 is any amino acid
  Variant (43)..(46): Xaa in position 43 to 46 is any amino acid
  Variant (49)..(49): Xaa in position 49 is any amino acid
  Variant (53)..(54): Xaa in position 53 to 54 is any amino acid
  Variant (55)..(59): Xaa in position 55 to 59 is any or no amino acid
MLXLTRXXGEXXXIGDXXXXXXXXTXLXXXGXQVXXGXXAPKXXXXHRXEIYXXXXXXXI

SEQ ID NO: 2372 - protein, 26 aa, Artificial sequence
  protein pattern
  Variant (2)..(2): Xaa in position 2 is any amino acid
  Variant (5)..(5): Xaa in position 5 is Lys or Arg
  Variant (6)..(6): Xaa in position 6 is Ile, Leu, Met or Val
  Variant (8)..(8): Xaa in position 8 is Phe, Ile or Val
  Variant (9)..(9): Xaa in position 9 is any amino acid
  Variant (12)..(13): Xaa in position 12 to 13 is any amino acid
  Variant (14)..(14): Xaa in position 14 is Ile, Leu or Val
  Variant (15)..(15): Xaa in position 15 is any amino acid
  Variant (16)..(16): Xaa in position 16 is Ile, Leu or Val
  Variant (17)..(17): Xaa in position 17 is Phe, His or Tyr
  Variant (19)..(19): Xaa in position 19 is any or no amino acid
  Variant (21)..(24): Xaa in position 21 to 24 is any amino acid
  Variant (25)..(25): Xaa in position 25 is any or no amino acid
GXQVXXGXXAPXXXXXXRXEXXXXXI

SEQ ID NO: 2373 - protein, 14 aa, Artificial sequence
  protein pattern
  Variant (3)..(3): Xaa in position 3 is any amino acid
  Variant (7)..(7): Xaa in position 7 is Glu, Lys or Arg
  Variant (8)..(9): Xaa in position 8 to 9 is any amino acid
  Variant (10)..(10): Xaa in position 10 is Glu or Gln
  Variant (11)..(11): Xaa in position 11 is any amino acid
  Variant (12)..(12): Xaa in position 12 is Phe, Ile, Leu or Val
  Variant (13)..(13): Xaa in position 13 is any amino acid
  Variant (14)..(14): Xaa in position 14 is Ile, Leu or Val
MLXLTRXXXXXXXX

SEQ ID NO: 2374 - DNA, 1458 bp, Escherichia coli
  CDS (1)..(1458): transl_table=11
atgggaatttattttactaattcagatgatcaaatttactttaaaaggagtgaagggatgtctgatataaaccatgcaggttctgaccttatatttgaactggaggatcgccctccctttcatcaggctctcgttggtgccattacccatctgttggcaattttcgttccgatggtaacccccgcgttaatcgtgggtgcggccttacagctttccgctgaaacaactgcctatcttgtttctatggcgatgatcgcctctggtattggtacctggttacaagtaaaccgctacggcatcgtcggttctggcctactctcaattcagtcagtcaatttttcatttgttacggtcatgattgcgctgggcagcagcatgaaaagcgacggttttcacgaagagttaatcatgtcgtcgcttctcggcgtctccttcgttggcgcatttctggttgtcggatcttcatttatcttgccctatttacgtcgggttattacgcctaccgtcagcggtattgtggtactgatgatcggcttaagcctgattaaagtcggcattatcgattttggtggaggatttgcagccaaaagcagcggtacgttcggcaattacgaacatctcggcgttggtttattggttttaattgtggtgatcggctttaactgctgtcgcagtccgttgctacgcatgggagggatcgccattgggctatgtgtcggctatatcgcatcgttatgcctgggcatggtggatttcagcagtatgcgcaatttgccgttaatcaccatcccgcatccgttcaaatacggctttagttttagcttccatcagttcctggtggttggcacgatttatctgcttagcgtgctggaagcagtcggcgatatcaccgccacggcaatggtttcccgccgccccattcagggggaagagtatcagtcccggctgaaaggcggcgtgctggcagatggtctggtttctgttatcgcctccgctgtcggttcattaccattaaccacgtttgcgcaaaataatggggttattcagatgactggcgtcgcttcacgttatgtcgggcgaaccatcgcggtaatgctggttatcctcggcttatttccgatgattggcggcttcttcacgaccattccctcggcagttctgggaggcgcaatgacgttgatgttttccatgattgccatcgcagggattcgcatcatcatcaccaacggtttaaagcgccgtgaaacacttattgtcgccacttctttaggtttagggcttggcgtctcctacgatcccgaaatttttaaaatattgccagcctctatttatgtattagttgaaaaccctatttgtgctggcgggttaactgcgattttattaaatattatcctccctggtggctaccgacaggaaaacgttctgcctggtattacctcagcggaagagatggattaa

SEQ ID NO: 2375 - protein, 485 aa, Escherichia coli
MGIYFTNSDDQIYFKRSEGMSDINHAGSDLIFELEDRPPFHQALVGAITHLLAIFVPMVTPALIVGAALQLSAETTAYLVSMAMIASGIGTWLQVNRYGIVGSGLLSIQSVNFSFVTVMIALGSSMKSDGFHEELIMSSLLGVSFVGAFLVVGSSFILPYLRRVITPTVSGIVVLMIGLSLIKVGIIDFGGGFAAKSSGTFGNYEHLGVGLLVLIVVIGFNCCRSPLLRMGGIAIGLCVGYIASLCLGMVDFSSMRNLPLITIPHPFKYGFSFSFHQFLVVGTIYLLSVLEAVGDITATAMVSRRPIQGEEYQSRLKGGVLADGLVSVIASAVGSLPLTTFAQNNGVIQMTGVASRYVGRTIAVMLVILGLFPMIGGFFTTIPSAVLGGAMTLMFSMIAIAGIRIIITNGLKRRETLIVATSLGLGLGVSYDPEIFKILPASIYVLVENPICAGGLTAILLNIILPGGYRQENVLPGITSAEEMD

SEQ ID NO: 2376 - DNA, 1401 bp, Escherichia coli str. K-12 substr. W3110
  CDS (1)..(1401): transl_table=11
atgtctgatataaaccatgcaggttctgaccttatatttgaactggaggatcgccctccctttcatcaggctctcgttggtgccattacccatctgttggcaattttcgttccgatggtaacccccgcgttaatcgtgggtgcggccttacagctttccgctgaaacaactgcctatcttgtttctatggcgatgatcgcctctggtattggtacctggttacaagtaaaccgctacggcatcgtcggttctggcctactctcaattcagtcagtcaatttttcatttgttacggtcatgattgcgctgggcagcagcatgaaaagcgacggttttcacgaagagttaatcatgtcgtcgcttctcggcgtctccttcgttggcgcatttctggttgtcggatcttcatttatcttgccctatttacgtcgggttattacgcctaccgtcagcggtattgtggtactgatgatcggcttaagcctgattaaagtcggcattatcgattttggtggaggatttgcagccaaaagcagcggtacgttcggcaattacgaacatctcggcgttggtttattggttttaattgtggtgatcggctttaactgctgtcgcagtccgttgctacgcatgggagggatcgccattgggctatgtgtcggctatatcgcatcgttatgcctgggcatggtggatttcagcagtatgcgcaatttgccgttaatcaccatcccgcatccgttcaaatacggctttagttttagcttccatcagttcctggtggttggcacgatttatctgcttagcgtgctggaagcagtcggcgatatcaccgccacggcaatggtttcccgccgccccattcagggggaagagtatcagtcccggctgaaaggcggcgtgctggcagatggtctggtttctgttatcgcctccgctgtcggttcattaccattaaccacgtttgcgcaaaataatggggttattcagatgactggcgtcgcttcacgttatgtcgggcgaaccatcgcggtaatgctggttatcctcggcttatttccgatgattggcggcttcttcacgaccattccctcggcagttctgggaggcgcaatgacgttgatgttttccatgattgccatcgcagggattcgcatcatcatcaccaacggtttaaagcgccgtgaaacacttattgtcgccacttctttaggtttagggcttggcgtctcctacgatcccgaaatttttaaaatattgccagcctctatttatgtattagttgaaaaccctatttgtgctggcgggttaactgcgattttattaaatattatcctccctggtggctaccgacaggaaaacgttctgcctggtattacctcagcggaagagatggattaa

SEQ ID NO: 2377 - protein, 466 aa, Escherichia coli str. K-12 substr. W3110
MSDINHAGSDLIFELEDRPPFHQALVGAITHLLAIFVPMVTPALIVGAALQLSAETTAYLVSMAMIASGIGTWLQVNRYGIVGSGLLSIQSVNFSFVTVMIALGSSMKSDGFHEELIMSSLLGVSFVGAFLVVGSSFILPYLRRVITPTVSGIVVLMIGLSLIKVGIIDFGGGFAAKSSGTFGNYEHLGVGLLVLIVVIGFNCCRSPLLRMGGIAIGLCVGYIASLCLGMVDFSSMRNLPLITIPHPFKYGFSFSFHQFLVVGTIYLLSVLEAVGDITATAMVSRRPIQGEEYQSRLKGGVLADGLVSVIASAVGSLPLTTFAQNNGVIQMTGVASRYVGRTIAVMLVILGLFPMIGGFFTTIPSAVLGGAMTLMFSMIAIAGIRIIITNGLKRRETLIVATSLGLGLGVSYDPEIFKILPASIYVLVENPICAGGLTAILLNIILPGGYRQENVLPGITSAEEMD

SEQ ID NO: 2378 - DNA, 1443 bp, Vibrio cholerae O1 biovar eltor str. N16961
  CDS (1)..(1443): transl_table=11
atgcgcaaggtgttattgaccatcaggaaaatcgctatgacacaaccgacttcacgtaaggcagatctggtctatcaactcaatgatcgtccccctttgcctcaaactctcttcgcagccttgcaacatctgctggcgatgtttgtcgccgtgatcaccccatcgctgatcatttgccaatcccttggtgtacctgccgatcaaaccaacaccatcatcagcatgtcactgtttgcttcgggtttgtcatccttcattcaaatccgtacctttggcccaattggctcaggtttgctttccattcaaggcaccagctttaactttttaggccccattattggtgctggacttgcgctcaaagcaggcggtgcagatatagagaccatgatggccgcgatttttggcacgattttggtcgcctcaagcgctgaaattttactgtcccgcgtgctgcaatttgcccagcgcattatcacgccattagtctctgggattgtggtgaccttgattggcctaacgctggtacaagtcggattgatttcgatgggtggtggttatgccgctatggctgacggcagctttggtagcctcgataagcttgcgctagctggcaccgtattggcgatcattgtgctgctgaaccgagcgcacaacccttacgtacgagtggcttcgattgtgattgcgatgctggtaggttatgtgatggcgtacctgatgggcatggtcaataccgacaacttggcggaaacccagttcatcgctctgcctattccgatgcagtacggtttgggctttgactggtcgctgtttatacctctggttctgattttcctgatcaccgcactagaagcgattggtgatatcacggcgacctccgaagtctctggtgagccagtcaaaggccctgtgtacatgaagcgcattaaaggtggcgtattggctgatggcctcaactccgcattagccgcggtatttaacagctttccaaactccacctttagccaaaacaacggcgtgatcctgctgacaggcgttgccagccgttatgtgggttattttatcgcgggcatgttggtactacttggcttgttccctggcgtagcaagctttgtacagttgattcctgaacctgtgcttggcggcgcaacgattgtgatgtttggtacgattgctgcggcaggcgtgcgcattatctctcgcgtcgatttggatcgccgcgcgattctgatcatggcgctctccttctcaatgggtttgggaattgcgcaaaagccagagattctgcagtttatgccggaatttattaagaatctgttctcttcaggtgtagccgcaggtggtattactgcaatcgtgcttaacctgctgctacctgaggtgcgccgagatgaagacgccgcttcagtagcgaaaacggaagcggcgcaagaatcaaactag

SEQ ID NO: 2379 - protein, 480 aa, Vibrio cholerae O1 biovar eltor str. N16961
MRKVLLTIRKIAMTQPTSRKADLVYQLNDRPPLPQTLFAALQHLLAMFVAVITPSLIICQSLGVPADQTNTIISMSLFASGLSSFIQIRTFGPIGSGLLSIQGTSFNFLGPIIGAGLALKAGGADIETMMAAIFGTILVASSAEILLSRVLQFAQRIITPLVSGIVVTLIGLTLVQVGLISMGGGYAAMADGSFGSLDKLALAGTVLAIIVLLNRAHNPYVRVASIVIAMLVGYVMAYLMGMVNTDNLAETQFIALPIPMQYGLGFDWSLFIPLVLIFLITALEAIGDITATSEVSGEPVKGPVYMKRIKGGVLADGLNSALAAVFNSFPNSTFSQNNGVILLTGVASRYVGYFIAGMLVLLGLFPGVASFVQLIPEPVLGGATIVMFGTIAAAGVRIISRVDLDRRAILIMALSFSMGLGIAQKPEILQFMPEFIKNLFSSGVAAGGITAIVLNLLLPEVRRDEDAASVAKTEAAQESN

SEQ ID NO: 2380 - DNA, 1407 bp, Pseudomonas aeruginosa PAO1
  CDS (1)..(1407): transl_table=11
atgcatagcgaagaccaacgccccaacgacctcatctacggcctcgacgaccggccgcgcccgcttcccgccttccttgccgcgctacagcacgtgctggccagcttcgtcggcatcgtcactccgccgctggtgatcggctcgctgctcggcctcggcgagcacctgccgtacttgatcagcatggcgctgatggtttccggcgccggcaccctgatccaggcgcgccggccgttcggcatcggcgccgggatgatctgcctgcaaggcaccagcttcgccttcctcggcgccgtgctggccgccgggatgctggtgaagcagcgcggcggcggtcccgaggagatcctcgcgatgatcttcggcgtgtgcttcttcggcgccttcgtgcagatcgtcctcagtcgtttcctcggccatcttcgccgggtgatcacgccgctggtcaccggcatcgtcatcaccctgatcggcgtcagcctgatcaaggtcggcatcaccgacctcggcggcggagccggggccacggacttcggcgcaccggccaatctcgcgctgggcgcgctggtgctgctgagcatcgtcctgctgaaccgctcgcgcctgccctggctgcgcctggccgccatcgtcatcggcctggcgctgggtaccctggcggcctgggcgaccggcctgttcgttccgcgggcgttgcccgagctgccgctggtcagcctgccgcagccgttccgcttcggcttcgccttcgactggatggccttcctgccggtggcgctgatctacctgatcagcagcatcgagacggtcggcgatctgaccgccaactgcatgctctcgcggcagcccctggagggaccggcgtacctgcagcggttgcgcggcggggtgctcggcgacggcgtcagttgcctgctggcagccaccttcagcgccttcccgaacaccaccttcgcgcagaacaacggggtgatccagctcaccggggtggccagccggcacgtcgggatctatatcggcggcgtgttgctggcgctcggcctgttcccctgggtcggcgcgatcctccagcagatccccaagccggtgctcggtggcgccaccctggtgatgttcggcagcgtcgccgccgccggcatccgcattctcggccagaccgcgatggaccgccgcagcgtgctgatcatcgccgcctcgttcggcgtcggcctcggcgtggccgcgcagccgaccctgctcgaccagatgccggcggtggtgaagaccctgttcgactcggcgatcaccagcggcggcatcaccgccatcctgctcaacctgctgctgcccgaggagcgcgttgccgaagcggcgcaggccagcgcgaagggcggcgccctggcgcgctggcgcaagccgctgggttga

SEQ ID NO: 2381 - protein, 468 aa, Pseudomonas aeruginosa PAO1
MHSEDQRPNDLIYGLDDRPRPLPAFLAALQHVLASFVGIVTPPLVIGSLLGLGEHLPYLISMALMVSGAGTLIQARRPFGIGAGMICLQGTSFAFLGAVLAAGMLVKQRGGGPEEILAMIFGVCFFGAFVQIVLSRFLGHLRRVITPLVTGIVITLIGVSLIKVGITDLGGGAGATDFGAPANLALGALVLLSIVLLNRSRLPWLRLAAIVIGLALGTLAAWATGLFVPRALPELPLVSLPQPFRFGFAFDWMAFLPVALIYLISSIETVGDLTANCMLSRQPLEGPAYLQRLRGGVLGDGVSCLLAATFSAFPNTTFAQNNGVIQLTGVASRHVGIYIGGVLLALGLFPWVGAILQQIPKPVLGGATLVMFGSVAAAGIRILGQTAMDRRSVLIIAASFGVGLGVAAQPTLLDQMPAVVKTLFDSAITSGGITAILLNLLLPEERVAEAAQASAKGGALARWRKPLG

SEQ ID NO: 2382 - DNA, 1386 bp, Pseudomonas aeruginosa PAO1
  CDS (1)..(1386): transl_table=11
atgagttccctgcaaagcccgtcggacgccagcgcccgcaacgacctggtctatggcctggacgaccgtcccagcgctcccatcgccctgctcgccgccctccagcacctgctggcgatcatcgtgccgatcgttacccctggcctgctgatctgccaggcgctgggcgtatcgccgcgcgacaccaatctgatcgtgtcgatgtcgctggtgatctccggcatcgccaccttcgtccagtgcaagcgcttcggcccgttcggcgccggactgttgatcgtccagggcaccagcttcaacttcgtcggcccgctgatcgccggcggggcgctgatggtcaagcagggcacgccggtggaaagcgtgatggcggcgatcttcggcgtggtcatcgccggctccttcgtcgagatgggcatctcgcgcatactgccgttcgtcaagcggctgatcaccccgctggtgaccggcatcgtcgtgctgatgatcggcctgaccctgatcaaggtcggcctgatcagcatgggcggcggcttctcggcgatgtccaacggcaccttcgccaacggcgagaacctgctgctgtccggcgtggtgctgggcatcatcgtggtgctcaaccgcatcccggtggtatggatgcgcagttgcgccatcgtcatcgccctggccgtcggctacgcgctggccggctacctcggtcgcctggacttcaccggcatgcaccaggccgagctgttccaggtaccgaccccgctgcacttcggcctggacttctcctggccgctgttcatcccgatgctggtgatctacctggtcacctccctggaagccatcggcgacgtcaccgccaccagcaaggtgtcgaagcaaccggtggaaggcccgctgtggatgcagcggatcaagggcggcgtgctggtcaacggcgccaactcgttcctcgccggtatcttcaataccttccccagttcagtgttcgcccagaacaacggggtgatccagctcaccggcgtggccagccgctacgtcggcctgtggatcgccgccatgctggtcctgctcggcctgttcccgagcgtcgccggggtcatccaggcggtgccggaaccggtactgggcggcgcggcgatggtgatgttcggcgcggtggccgcttcgggcatcaacatcctcgccggcatccagctggaccgccgtgccctgctgatcatcgccgtatccctggccctcggcctgggcgtttcgcaggtgccggagttcctcgcgcacatgcccgcggcgctgcgcaacgtgctggaatccggggtcgccaccggcggcatctgcgccctgctgctgaactggttcctgccggaaagcccggtccagaaggccggacactga

SEQ ID NO: 2383 - protein, 461 aa, Pseudomonas aeruginosa PAO1
MSSLQSPSDASARNDLVYGLDDRPSAPIALLAALQHLLAIIVPIVTPGLLICQALGVSPRDTNLIVSMSLVISGIATFVQCKRFGPFGAGLLIVQGTSFNFVGPLIAGGALMVKQGTPVESVMAAIFGVVIAGSFVEMGISRILPFVKRLITPLVTGIVVLMIGLTLIKVGLISMGGGFSAMSNGTFANGENLLLSGVVLGIIVVLNRIPVVWMRSCAIVIALAVGYALAGYLGRLDFTGMHQAELFQVPTPLHFGLDFSWPLFIPMLVIYLVTSLEAIGDVTATSKVSKQPVEGPLWMQRIKGGVLVNGANSFLAGIFNTFPSSVFAQNNGVIQLTGVASRYVGLWIAAMLVLLGLFPSVAGVIQAVPEPVLGGAAMVMFGAVAASGINILAGIQLDRRALLIIAVSLALGLGVSQVPEFLAHMPAALRNVLESGVATGGICALLLNWFLPESPVQKAGH

SEQ ID NO: 2384 - DNA, 1392 bp, Neisseria meningitidis MC58
  CDS (1)..(1392): transl_table=11
atgagcggtcagttgggcaaaggtgcggatgcgcctgatttggtgtacggtttggaagacaggccgccgttcggtaatgcgctcttgagcgcggttacccatcttttggcgatttttgtgccgatgattacgcccgcgctgattgtgggcggcgcgctggaattgccggtggagatgacggcgtatctcgtgtcgatggcgatggttgcgtcgggtgtcggcacttatttgcaggtcaaccgcttcgggccggtcggttcggggatgctgtccatccagtcggtgaatttttcgttcgttaccgtgatgattgcgctgggcgcggggatgaaagagggcggtttgactaaggatgcgatgatttcgacgctcttgggcgtatcgtttgtcggcgcgtttttggtgtgtttctcggcgtggcttctgccgtatttgaaaaaagtgattacgccgacggtcagcggcgtggtcgtgatgctcattggtttgagtttggtacacgtcggcattaccgatttcggcggcggcttcggcgcgaaggcggacggcacgttcggctcgatggaaaacttggggctggcatcgctggtgttgctgattgtgttggtgttcaactgcatgaaaaacccgctgttgcgcatgagcggcattgcggtcgggctgattgccggctatatcgtcgcgctgtttttgggcaaggtggatttttccgcgctgcaaaacctgccgctggttacgctgcccgtaccgtttaaatacggttttgctttcgactggcacgcgtttattgtggcgggcgcgattttcttgttgagcgtgtttgaggcggtcggcgatttaaccgcgacggcaatggtgtccgaccagccgattgaaggcgaggaatacaccaaacgcctgcgcggcggcgtgttggctgacggcttggtgtcggtgattgcgacggctttgggttcgctgccgctgacgacgtttgcgcaaaacaacggcgtgattcagatgaccggcgtggcttcgcgccatgtgggcaaatatattgccgtgattttggtgctgttgggtctgttccccgttgtcggtcgcgcgtttacgacgattccgagtccggtgttgggcggcgcgatggttttgatgttcggcttaattgcgattgcgggcgtgcggattttggtcagtcacggcatccgcaggcgcgaagcggtgattgcggcaacgtcggtcggtttgggcttgggtgtcgcgtttgagccggaagtgtttaaaaacctgcccgtcttgttccaaaactctatttccgccggcggcattacggcagtcttgctgaatttggtcttgcccgaagataaaaccgaggcggcggtcaagtttgataccgaccacttggaacactga

SEQ ID NO: 2385 - protein, 463 aa, Neisseria meningitidis MC58
MSGQLGKGADAPDLVYGLEDRPPFGNALLSAVTHLLAIFVPMITPALIVGGALELPVEMTAYLVSMAMVASGVGTYLQVNRFGPVGSGMLSIQSVNFSFVTVMIALGAGMKEGGLTKDAMISTLLGVSFVGAFLVCFSAWLLPYLKKVITPTVSGVVVMLIGLSLVHVGITDFGGGFGAKADGTFGSMENLGLASLVLLIVLVFNCMKNPLLRMSGIAVGLIAGYIVALFLGKVDFSALQNLPLVTLPVPFKYGFAFDWHAFIVAGAIFLLSVFEAVGDLTATAMVSDQPIEGEEYTKRLRGGVLADGLVSVIATALGSLPLTTFAQNNGVIQMTGVASRHVGKYIAVILVLLGLFPVVGRAFTTIPSPVLGGAMVLMFGLIAIAGVRILVSHGIRRREAVIAATSVGLGLGVAFEPEVFKNLPVLFQNSISAGGITAVLLNLVLPEDKTEAAVKFDTDHLEH

SEQ ID NO: 2386 - DNA, 1386 bp, Yersinia pestis CO92
  CDS (1)..(1386): transl_table=11
atgtctacgcaatctgccgaacttgatactgcaccgccatcaccggctcaccccagcgaattgatctaccacctagaagaccgaccgccactcccacaaacactgtttgccgcttgccagcatctcttggcgatgtttgttgcggtaatcacccccggtttattgatttgtcaggctttggggttacccgcagaagatactcaacgcattattagtatgtcgttatttgcttcgggcctagcgtctttactgcagattaaaacttggggccccgtgggttcaggcctgttatccattcaaggcaccagttttaactttgtttctccgttgattatgggggggctggcgctaaaaaacggtggggcagatatcccaacgatgatggcggcgctgttcggtacgttaatggttgcgtcctgcaccgagatcttactctcacatgtgctgcatctggcacgccgtattatcaccccgctggtatccggtattgtggtgatgattatcggcctgtcattgattcaagttgggctgacatctattggtggtggttatggtgcgatgagcgataacacctttggtgcaccgaaaaacttattattagccggtgccgtattgggggtgatcattctgcttaaccgccagcgtaacccgtatttacgtgttgcctctttggtgatcgctatggccgtgggttatctgctcgcctgggcattggggatgttgcctgagagccgcccagttgtagataccgcgctgattactattccaacgccgttgtactatgggctgtccttcgactggaacttactgattcctctgatgctgatctttatggtgacctcactggaaaccataggcgatattaccgcaacatctgatgtatcagagcaaccggttcgcggcccgttatatatgaaacgcctaaaaggcggtgtactggccaatggtttgaactcgatgctgtccgctatattcaataccttccccaactcctgcttcggtcagaataatggcgtgatccaattgactggcgttgccagccgttatgtcggttttgttgtggcaataatgctcatcattttgggcctgttccctgctgtcgctgggtttgtgcagcatattcctgagccggtactgggtggagcaactctcgtgatgttcgggactatcgcagcgtctggtgtgcgtattgtgtcacgcgagaccctgaatcgccgggcgattatgataatggccttatcattagcggttggtatgggtgtcgcacagcagccattgattttgcaatttgcgcctgactggatcaaaacgctgttctcttctgggattgccgctggcggtattactgccatcgtacttaacttactcttcccacaagaaaaatag

SEQ ID NO: 2387 - protein, 461 aa, Yersinia pestis CO92
MSTQSAELDTAPPSPAHPSELIYHLEDRPPLPQTLFAACQHLLAMFVAVITPGLLICQALGLPAEDTQRIISMSLFASGLASLLQIKTWGPVGSGLLSIQGTSFNFVSPLIMGGLALKNGGADIPTMMAALFGTLMVASCTEILLSHVLHLARRIITPLVSGIVVMIIGLSLIQVGLTSIGGGYGAMSDNTFGAPKNLLLAGAVLGVIILLNRQRNPYLRVASLVIAMAVGYLLAWALGMLPESRPVVDTALITIPTPLYYGLSFDWNLLIPLMLIFMVTSLETIGDITATSDVSEQPVRGPLYMKRLKGGVLANGLNSMLSAIFNTFPNSCFGQNNGVIQLTGVASRYVGFVVAIMLIILGLFPAVAGFVQHIPEPVLGGATLVMFGTIAASGVRIVSRETLNRRAIMIMALSLAVGMGVAQQPLILQFAPDWIKTLFSSGIAAGGITAIVLNLLFPQEK

SEQ ID NO: 2388 - DNA, 1392 bp, Salmonella enterica subsp. enterica serovar Typhi str. CT18
  CDS (1)..(1392): transl_table=11
atgtccgttaacgccatcgagccggcagatgcgcaaccggttgcgcagacgcaaaacagcgaattaatttaccgtcttgaagatcgcccgccgctccctcaaaccctttttgccgcttgtcagcatctgctggccatgtttgtcgcggtaatcacgccagcgctgttaatctgccaggcgttgggtttaccggcgcaggatacgcagcacattatcagcatgtcgctgttcgcctccggcgtagcctctattattcaaatcaaagcgtgggggccggtaggatcggggctgttatccatccagggaaccagttttaactttgtcgccccgctgattatgggcggtaccgcgctgaaaaccggcggcgcggacgtcccgacgatgatggcggcgctgttcggcacgctgatgctggcaagctgcaccgagatggtgctttctcgcattctacatctggcgcgccggattatcacgccgttagtctccggcgtcgtggtgatgattattggcctgtcgctgattcaggtggggctaacttccatcggcggcggctatgccgccatgagcgacaacacctttggcgcaccgaaaaacctgttactggccggcgtcgtcctggccattatcatcctgctgaatcggcaacgtaatccctacctgcgcgtggcttctttggttattgccatggcggcaggctatcttttggcctggtttatgggcatgttgcctgagaataacgcgccggtctcgcaggacatcctgatggtgccgaccccgctgtattatggtctgggcattgactggaacctgttactgccgttgatgctggtctttatgattacgtcgctggagaccatcggagacatcaccgccacctctgatgtctccgagcagccggtatccggccccttgtacatgaaacggctaaagggcggcgtactggctaacggcctgaactcatttgtttcagcggtatttaatacgttcccgaattcctgtttcggtcagaacaacggcgtaattcagttgactggcgtcgccagtcgctatgtgggatttgttgtcgcgctgatgctgattgtactcggcctgttcccggcggtaagcggttttgtgcagcatatcccggaaccggtgctcggcggcgccacgttggtgatgttcggcaccattgccgcctccggggtgcgtattgtctcgcgtgagccgctgaaccgccgcgcgattctgattatcgccctgtcgctggccgtgggtcttggcgtctcgcaacagccgcagatcctgcagttcgcgccggaatgggtgaaaaatctgctctcatccggaattgccgctggcggcatcacggctatcgtgctgaacctgattctcccgccggaaaaaccgtaa

SEQ ID NO: 2389 - protein, 463 aa, Salmonella enterica subsp. enterica serovar Typhi str. CT18
MSVNAIEPADAQPVAQTQNSELIYRLEDRPPLPQTLFAACQHLLAMFVAVITPALLICQALGLPAQDTQHIISMSLFASGVASIIQIKAWGPVGSGLLSIQGTSFNFVAPLIMGGTALKTGGADVPTMMAALFGTLMLASCTEMVLSRILHLARRIITPLVSGVVVMIIGLSLIQVGLTSIGGGYAAMSDNTFGAPKNLLLAGVVLAIIILLNRQRNPYLRVASLVIAMAAGYLLAWFMGMLPENNAPVSQDILMVPTPLYYGLGIDWNLLLPLMLVFMITSLETIGDITATSDVSEQPVSGPLYMKRLKGGVLANGLNSFVSAVFNTFPNSCFGQNNGVIQLTGVASRYVGFVVALMLIVLGLFPAVSGFVQHIPEPVLGGATLVMFGTIAASGVRIVSREPLNRRAILIIALSLAVGLGVSQQPQILQFAPEWVKNLLSSGIAAGGITAIVLNLILPPEKP

SEQ ID NO: 2390 - DNA, 1806 bp, Schizosaccharomyces pombe
  CDS (1)..(1806)
atgtcggaatccatccaagatcaagatcacgaaaagactactattatcgaaaagactcgtcgctttgttttatccatctttaccaaagacttttggattggcgattatgattattcctttttgctacctgccatccctttcaccaaacaaaagccaaaatctcccccttttttctcgttaaatgccaaagtccctgtcttgttggctttgcttttgggattccaacacgctttagccatggtcggcggtgtcactagtcctcctcgtattattgctgcttctgccaatcttactactgaacaaacaaattatttggtctctgctggcctcatcagtagtggtatcatgacacttattcaaattgcccgggttcatattccaaaaacaaaatactatattggtacgggtatgctttcggtgctaggtatttcctttactagtgtcagtgttgctcccaaagttctctctcaaatgtacgaaaatggctactgtccaaaagatgagaacggcacaaaacttccctgtccagatggctatggtgctttccttgcaaccgcttgcgtttgctctctcttagaaatctttatgtctttcattcctccacgcattttgaagcgtctatttcctcccatcgttactggccccgtcgttttacttatcggtacttctctcatcagtagtggtcttaatgattgggccggtggtgaaggctcttgtactggtcgtcccactgaagctgaagctcctggttattccttatgtccttccgatacctctcctcatgctttaggttggggtagtgcacaatttattggtctcggttttagcgtattcgcaaccatcattatcatcgagcgctttggtcctccacttatgaaaactacttcagttgttttaggacttgttgttggtatgattatttccgctgctactggttattgggatcattctatcattgatgctgctccggtagttaccttcaattgggttcataccttccgtcttcgtatctatggtcctgccgttcttccaatgcttgcactgtacattgtaaacatgatggaggcaatcggcgatataggtgccacgtctgatgtctccatgctggaagtagatggccctgcctttgatgcaagagttcagggtggtattcttggtgatggcctagcttcacttatcgcttctcttatgactactacaccactgactactttcgctcaaaacaacggtgtcatcagtttgacaaagtgtgcaaaccgtcgtgctggattcttttgtgcggtaatcttattttttatgggtttgttcgctaagtttgctgctgtctttgttgccattccgtctcctgtcttaggtggaatgaccacatttctcttttcatctgttgctgtctctggtattgctattatctcccaaattccctttaatcgtcgtaataggtttattttaactgcctccatgactttgggtatgggtgctattttggtcccagattggtttacttatttctttgaatacagcggaccaaataaggctcttgttggatttctggacgccattacccttgtgatggagaatggttttgccatcggagcctttatctccattttcctgaacttaattttgccttacgagtttgaccctgatttgacaaatgacagtcctggtctttccactacgaatggtgttaacaatggcattgttgaagtccgtggtatagatcccaacgattctctttccaatacggacacggaatatgctaacgaaaataaaaaagatgaagttgatgttgataaggttgtttaa

SEQ ID NO: 2391 - protein, 601 aa, Schizosaccharomyces pombe
MSESIQDQDHEKTTIIEKTRRFVLSIFTKDFWIGDYDYSFLLPAIPFTKQKPKSPPFFSLNAKVPVLLALLLGFQHALAMVGGVTSPPRIIAASANLTTEQTNYLVSAGLISSGIMTLIQIARVHIPKTKYYIGTGMLSVLGISFTSVSVAPKVLSQMYENGYCPKDENGTKLPCPDGYGAFLATACVCSLLEIFMSFIPPRILKRLFPPIVTGPVVLLIGTSLISSGLNDWAGGEGSCTGRPTEAEAPGYSLCPSDTSPHALGWGSAQFIGLGFSVFATIIIIERFGPPLMKTTSVVLGLVVGMIISAATGYWDHSIIDAAPVVTFNWVHTFRLRIYGPAVLPMLALYIVNMMEAIGDIGATSDVSMLEVDGPAFDARVQGGILGDGLASLIASLMTTTPLTTFAQNNGVISLTKCANRRAGFFCAVILFFMGLFAKFAAVFVAIPSPVLGGMTTFLFSSVAVSGIAIISQIPFNRRNRFILTASMTLGMGAILVPDWFTYFFEYSGPNKALVGFLDAITLVMENGFAIGAFISIFLNLILPYEFDPDLTNDSPGLSTTNGVNNGIVEVRGIDPNDSLSNTDTEYANENKKDEVDVDKVV

SEQ ID NO: 2392 - DNA, 1437 bp, Yersinia pestis KIM
  CDS (1)..(1437): transl_table=11
atgagccggatcattaaaatgccccctttgccgatctggaaataccacgccatgtctacgcaatctgccgaacttgatactgcaccgccatcaccggctcaccccagcgaattgatctaccacctagaagaccgaccgccactcccacaaacactgtttgccgcttgccagcatctcttggcgatgtttgttgcggtaatcacccccggtttattgatttgtcaggctttggggttacccgcagaagatactcaacgcattattagtatgtcgttatttgcttcgggcctagcgtctttactgcagattaaaacttggggccccgtgggttcaggcctgttatccattcaaggcaccagttttaactttgtttctccgttgattatgggggggctggcgctaaaaaacggtggggcagatatcccaacgatgatggcggcgctgttcggtacgttaatggttgcgtcctgcaccgagatcttactctcacatgtgctgcatctggcacgccgtattatcaccccgctggtatccggtattgtggtgatgattatcggcctgtcattgattcaagttgggctgacatctattggtggtggttatggtgcgatgagcgataacacctttggtgcaccgaaaaacttattattagccggtgccgtattgggggtgatcattctgcttaaccgccagcgtaacccgtatttacgtgttgcctctttggtgatcgctatggccgtgggttatctgctcgcctgggcattggggatgttgcctgagagccgcccagttgtagataccgcgctgattactattccaacgccgttgtactatgggctgtccttcgactggaacttactgattcctctgatgctgatctttatggtgacctcactggaaaccataggcgatattaccgcaacatctgatgtatcagagcaaccggttcgcggcccgttatatatgaaacgcctaaaaggcggtgtactggccaatggtttgaactcgatgctgtccgctatattcaataccttccccaactcctgcttcggtcagaataatggcgtgatccaattgactggcgttgccagccgttatgtcggttttgttgtggcaataatgctcatcattttgggcctgttccctgctgtcgctgggtttgtgcagcatattcctgagccggtactgggtggagcaactctcgtgatgttcgggactatcgcagcgtctggtgtgcgtattgtgtcacgcgagaccctgaatcgccgggcgattatgataatggccttatcattagcggttggtatgggtgtcgcacagcagccattgattttgcaatttgcgcctgactggatcaaaacgctgttctcttctgggattgccgctggcggtattactgccatcgtacttaacttactcttcccacaagaaaaatag

SEQ ID NO: 2393 - protein, 478 aa, Yersinia pestis KIM
MSRIIKMPPLPIWKYHAMSTQSAELDTAPPSPAHPSELIYHLEDRPPLPQTLFAACQHLLAMFVAVITPGLLICQALGLPAEDTQRIISMSLFASGLASLLQIKTWGPVGSGLLSIQGTSFNFVSPLIMGGLALKNGGADIPTMMAALFGTLMVASCTEILLSHVLHLARRIITPLVSGIVVMIIGLSLIQVGLTSIGGGYGAMSDNTFGAPKNLLLAGAVLGVIILLNRQRNPYLRVASLVIAMAVGYLLAWALGMLPESRPVVDTALITIPTPLYYGLSFDWNLLIPLMLIFMVTSLETIGDITATSDVSEQPVRGPLYMKRLKGGVLANGLNSMLSAIFNTFPNSCFGQNNGVIQLTGVASRYVGFVVAIMLIILGLFPAVAGFVQHIPEPVLGGATLVMFGTIAASGVRIVSRETLNRRAIMIMALSLAVGMGVAQQPLILQFAPDWIKTLFSSGIAAGGITAIVLNLLFPQEK

SEQ ID NO: 2394 - DNA, 1380 bp, Pseudomonas putida KT2440
  CDS (1)..(1380): transl_table=11
atgagctcacacgaacacagcccaggcgcaggggcgcctgccaatgaactggtgcttggtctggaggacaagccacggctgttgatcggcctgctggcagccctgcagcacctgctggcgatcatcgtgccgatcgtcacccctggcctgctgatctgccaggcgttgggtgtatctgcacgtgataccaatttgatcgtttcgatgtcgctggtgatctcgggtatcgccaccttcgtccagtgcaaacgcttcggcccatttggcgcggggctgctgatcgttcagggcaccagcttcaacttcgtcggcccgctgattgccggcggtgcgctgatggtcaagcaaggcacgccggttgaaggcgtaatggcagccatttttggcgtagtaatcgcgggctcgttcgtcgagatgggcgtgtcgcgcatcctgcccttcgtcaaacgcctgatcaccccgctggtgactggcatcgtggtgttgatgatcggcctgacgctgatcaaggtcggcctgatcagcatgggcggtggctttggtgccatggccaatggcacctttgccaatggcgaaaacctgctgatgtcgggcgtggtactggcgatcatcgtcgttctcaaccgtatcccggtggtgtggatgcgcagctgcgccatcgtcatcgccctggcggtcggctatgcgctggccggatacctgggccgcctggactttaccggcatgcacgaggccgcgctgttccaggtgccgacaccgctgcactttggcctgggcttctcgtgggcgctgttcattccgatgctggtgatctacctggtcacttcgctggaagccatcggtgacgttaccgccaccagcaaggtgtcgcgccagccggtcgaagggccgatgtggatgcagcggatcaaggggggcgtgctggtcaacggcgccaactcgctgctggccggtctgttcaacaccttccctagctcgatttttgcccagaacaacggggtgattcagctgaccggtattgccagccgtcatatcggtatgtggattgccgtgatgctggtgttgctgggtctgttcccgagtgttgccggggtgattcaggccgtgccggagccggtgctgggcggcgcggcgatggtcatgtttggtgcggttgcggcgtcggggatcaatattctggccagcacccggctggaccgtcgggcgctgctgattattgccgtgtcgttggcactgggcctgggtgtggcgcaggtgccagagttcctggcgcacatgccggcggcgattcgcaatgtgctggagtcgggtgtggctaccggggggatttgtgcgctggtgctgaactggttcttgccggagggcaaggagcaggcttga

SEQ ID NO: 2395 - protein, 459 aa, Pseudomonas putida KT2440
MSSHEHSPGAGAPANELVLGLEDKPRLLIGLLAALQHLLAIIVPIVTPGLLICQALGVSARDTNLIVSMSLVISGIATFVQCKRFGPFGAGLLIVQGTSFNFVGPLIAGGALMVKQGTPVEGVMAAIFGVVIAGSFVEMGVSRILPFVKRLITPLVTGIVVLMIGLTLIKVGLISMGGGFGAMANGTFANGENLLMSGVVLAIIVVLNRIPVVWMRSCAIVIALAVGYALAGYLGRLDFTGMHEAALFQVPTPLHFGLGFSWALFIPMLVIYLVTSLEAIGDVTATSKVSRQPVEGPMWMQRIKGGVLVNGANSLLAGLFNTFPSSIFAQNNGVIQLTGIASRHIGMWIAVMLVLLGLFPSVAGVIQAVPEPVLGGAAMVMFGAVAASGINILASTRLDRRALLIIAVSLALGLGVAQVPEFLAHMPAAIRNVLESGVATGGICALVLNWFLPEGKEQA

SEQ ID NO: 2396 - DNA, 1404 bp, Vibrio vulnificus CMCP6
  CDS (1)..(1404): transl_table=11
atgacaacgccgaacccgacgcgtaaaacggatctgatctatcaactcaacgatcgtccacctttgcctcaaactttgtttgctgcactgcagcacttgctggcgatgtttgtcgctgtgatcactccatccttgattatttgccaagcgcttggcgtgtctgccgaacaaaccaacaccatcatcagcatgtcgctgtttgcttcgggcatttcttcctttattcaaatccgcacttttggtccgattggctctgggctgctgtctgtacaaggcaccagttttaacttcttaggtccaattattggcgctggtttagcgctgaaggcaggcggcgccagcgttgagagcatgatggcggcgatttttggcaccattttggttgcctcgtttgcagagattctcctttcacgcgtgctggaatacgcgcgtcgcatcattacgccattggtttctggcatcgtcgtgaccttaattggtttaaccctgattcaagtcggcttggtatcgatgggcggcggctacgcggccctgggcgatggcacttttggcagcctcgataagttggcgctggcgggcaccgtactgggcctgattgtgttactcaatcgcgccaagaacccttacgtacgcgtggcgtcgattgtgatagccatgttggtgggctatgtcatggcctacttcatgggcatggtagacactcgccaagccagcagcagcgcactgattgccttaccaatcccgatgcagtttggtctgagtttcgactggtcgctgtttattccactggttctgattttcctcatcaccgcgctggaagcgattggtgatattaccgccacctcggaagtgtctggcgaaccagtcaaaggcccggtgtatatgaagcgcattaaaggcggcgtattggccgacggtctgaactcggcattggcggcggtattcaatagtttcccaaactccactttcagccaaaacaacggcgtgatcttgctaacgggtgtcgcaagccgctacgtcggttacttcatcgccggcatgttggtactgcttggtctgttccctggcgttgctggttttgttcagttgattccggaaccagttttaggcggtgcaaccatcgtgatgttcggcaccatcgccgctgcaggtgtgcgcatcatttctcgtgttgacctcgatcgccgtgccattctcatcatggcactgtcgttctcgatgggtttaggcattgcgcagaaaccggagattttgcagtttatgcctgagttcattaagagcattttctcttccggcgttgctgctggtggcattaccgcgattgtgcttaaccttcttctgcctgaaaagcttcagggtgaagaagaggaaaaggcgcacgagcccgcgactgtaaagcgctaa

SEQ ID NO: 2397 - protein, 467 aa, Vibrio vulnificus CMCP6
MTTPNPTRKTDLIYQLNDRPPLPQTLFAALQHLLAMFVAVITPSLIICQALGVSAEQTNTIISMSLFASGISSFIQIRTFGPIGSGLLSVQGTSFNFLGPIIGAGLALKAGGASVESMMAAIFGTILVASFAEILLSRVLEYARRIITPLVSGIVVTLIGLTLIQVGLVSMGGGYAALGDGTFGSLDKLALAGTVLGLIVLLNRAKNPYVRVASIVIAMLVGYVMAYFMGMVDTRQASSSALIALPIPMQFGLSFDWSLFIPLVLIFLITALEAIGDITATSEVSGEPVKGPVYMKRIKGGVLADGLNSALAAVFNSFPNSTFSQNNGVILLTGVASRYVGYFIAGMLVLLGLFPGVAGFVQLIPEPVLGGATIVMFGTIAAAGVRIISRVDLDRRAILIMALSFSMGLGIAQKPEILQFMPEFIKSIFSSGVAAGGITAIVLNLLLPEKLQGEEEEKAHEPATVKR

SEQ ID NO: 2398 - DNA, 1398 bp, Pseudomonas syringae pv. tomato str. DC3000
  CDS (1)..(1398): transl_table=11
atgcagcccgaaacttctgacaacgacgacctgatctacggcctgaatgaccgtcccaaaccgctgacggccatactggcggcattccagcacgtgctcgccagtttcgtcgggataatcacgccgccgctgattatcggatcaaccctggggctgaccgaatacctgccttacctgatcagcatggcgttgatggtgtccggcaccggcacgttcattcaggcgcgcaggccgttcggcatcggtgcaggcatgatctgtctgcaaggcaccagttttgcgtttttaggcgcagtgttgtcggcaggctttctggtcaagcagcgcggcggtagcccggaggacatcatggcgatgatcttcggcgtctgctttttcggtgcactggtgcagatagtgctcagtcgttgcatcggtcagttgcggcgtatcatcaccccgctggtcaccgggatcgtgattaccctgatcggcgtgagcctgatcaaggtcggcgtgactgacctgggtggcggcttcaatgcaccggacttcggcgcaccgctgaacctggcgctgggggtgttcgtactcgcagtgatcattgtgctcaatcgctccaacactccatgggtgcgcttgtcggcgatcatcatcggcctggctgtcggcagcctggccgcatggttcagcggcaagctgatcccgcagccgattcacgatctgccgctgatcagcgtgccagtgccgttccgcttcggtttcaattttgactggaccgctttcctgccggtcgcgctgatttatctgatcagcagtatcgaaaccgtcggcgacctgaccgccaactgcatgctggcccgccagccgatcagcgggccgagctatgtggcgcggctcaagggtggcgtgctcggcgacggtgtgagctgcatgattgccgcgactttcagtgcctttcccaacaccacgttcgcgcagaacaacggagtgattcagttgaccggcgttgccagccgctatgtcggcctgtacatcggtgccgtgctgttcatcctcggactgtttccgcatatcggcgccatcgtccagcagatccctaaaccggtgctgggcggcgcaacgctggtgatgttcggcagcgttgcggcggcaggcgttcgcatcctcgcccagtcgccactggatcggcgtagcatgctgatcatcgccacctcatttggtgtcggcctgggcattgcggcgcagccggcgctgctgcatcagatgcccaagttggtccagaacctgttcgattcggcaatcaccagcggcggcattacagccattgtcatgtgcctgctgattccggagggtaaagtcgccgtgacgacgacccaggctgcgacggaacgcaaaccccttgaacaaccacgatag

SEQ ID NO: 2399 - protein, 465 aa, Pseudomonas syringae pv. tomato str. DC3000
MQPETSDNDDLIYGLNDRPKPLTAILAAFQHVLASFVGIITPPLIIGSTLGLTEYLPYLISMALMVSGTGTFIQARRPFGIGAGMICLQGTSFAFLGAVLSAGFLVKQRGGSPEDIMAMIFGVCFFGALVQIVLSRCIGQLRRIITPLVTGIVITLIGVSLIKVGVTDLGGGFNAPDFGAPLNLALGVFVLAVIIVLNRSNTPWVRLSAIIIGLAVGSLAAWFSGKLIPQPIHDLPLISVPVPFRFGFNFDWTAFLPVALIYLISSIETVGDLTANCMLARQPISGPSYVARLKGGVLGDGVSCMIAATFSAFPNTTFAQNNGVIQLTGVASRYVGLYIGAVLFILGLFPHIGAIVQQIPKPVLGGATLVMFGSVAAAGVRILAQSPLDRRSMLIIATSFGVGLGIAAQPALLHQMPKLVQNLFDSAITSGGITAIVMCLLIPEGKVAVTTTQAATERKPLEQPR

SEQ ID NO: 2400 - DNA, 1413 bp, Vibrio parahaemolyticus RIMD 2210633
  CDS (1)..(1413): transl_table=11
ttgcgactagcgagacaaatcatgacaacttcaaaccgatcttcggaactggtctatcaattaaatgatcgtccaccactgccacaaacgatttttgctgcacttcagcatttattggcgatgttcgttgcggtgattacaccttcattaatcatttgccaatctttgggcgttccggccgatcaaaccaacaccattatcagcatgtcgctgtttgcatctggtgtttcttcctttatccaaatccgtacctttggccctgtcggctccggcttgctatcggtgcaaggcaccagctttaactttttgggtccaatcatcggtgcgggtttatcactcaaagcaggtggcgcggacatcagcaccatgatggcggcgattttcggtacgattttagtcgcctcttttgccgagattttactgtctcgtgtgcttgagcatgcacgtcgcatcatcacacctctcgtctctggcattgtcgtaactctgattggcctgacgctgatccaagtcggcttggtttctatgggtggaggctatgctgcaatgggcgacggtacttttggtagcttagacaaactggcgctcgccggtaccgtacttgggttaattgtgattttgaatcgttctaaaaacccatacattcgcgtggcttcgatcgtgattgccatgctggttggctatgtaatggcatacttcatgggtatggtcgacacctcaaaattgggggaaaccaacctcgttgcgctaccgattccgatgcagtacggcttgtcatttgactggtcactgtttatccctctcgtgctgattttctttatcacggcgttggaagcgatcggcgacattaccgcaacgtctgaagtatctggcgagccggttaaaggccctatttacatgaagcgcatcaaaggtggggtattagcggatggtctgaactcggctatcgctgcggtattcaacagctttccaaactctaccttcagtcaaaacaacggcattatcatgctaacgggcgtcgcaagccgttacgtgggttactttatctcgggcatgttagtgattcttggtctattcccgggcgtggctagttttgttcagctgatcccagaacctgtacttggtggtgcaaccatcgtgatgttcggtaccattgccgctgcaggcgtgcgtattatctcgcgagttgacctcgaccgccgcgcgattctgattatggcgttgtcattctcgatggggttaggtatcgctcagaaaccggagattctgcagtttatgcctgagtttattaaaagcatcttctcaaccggtgtggctgctggcggtatcaccgcgatactgctgaacttgctgcttccagaaaaactgacagaagaagatgaacttgtcgctcaagaagtgaaagagtcttaa

SEQ ID NO: 2401 - protein, 470 aa, Vibrio parahaemolyticus RIMD 2210633
MRLARQIMTTSNRSSELVYQLNDRPPLPQTIFAALQHLLAMFVAVITPSLIICQSLGVPADQTNTIISMSLFASGVSSFIQIRTFGPVGSGLLSVQGTSFNFLGPIIGAGLSLKAGGADISTMMAAIFGTILVASFAEILLSRVLEHARRIITPLVSGIVVTLIGLTLIQVGLVSMGGGYAAMGDGTFGSLDKLALAGTVLGLIVILNRSKNPYIRVASIVIAMLVGYVMAYFMGMVDTSKLGETNLVALPIPMQYGLSFDWSLFIPLVLIFFITALEAIGDITATSEVSGEPVKGPIYMKRIKGGVLADGLNSAIAAVFNSFPNSTFSQNNGIIMLTGVASRYVGYFISGMLVILGLFPGVASFVQLIPEPVLGGATIVMFGTIAAAGVRIISRVDLDRRAILIMALSFSMGLGIAQKPEILQFMPEFIKSIFSTGVAAGGITAILLNLLLPEKLTEEDELVAQEVKES

SEQ ID NO: 2402 - DNA, 1311 bp, Bacteroides thetaiotaomicron VPI-5482
  CDS (1)..(1311): transl_table=11
atgaaaacagatttgatctatggcgtagaagaccgccccccatttaaagatgccctgtttgctgccttgcaacatctgctggctatctttgtagccatcattacacctcctcttatcattgcgagcgcactgaagctggatgttgaaaaaacaagctttctggtatctatgtccctttttgcttcgggggtatctacgtttatacaatgccgtcgtatcggtccgataggagcgaagctgctctgcatccaaggtaccagcttctcctttatcggtcctatcatagcgaccggattagtaggcggacttccgctgatattcggctcctgtatagctgccgcacctattgaaatggtcgtcagccgtaccttcaagtatcttcgtaatatcatcaccccgctagtgtccggcattgtcgtactactgatcggattgagtctgatcaaagtcggtatcgtttcctgtggcggcggatatagtgcgatggacgacggctccttcggttcgtgggaaaatctgtccattgcggcactcgtactgttgagcgtcttgtttttcaatcgctgcaaaaacaaatacctgcgcatgagttccatcgtgttcggtctttgcctgggttatggactggctttcgccctgggaaaagtaaatatgagcgcactaaatgtcgagatgctgatgagtttcaacatcccgcaacctttcaaatacggtattgattttaatatctcttcatttattgccattggcttggtctatctgatcaccgccattgaagccacaggagatgtgacagccaactctatgatttccggacttccgattgaaggtgattcttatctgaaacgtgtttccggcggtgtgatggcagatggcttcaactctcttttagcaggtatattcaactccttcccgaactccatcttcgcacagaataacggtatcatccaattaacaggagttgccagccgctatgtaggctattatattgccgctatgctcgttctgctgggattattccccattgtaggagctatattctctctgatgcccgatccggtactgggaggcgccaccttattaatgttcggtacagtagcggcagcaggtatccgcatcgtttcctcacaggaaataggccgcaaagaaaccttagtcttagcagtcagcctatctttaggtttgggtgtggaactaatgccggacgtattaaaacaagctccagaggcaattcgaagtattttctcttcaggaatcaccaccggaggtttaactgcaattgttgctaatatggtaattagagtgaagtaa

SEQ ID NO: 2403 - protein, 436 aa, Bacteroides thetaiotaomicron VPI-5482
MKTDLIYGVEDRPPFKDALFAALQHLLAIFVAIITPPLIIASALKLDVEKTSFLVSMSLFASGVSTFIQCRRIGPIGAKLLCIQGTSFSFIGPIIATGLVGGLPLIFGSCIAAAPIEMVVSRTFKYLRNIITPLVSGIVVLLIGLSLIKVGIVSCGGGYSAMDDGSFGSWENLSIAALVLLSVLFFNRCKNKYLRMSSIVFGLCLGYGLAFALGKVNMSALNVEMLMSFNIPQPFKYGIDFNISSFIAIGLVYLITAIEATGDVTANSMISGLPIEGDSYLKRVSGGVMADGFNSLLAGIFNSFPNSIFAQNNGIIQLTGVASRYVGYYIAAMLVLLGLFPIVGAIFSLMPDPVLGGATLLMFGTVAAAGIRIVSSQEIGRKETLVLAVSLSLGLGVELMPDVLKQAPEAIRSIFSSGITTGGLTAIVANMVIRVK

SEQ ID NO: 2404 - DNA, 1338 bp, Porphyromonas gingivalis W83
  CDS (1)..(1338): transl_table=11
atggccatcgcaccgaatgaagctaccccacaggtagatctgatctacaaaatcgaagacaagccttctttcaaagatgctgtctttgctgctttccaacacctccttgccatctttgtggctatcattacgcccccacttatcattgcaggagcactcgatctggatctggagactacttctttcctcgtctccatggctcttttcgcttcgggggtatccacctttatccaatgtagaagagtagggcctttgggtgccgggctgctatgtgtgcagggcacaagtttttcttttatcggcccgattatcagcgcgggcctggccggcggcctgccacttatattcggttgtacgatagcggcagctccggtagagatgatcgtcagccgtaccttccgttatctcaagcagatcattacgcctctcgtttcgggaatcgtggtcttgctgatcggtctgagtctgatcaaagtggggattatctcatgcggaggaggcaatgcggcgatgagcgacgggactttcggcaactggcagaatctcagcattgctgctctcgtcttggtaagcgtcctcttcttcaataagagcaaaaacaaatacattcgtatgagctccatcgtactcggtctgctcgtcggttatgttttggcttacatcctcggtcgagtggatctctccggtatggagacgacgaagatcgcactgctgaatatccctgttccattcaaatacggccttagcctgaatctgtcttcctttatcgccatagggttgatctatcttattacagccatcgaagcaacgggggatattacggccaattcgatgatttcgggcgaaccggtggagggtgataaatacatcaagcgtgtatcgggcggagtattggccgatggcttcaattcgctcctcgccggcgtgttcaattcgttccccaattctatcttcgcccaaaacaacgggttgatccagctcacgggtgtggccagtcgtcgagtgggctactatattgcggctatgctcattgtgcttggcttgttcccgggtatcggcctcatcttttctctgatgcccgatcccgtattaggaggagctacgctgctgatgttcggaactgtagccgcagccggtatacgcatcattgcagctcaggatatagaccggagggctacgatgattttggccatcagtctgtcactgggcttgggtgtcgagttgatgccggacatcttgcgcaacatatctcttgacctgagaggtatcttctcttcgggaattacgaccggcggtcttgctgccataatttctaatatgcttatccgtggcaaatag

SEQ ID NO: 2405 - protein, 445 aa, Porphyromonas gingivalis W83
MAIAPNEATPQVDLIYKIEDKPSFKDAVFAAFQHLLAIFVAIITPPLIIAGALDLDLETTSFLVSMALFASGVSTFIQCRRVGPLGAGLLCVQGTSFSFIGPIISAGLAGGLPLIFGCTIAAAPVEMIVSRTFRYLKQIITPLVSGIVVLLIGLSLIKVGIISCGGGNAAMSDGTFGNWQNLSIAALVLVSVLFFNKSKNKYIRMSSIVLGLLVGYVLAYILGRVDLSGMETTKIALLNIPVPFKYGLSLNLSSFIAIGLIYLITAIEATGDITANSMISGEPVEGDKYIKRVSGGVLADGFNSLLAGVFNSFPNSIFAQNNGLIQLTGVASRRVGYYIAAMLIVLGLFPGIGLIFSLMPDPVLGGATLLMFGTVAAAGIRIIAAQDIDRRATMILAISLSLGLGVELMPDILRNISLDLRGIFSSGITTGGLAAIISNMLIRGK

SEQ ID NO: 2406 - DNA, 1404 bp, Vibrio vulnificus YJ016
  CDS (1)..(1404): transl_table=11
atgacaacgccgaacccgatgcgtaaaacggatctgatctatcaactcaacgatcgtccacctttgcctcaaactttgtttgctgcactgcagcacttgctggcgatgtttgtcgctgtgatcaccccatccttgattatttgccaagcgcttggcgtgtctgccgaacaaaccaacaccatcatcagcatgtcgctgtttgcttcgggcatttcttcctttattcaaatccgcacttttggtccgattggttctgggctgttatccgtacaaggcaccagttttaacttcttaggtccgattatcggtgctggtttagcgctgaaggcaggcggcgccagcgttgagagcatgatggcggcgatttttggcaccattttggttgcctcgtttgcagagattctcctttcgcgcgtgttggaatacgcgcgtcgcatcattacgccattggtttctggcatcgtcgtgaccttaattggtttaaccctgattcaagtcggcttggtatcgatgggcggcggctacgcggccctgggcgatggcacttttggcagcctcgataagttggcgctggcgggcaccgtactgggcctgattgtgttactcaatcgcgccaagaacccttacgtacgcgtggcgtcgattgtgatagccatgttggtgggctatgtcatggcctacttcatgggcatggtagacactcgccaagccagcagcagcgcactgattgccttaccaatcccgatgcagtttggcctgagtttcgactggtcgctgtttattccactggttctgattttcctcatcaccgcgctggaagcgattggtgatattaccgccacctcggaagtgtctggcgaaccagtcaaaggcccggtgtatatgaaacgcattaaaggcggcgtattggccgacggtctgaactcggcattggcggcggtattcaatagtttcccgaactccactttcagccaaaacaacggcgtgatcttgctaacgggtgtcgcaagccgctacgtcggttactttatcgccggcatgttggtactgcttgggctgtttcctggcgttgctggttttgttcagttgattccggaaccagttttaggcggtgcaaccatcgtgatgttcggcaccatcgccgctgcaggtgtgcgcatcatttctcgtgttgacctcgatcgccgtgccattctcatcatggcactgtcgttctcgatgggtttaggcattgcgcagaaaccggagattttgcagtttatgcctgagttcattaagagcattttctcttccggcgttgctgctggtggcattaccgcgattgtgcttaaccttcttctgcctgaaaagcttcagggcgaagaagaggaaaaggcgcacgagcccgcgactgtaaagcgctaa

SEQ ID NO: 2407 - protein, 467 aa, Vibrio vulnificus YJ016
MTTPNPMRKTDLIYQLNDRPPLPQTLFAALQHLLAMFVAVITPSLIICQALGVSAEQTNTIISMSLFASGISSFIQIRTFGPIGSGLLSVQGTSFNFLGPIIGAGLALKAGGASVESMMAAIFGTILVASFAEILLSRVLEYARRIITPLVSGIVVTLIGLTLIQVGLVSMGGGYAALGDGTFGSLDKLALAGTVLGLIVLLNRAKNPYVRVASIVIAMLVGYVMAYFMGMVDTRQASSSALIALPIPMQFGLSFDWSLFIPLVLIFLITALEAIGDITATSEVSGEPVKGPVYMKRIKGGVLADGLNSALAAVFNSFPNSTFSQNNGVILLTGVASRYVGYFIAGMLVLLGLFPGVAGFVQLIPEPVLGGATIVMFGTIAAAGVRIISRVDLDRRAILIMALSFSMGLGIAQKPEILQFMPEFIKSIFSSGVAAGGITAIVLNLLLPEKLQGEEEEKAHEPATVKR

SEQ ID NO: 2408 - DNA, 1410 bp, Yersinia pestis biovar Microtus str. 91001
  CDS (1)..(1410): transl_table=11
ttgccgatctggaaataccacgccatgtctacgcaatctgccgaacttgatactgcaccgccatcaccggctcaccccagcgaattgatctaccacctagaagaccgaccgccactcccacaaacactgtttgccgcttgccagcatctcttggcgatgtttgttgcggtaatcacccccggtttattgatttgtcaggctttggggttacccgcagaagatactcaacgcattattagtatgtcgttatttgcttcgggcctagcgtctttactgcagattaaaacttggggccccgtgggttcaggcctgttatccattcaaggcaccagttttaactttgtttctccgttgattatgggggggctggcgctaaaaaacggtggggcagatatcccaacgatgatggcggcgctgttcggtacgttaatggttgcgtcctgcaccgagatcttactctcacatgtgctgcatctggcacgccgtattatcaccccgctggtatccggtattgtggtgatgattatcggcctgtcattgattcaagttgggctgacatctattggtggtggttatggtgcgatgagcgataacacctttggtgcaccgaaaaacttattattagccggtgccgtattgggggtgatcattctgcttaaccgccagcgtaacccgtatttacgtgttgcctctttggtgatcgctatggccgtgggttatctgctcgcctgggcattggggatgttgcctgagagccgcccagttgtagataccgcgctgattactattccaacgccgttgtactatgggctgtccttcgactggaacttactgattcctctgatgctgatctttatggtgacctcactggaaaccataggcgatattaccgcaacatctgatgtatcagagcaaccggttcgcggcccgttatatatgaaacgcctaaaaggcggtgtactggccaatggtttgaactcgatgctgtccgctatattcaataccttccccaactcctgcttcggtcagaataatggcgtgatccaattgactggcgttgccagccgttatgtcggttttgttgtggcaataatgctcatcattttgggcctgttccctgctgtcgctgggtttgtgcagcatattcctgagccggtactgggtggagcaactctcgtgatgttcgggactatcgcagcgtctggtgtgcgtattgtgtcacgcgagaccctgaatcgccgggcgattatgataatggccttatcattagcggttggtatgggtgtcgcacagcagccattgattttgcaatttgcgcctgactggatcaaaacgctgttctcttctgggattgccgctggcggtattactgccatcgtacttaacttactcttcccacaagaaaaatag

SEQ ID NO: 2409 - protein, 469 aa, Yersinia pestis biovar Microtus str. 91001
MPIWKYHAMSTQSAELDTAPPSPAHPSELIYHLEDRPPLPQTLFAACQHLLAMFVAVITPGLLICQALGLPAEDTQRIISMSLFASGLASLLQIKTWGPVGSGLLSIQGTSFNFVSPLIMGGLALKNGGADIPTMMAALFGTLMVASCTEILLSHVLHLARRIITPLVSGIVVMIIGLSLIQVGLTSIGGGYGAMSDNTFGAPKNLLLAGAVLGVIILLNRQRNPYLRVASLVIAMAVGYLLAWALGMLPESRPVVDTALITIPTPLYYGLSFDWNLLIPLMLIFMVTSLETIGDITATSDVSEQPVRGPLYMKRLKGGVLANGLNSMLSAIFNTFPNSCFGQNNGVIQLTGVASRYVGFVVAIMLIILGLFPAVAGFVQHIPEPVLGGATLVMFGTIAASGVRIVSRETLNRRAIMIMALSLAVGMGVAQQPLILQFAPDWIKTLFSSGIAAGGITAIVLNLLFPQEK

SEQ ID NO: 2410 - DNA, 1746 bp, Aspergillus terreus NIH2624
  CDS (1)..(1746)
atggacggcccagatcagattggcccggattttcgtcccaagcgaaccttggcagaccaggctcgtcgaatcaagaagactttcaccactcgagaagggttactcggagactacgactatgcctttctcttcaccccgcgaattcctttcctgtccaaaacccggagtacagccccgttcttcggcctggaagacaaggtcccggtgttcctggccctgctcttaggcttacaacatgccctggccatgttggcgggagtcatcgctcctcccatcatcctcggcggttctggtggtgtcaactttggtgaagaagactaccagtacctggtttcggcgtcattgattgcctccggactgctctccgccctgcagatggcgcgcttgcacgttacaaaaactcgttactatattggaacgggccttatctccgtcgtcggcacctccttcgccaccatcacagtcgcgacaggcacctttgagcagatgtactcgacaggctactgtcccatggatggagatacgcggttgccttgtcccaaaggctacggtgcgcttctggccacctcgtgtctctgctccttgctcgaaatcggcctctccttcctcagccctcgcattctcaaacgtctcttccctcccttggtgactggcccgacggtgcttctcatcggagtctcgctcattaagagtgggatgatggactgggctggcggctcaggaggctgtggggacgatccctcggcgcgcaacctgtgtcccagcgcggacgccccgcacgctctcccatggggcagtgccgagttcatcggtcttgggttcctggtattcgtgtccatcatcttgtgcgagcggttcggatcgcccattatgaaatcctgcgccgtcgtgatcggtctgctggtcggatgcatcgtggcggccgcctgcgggtactttgatcgctccggcatcgacgaggcccccgtcgcctccttcctctgggtccggacgttcccgctgcacctctacccgccgctgatcctaccgctcctcgccgtctacatcgtcatcatgatggagtccatcggcgacatcaccgccacctgcgacgtctcgcaggtcgaggtcgagggccccaacttcgactcgcgcatccagggcggtgtcctgggtaacggcgtcacctgtctgatcgccggcctggcgaccatcacaccgatgtccgtgttcgcgcagaacaacggcgtcatcgcgctgaccaagtgcgccaaccgcaaggccggctactgctgctgcctcttcctcgtcgtcatgggcatcttcgccaagttcgccgccgccctcatcgccatccccaagcccgtcctcggcggcatgaccacgttcctcttctcgtctgtcgccatctccggcgtgcgcatcgtctcccacattccgttcacccggcggaaccgtttcatcctgaccgcctcgtttgccgtggggatggcggccacgctggtgccggaatggttctcgtactttttcacgtacgacggcgacaaccacgccctggagggtctgctgcaggcagtcgagctggtcatggagaacgggtttgctgtgacggcgtttctggggttgattctcaacctgctgctgccggaagatccggatgaggaggcggctcttttgggcctcccccggagtgatgcgggtgactctaccgagacccccacgcctttcaagacagacaaggaggagactcaggtgcgggctgtatag

SEQ ID NO: 2411 - protein, 581 aa, Aspergillus terreus NIH2624
MDGPDQIGPDFRPKRTLADQARRIKKTFTTREGLLGDYDYAFLFTPRIPFLSKTRSTAPFFGLEDKVPVFLALLLGLQHALAMLAGVIAPPIILGGSGGVNFGEEDYQYLVSASLIASGLLSALQMARLHVTKTRYYIGTGLISVVGTSFATITVATGTFEQMYSTGYCPMDGDTRLPCPKGYGALLATSCLCSLLEIGLSFLSPRILKRLFPPLVTGPTVLLIGVSLIKSGMMDWAGGSGGCGDDPSARNLCPSADAPHALPWGSAEFIGLGFLVFVSIILCERFGSPIMKSCAVVIGLLVGCIVAAACGYFDRSGIDEAPVASFLWVRTFPLHLYPPLILPLLAVYIVIMMESIGDITATCDVSQVEVEGPNFDSRIQGGVLGNGVTCLIAGLATITPMSVFAQNNGVIALTKCANRKAGYCCCLFLVVMGIFAKFAAALIAIPKPVLGGMTTFLFSSVAISGVRIVSHIPFTRRNRFILTASFAVGMAATLVPEWFSYFFTYDGDNHALEGLLQAVELVMENGFAVTAFLGLILNLLLPEDPDEEAALLGLPRSDAGDSTETPTPFKTDKEETQVRAV

SEQ ID NO: 2412 - DNA, 1821 bp, Chaetomium globosum CBS 148.51
  CDS (1)..(1821)
atggatgaagaccagattccgtcccaaattctcccggagccggctccgaagcggaccctcggttctcgattacacgccgtgaagaggacgcttctcacgaaagaaggcctcatcggcaactacgactatgccttcctcttccgtcctaatctccctttcatgaaaaaggctgatcggccgccacccttcttcggcctcaatgaccggatgcccgtggtattggccctactcctcggcttccaacatgcactcgctatgctggccggcatcatcacgccgcccatcatcatggccggcgccggcggcgtcaacctcaacaccgaacagacccagtacctggtatccaccgccctgatcgtgtctggcatcctgtccaccatccaaatcacccgctttcgcattctcaagaccccctactacatcgggacgggcctgatctcggtggttggcatctcctttgccatcatcccggtcgcctcgggcgccttcagccagatgtacgccaacggcttctgtccgaccgctgaggacggcacgccgctaccgtgtccggatgcctacggggccgtactgggcaccgcagcggtctgttcgctcctcgagatcctcatctcgttcgtgcctcccaaggtcattctgcgcatcttcccgcctatcgtgacggggccgaccgtcatgctgattggcatcaacttgatcgcctccggtttcaagaattgggccggcggttctggcccttgcgccgacgcgaacccggccgagttttttgccctgtgccctgatatcaccgcaccccatgccctcccctggggctcgcccgagtatcttggccttggattctccgtgttcgtgaccatcatcctctgcgagcgcttcggctcgcccatcatgaagtcgaccagcgtggtcatcggcctactaacaggctgcatcatcgccgcggcgtgcgggtactttgaccggtccggcatcgacacggcgcccgcggcgtccttcatctgggtgcacacgttcaagctgtccatctacgggccgctggtgctgccgctcatggccgtcttcatcatctgcgcgtgcgaggccatcggcgacatcacggcgtcgtgcgacgtgtctcgcctcgaggtcgagggcgacatctacgagagccgcatccagggcggcgtgctggccgacggcgtcaacggcctgctcgccgccctcgccaccattacccccatgaccacctttgcccagaacaacggcgtcatcgccctcacccgctgcgcgaaccgctccgccgggtattgttgctgcctcttcctcctcctcgcgggcatcttcaccaaattcgccgcctccctcgttgccatcccctccgccgtcctcggcggcatgacgaccttcctcttcaccgccgtcgccgtctcggggctcgccatcgtcgccaagggcgtgccctttacgcggcgcaaccgttttgtgctcaccgcgggcctggcgctggggtatggcgcgacgctggtgccggattattttgagggggtgttccgcggggtggcggaacaggataaggcgttgagggggtttttggatgccattgcgttggtgatggagacggggtttgcggtcacggcgttggtgacggtggtgttgaatttggtgttgccggtggagttggaggagggggaggaggtgagggctggggagggggatagtgtggttggtggtggtggaggtggtagggggagggtgaggtcggttgatgagggagtggtaggggggagggggagtggcagcggggatgatagtggggagttcaaggggggtaaatctgcgtaa

SEQ ID NO: 2413 - protein, 606 aa, Chaetomium globosum CBS 148.51
MDEDQIPSQILPEPAPKRTLGSRLHAVKRTLLTKEGLIGNYDYAFLFRPNLPFMKKADRPPPFFGLNDRMPVVLALLLGFQHALAMLAGIITPPIIMAGAGGVNLNTEQTQYLVSTALIVSGILSTIQITRFRILKTPYYIGTGLISVVGISFAIIPVASGAFSQMYANGFCPTAEDGTPLPCPDAYGAVLGTAAVCSLLEILISFVPPKVILRIFPPIVTGPTVMLIGINLIASGFKNWAGGSGPCADANPAEFFALCPDITAPHALPWGSPEYLGLGFSVFVTIILCERFGSPIMKSTSVVIGLLTGCIIAAACGYFDRSGIDTAPAASFIWVHTFKLSIYGPLVLPLMAVFIICACEAIGDITASCDVSRLEVEGDIYESRIQGGVLADGVNGLLAALATITPMTTFAQNNGVIALTRCANRSAGYCCCLFLLLAGIFTKFAASLVAIPSAVLGGMTTFLFTAVAVSGLAIVAKGVPFTRRNRFVLTAGLALGYGATLVPDYFEGVFRGVAEQDKALRGFLDAIALVMETGFAVTALVTVVLNLVLPVELEEGEEVRAGEGDSVVGGGGGGRGRVRSVDEGVVGGRGSGSGDDSGEFKGGKSA

SEQ ID NO: 2414 - DNA, 1752 bp, Neosartorya fischeri NRRL 181
  CDS (1)..(1752)
atggacggtcccgatcgaatcggtcccgatcacagtcccaggcggactttccgtgataaagctcgacggatcgtcaagacatggactaccaaagaaggattggttggagactacaactacgcctacctcttcacaccgagaatcccttttaccaagaacatcagaaggacggcccctttctttggactgcacgacaggttacctgtgctacttgccttcattctgggtcttcaacatgctctcgcgatgttggctggagtcatatcccctcccatcatcttgggcggttctagcggcgccaacttcggagatgccgaataccagtacctcgtttccacatccctgatcgtctccggtctgctatccgctattcagatggcccgcttacgcatttggaagacccgctacttcattggtactggattgatttcggtcgtcggcacctccttctccacaatcaccgtcgcatcgggaacgttctctcagatgtatgcgtctggatactgtcccacagatgccagcgggaacaagctgccatgccccagaggttacggagctatcctgggcacggcttgcttatgctctctacttacgatcggcctgtcgttcatgagtccaaggattttaaagcgcattttcccgcctatggtgacgggtcctacggttctcttgatcggagcaagcctcatcgaaagtggcatgaaggactgggctggtggctctggctgtggatctgacccatccgctcgtgctttgtgtcccagtgctggtgcgccacatgctctcccctggggcagtgcggagttcatcggcctcggattcctggttttcgtgacgattattctttgcgagcggttcggatcccctattatgaaatcgtgcgccgtcgtggtcggtcttctggttggatgtatcgtggcagctgcctgcggctattttgacaggtcgggcatcgactctgcgcccgttgtctcattcatctgggtgaaaaccttcccattgactatatacgcgcctctgatccttccgttcctcgcgctctacatcgttatcatgatggaatcaatcggtgacatcactgccacatgcgacgtctcccagctcgaagtcgaaggcgcggaatttgattcgcgcgtccagggtggtgtgctaggcaatggattgacgtgcctgctggctggactctttaccatcacgcccatgtcggtctttgctcagaacaacggtgtcattgctctgacaaaatgcgccaaccgcaaggccggctactgctgctgcttcttcctcgtcgtcatgggtgtcttcgccaagttcgctgccgccatcgtggccatccccaagcctgtcctgggcggcatgaccacgtttttgttctcgtccgtagccatctccggcatccgtatcatctccacgatcccattcacccgccgcaaccggtttatcctgacggcctctttcgcggtgggtatggccgctacgctggtgcccgactggttctcgtacttcttcacgtatagtggtgataaccatgccctggagggtctgctgaacgctgtggagctcgtcatggagaatggatttgctattactgctgttatcggattggtcctcaacctcgtccttccggaagatccggaagacgaggcggccatcgtcgaggctacggcaagcgatgcgccatcggaggagctgaaggattcagacccttcgtcacttaaagccgggcgaccgtccggctctctggctgtatga

SEQ ID NO: 2415 - protein, 583 aa, Neosartorya fischeri NRRL 181
MDGPDRIGPDHSPRRTFRDKARRIVKTWTTKEGLVGDYNYAYLFTPRIPFTKNIRRTAPFFGLHDRLPVLLAFILGLQHALAMLAGVISPPIILGGSSGANFGDAEYQYLVSTSLIVSGLLSAIQMARLRIWKTRYFIGTGLISVVGTSFSTITVASGTFSQMYASGYCPTDASGNKLPCPRGYGAILGTACLCSLLTIGLSFMSPRILKRIFPPMVTGPTVLLIGASLIESGMKDWAGGSGCGSDPSARALCPSAGAPHALPWGSAEFIGLGFLVFVTIILCERFGSPIMKSCAVVVGLLVGCIVAAACGYFDRSGIDSAPVVSFIWVKTFPLTIYAPLILPFLALYIVIMMESIGDITATCDVSQLEVEGAEFDSRVQGGVLGNGLTCLLAGLFTITPMSVFAQNNGVIALTKCANRKAGYCCCFFLVVMGVFAKFAAAIVAIPKPVLGGMTTFLFSSVAISGIRIISTIPFTRRNRFILTASFAVGMAATLVPDWFSYFFTYSGDNHALEGLLNAVELVMENGFAITAVIGLVLNLVLPEDPEDEAAIVEATASDAPSEELKDSDPSSLKAGRPSGSLAV

SEQ ID NO: 2416 - DNA, 1758 bp, Aspergillus clavatus NRRL 1
  CDS (1)..(1758)
atggaagggccggatcggattggtcccgatcatagtccgaagcggacgctccgtgaccgagcccgacgagtggtgaaaacttggaccaccaaagaaggattggttggagattataactatgcctacttgttcacaccgagaatccccttcaccaagcacgtacgaaagaccgcaccgttcttcggactgcatgaccgtttgccggtgttgctggccttcatcttgggtctccaacatgccctagcaatgttggctggagttatctctccgcctatcatcttgggtggatctagcggtgcaaactttggagacgaggagtatcagtacctggtgtcgacgtctctgatcgtttctggcctgctttccgctgtgcagatgactcgctttcgcctctggaaaactcgattcttcatcggtaccggcttgatctccgtcgttggcacttccttctccaccatcaccgtcgcctcgggcaccttcagccagatgtacgcctccggatactgccccgtggatggcgaaggaaatcgtctcccctgcccgaaaggctacggagccatcctcggtactgcatgcttgtgctcgctgcttgagatcggcctatcctttatgagccctaggatcttgaaacgcatcttcccgcctctagtgactggtcccacggttctgctgatcggagcaagtctgatctcaagtggtatgaaggactgggctggcggttccggcagctgtgggtttgatccatccgcccgtgctctttgccccagtgccaatgcaccccatgcgctgccttggggaagtgccgagttcatcggtctcggcttcttggtgtttgtgaccatcatcctctgcgagcgattcggttcccccatcatgaaatcctgcgccgtggtgatcggtctgctggtgggatgcatcgtggccgcggcctgtggttacttcgaccgatccggcatcgacgcggccccggtcgcctcgttcatctggctgaagacattcccgctgacgatctacgcgccgctgatcctaccgttcctggcactgtacatcgtgatcatgatggaatcgatcggagacatcaccgccacctgcgacgtctcccagcttgaggtcgagggcgccgagtttgattcgcgcatccagggtggtgtcctgggcaacggcctgacgtgtctgttcgccggcctgtgcaccatcacgcccatgtcggtcttcgcccagaacaacggcgtcatcgcgctgaccaagtgcgccaaccgcaaggctggctactgctgctgcttcttcctcgtggtcatgggcgtcttcgccaagttcgcggccgccatcgtggccatccccaagccggtgctcggcggcatgaccacctttctgttctcgtccgtggccatctccggcatccgcatcatctccacgatccccttcacgcgccgcaaccggttcatcctgacggccgcgttcgccgtcggcatggccgccactctggttccggactggttctcctacttcttcacctacagcggtgacaaccatgcgctacaggggttgctgaacgcggtggatctcgtcatggagaacggcttcgccatcaccgcggtcattggactgatcctcaacctcatccttcccgaggacccggaggacgaggctgccgttgtggaggccaccgaaacccagactcccactgaagcgatcaagggtgcttcggagcctttcccatataaagcggagcagctgcctggtccttcaagagtatga

SEQ ID NO: 2417 - protein, 585 aa, Aspergillus clavatus NRRL 1
MEGPDRIGPDHSPKRTLRDRARRVVKTWTTKEGLVGDYNYAYLFTPRIPFTKHVRKTAPFFGLHDRLPVLLAFILGLQHALAMLAGVISPPIILGGSSGANFGDEEYQYLVSTSLIVSGLLSAVQMTRFRLWKTRFFIGTGLISVVGTSFSTITVASGTFSQMYASGYCPVDGEGNRLPCPKGYGAILGTACLCSLLEIGLSFMSPRILKRIFPPLVTGPTVLLIGASLISSGMKDWAGGSGSCGFDPSARALCPSANAPHALPWGSAEFIGLGFLVFVTIILCERFGSPIMKSCAVVIGLLVGCIVAAACGYFDRSGIDAAPVASFIWLKTFPLTIYAPLILPFLALYIVIMMESIGDITATCDVSQLEVEGAEFDSRIQGGVLGNGLTCLFAGLCTITPMSVFAQNNGVIALTKCANRKAGYCCCFFLVVMGVFAKFAAAIVAIPKPVLGGMTTFLFSSVAISGIRIISTIPFTRRNRFILTAAFAVGMAATLVPDWFSYFFTYSGDNHALQGLLNAVDLVMENGFAITAVIGLILNLILPEDPEDEAAVVEATETQTPTEAIKGASEPFPYKAEQLPGPSRV

SEQ ID NO: 2418 - DNA, 1773 bp, Pichia stipitis CBS 6054
  CDS (1)..(1773): transl_table=12
atgctgaaggcggaaactttcaagtcctacactaagagggtagtgagaaaatggactaccaaagaagggttctttggagactatgactacgcttaccttttcattcctgacattccgtttatcaccaaggagccaaagacccagcccttcttcggactcaactcagacatgcctcttctcttggggttcattcttgggttccaacatgcattggctatgttggctggggtggtgactccaccaataatcattgccagtgctgcgaacctcgatgcttcgttacaagaatacttggtgtcagcctcgcttattgcgtcgggaattttgtctgctattcaaatcacccgtttccacatctttgggactccatactatcttggtacggggcttttgtccgttgtaggaacttctttcgctaccatttccattgtggtcaatgctttgcccatgatgtattccaatggggagtgtccagtagctgaagacggcacgcagttgccatgtccaaatggctatggccatatattggctagtggtattgtctgtgccttgcttgaaatgttgctatctttcatgccagctaagatcttacaaaagatcttcccacctttggtcaccggacccgtagttcttttgattggtgcccatttggttgaatctgggttccaagattggctcggaggctccggctgtgtaggtgaggtatgtgctgtgggttctaaaaatatcacctggggctccggggaattcatagggttgggtttcttggtcttcgtttctatcattatagccgaaaaattcggttcacccatcatgaagtcctgtgctgttatttttggtttgttgattggatgtattgtagctgctgcctgcggatacttcagccatgaatccattgatgctgctccagctgctactttcatctgggtgcatactttcaagttaaaggtttatggaccaattatattaccgttcttggccgtgtatttgacacttatgatggaagccatcggtgatattacagctacttgtgacgtctcccgtttagaagttgaaggcgaacaatacgagtcgagaattcagggtggtatcttggccgatggattcaatggtatgttagctggcttaatgaccattaccccaatgtccactttcgctcaaaataacggtgtaatttccatcaccaaatgtgccaatagaagagttggatactggtgttgtttcttcatgattatcatgggtatcttctccaaatttgcggccgccattgtctctattccaaaagctgttttaggaggtatgacttcgttccttttctgctcggttgctgtttcaggtatcagaattatctgtagcacggaattcacaagaagagaccgtttcgtgttgaccgctgccttgttgcctggtcttggttctatcttagtgccaaactggttttctaacgtcttcacctactctggtagcaacaactccttgcaaggtttctacaacgccattattcttgttatggaaactgggtttgccgtcactggtttcttgggtgttatccttaacttgttgcttcctcaagtctccgacaacattgaagaaatcaacgaactcgttttggaaactgttggctctgctgaccaaagaggtatggagaagtttgctgaaaaggaaggtatcccactcgaagctatcacttccaaccctggtgtgccattagatgtcatcagatctcaacttcgagcccccggcaagtcgtcatctgacagcgacaccaaatga

SEQ ID NO: 2419 - protein, 590 aa, Pichia stipitis CBS 6054
MSKAETFKSYTKRVVRKWTTKEGFFGDYDYAYLFIPDIPFITKEPKTQPFFGLNSDMPLLLGFILGFQHALAMLAGVVTPPIIIASAANLDASLQEYLVSASLIASGILSAIQITRFHIFGTPYYLGTGLLSVVGTSFATISIVVNALPMMYSNGECPVAEDGTQLPCPNGYGHILASGIVCALLEMLLSFMPAKILQKIFPPLVTGPVVLLIGAHLVESGFQDWLGGSGCVGEVCAVGSKNITWGSGEFIGLGFLVFVSIIIAEKFGSPIMKSCAVIFGLLIGCIVAAACGYFSHESIDAAPAATFIWVHTFKLKVYGPIILPFLAVYLTLMMEAIGDITATCDVSRLEVEGEQYESRIQGGILADGFNGMLAGLMTITPMSTFAQNNGVISITKCANRRVGYWCCFFMIIMGIFSKFAAAIVSIPKAVLGGMTSFLFCSVAVSGIRIICSTEFTRRDRFVLTAALLPGLGSILVPNWFSNVFTYSGSNNSLQGFYNAIILVMETGFAVTGFLGVILNLLLPQVSDNIEEINELVLETVGSADQRGMEKFAEKEGIPLEAITSNPGVPLDVIRSQLRAPGKSSSDSDTK

SEQ ID NO: 2420 - DNA, 1749 bp, Aspergillus niger CBS 513.88
  CDS (1)..(1749)
atggacggtcctgaccagataggcccggactaccggcctaagcggacttggggtgacgtaggtcgccgctttgtcaaaaccttcaccacaagggagggtctcattggagactatgattatgcctatttgttcactccgaacatccccttcatcacaaagaaacgaagttctgcaccgttcttcgggctcgaagacaaggtacctattgtactagctctactgcttggactgcaacatgcattggcgatgctgggtggaattatttcacctcctatcctgatcggaggcacatctggtgccaacttcgggacagaagactaccaatacctcgtctcaacatctctcatcgcttccggtatcttgtccgccattcagatgttccgcttccacatctacggaacgaaatactacatcggtaccggcttgacttcagtcgtgggaatttccttcgccacaatcaccgtcgctactggtggcttcgaacaaatgtactctagtggatactgcccgaccgccgaggatggaaccaagctgccctgccccaagggctatggcgccctgctggggacttcgtgtttgtgtgcgctgctcgagattggtctttccttcatgagccctaaaatcctgagacgcgtcttcccccccctcgtcactggtcctactgttctcttgatcggagccagtctgatcgagtccgctttccaggactgggcaggtggttcgggaacctgctctgagaatcctggcaacggtgctttgtgccctagcgcggacgcaccgcatgctctgccttggggaagtgcggagtttatcggtctcggatttctggtgtatgtctcgatcattctctgtgagcggtttggagcgcctatcatgcgatcatgctcggtcgtggtgggattgttggtaggatgtattgtggcggctgcctgcggatactttgatcgatcgggaattgacgctgcgccggtggcctcctttatctgggtgaagactttcccgttgaccatctacccgcccatgatccttccactgctggcagtgtacattgtggtcatgatggaatcgatcggtgacattaccgccacgtgcgatgtatcccaggtcgaagttgaagggcccactttcgactcgcgcattcagggtggtgtgctgggcaacggtctcactagtgtactggccggcctcatgaccatgacgccgatgtcggtttttgcccagaacaacggtgtcatcgcgctgaccaagtgcgccaaccgcacggctggttactgctgctgcttcttcctcatcattatgggaatttttgccaagtttgccgctgcactggttgccattcccagtagtgttcttggtggtatgaccacgttccttttctcatcggtggctatctctggtgtccgcattatcaccaatgtgccattcacgcgtcgcaaccgattcatcctgaccgcttcgtttgcagtcggcatgggagccaccttggtatccgactggttcgactacgtctttacctacagcggtaacaaccgtggtttgacaggattgctcgacgcgattgatctcgtgatggagaacgggttcgccattaccgctctaatcgggttaatcctgaatctgatccttccggaggacccagaggaggaagcggctatcctggaggcacggggtgtttaccgacgaagcgaggaggtgatgacatcgagggagagcacgcagtacaccaagggcgagccctcgagtgtttaa

SEQ ID NO: 2421 - protein, 582 aa, Aspergillus niger CBS 513.88
MDGPDQIGPDYRPKRTWGDVGRRFVKTFTTREGLIGDYDYAYLFTPNIPFITKKRSSAPFFGLEDKVPIVLALLLGLQHALAMLGGIISPPILIGGTSGANFGTEDYQYLVSTSLIASGILSAIQMFRFHIYGTKYYIGTGLTSVVGISFATITVATGGFEQMYSSGYCPTAEDGTKLPCPKGYGALLGTSCLCALLEIGLSFMSPKILRRVFPPLVTGPTVLLIGASLIESAFQDWAGGSGTCSENPGNGALCPSADAPHALPWGSAEFIGLGFLVYVSIILCERFGAPIMRSCSVVVGLLVGCIVAAACGYFDRSGIDAAPVASFIWVKTFPLTIYPPMILPLLAVYIVVMMESIGDITATCDVSQVEVEGPTFDSRIQGGVLGNGLTSVLAGLMTMTPMSVFAQNNGVIALTKCANRTAGYCCCFFLIIMGIFAKFAAALVAIPSSVLGGMTTFLFSSVAISGVRIITNVPFTRRNRFILTASFAVGMGATLVSDWFDYVFTYSGNNRGLTGLLDAIDLVMENGFAITALIGLILNLILPEDPEEEAAILEARGVYRRSEEVMTSRESTQYTKGEPSSV

SEQ ID NO: 2422 - DNA, 1731 bp, Pichia guilliermondii ATCC 6260
  CDS (1)..(1731): transl_table=12
atgatcaacggtcagactgtcgccgccgcaggcaagcgtattgtgcgcaagtggaccaccaaagaagggttgtttggtgattatgactacaaatatttattcgttcctgacattcccttctccaaaaaagttcccaaaacccagccgtttttcgggttaaattcagacatgcctatagtattggggttcatcttggggttccagcactcgttatcgatgttggctggtgtggtaacacctcctcttatcattggtggaaccgcaaacttgtccgatgagatcaccgaatatttggtttccgtttccctcattgtttccgggcttttatcatgtattcaaatcacccggttccacatatacggcaccccgtactacataggcactggtttgctctcggtggtgggcacgtcgtttgccaccatcaccattgtcaccaaagctatcccacaaatgtacgccgacggcttctgcaaaactgtcgatggcgttccccagccgtgtcctgaggcttacggaagaatcttggcgtcagctatagtgtgctcgcttcttgaaatgttcctttcgttttgtccgccccgcatattgcaaaaggcatttccaccaattgtcaccggtccagtggtttttttgatcggtgcgcacttggtagaaaccggactcgaggactgggtcggtgggtctggatgcatgacagattccaacgggaacgtccctggcatgtgtggagacgcccatgtgttgccatggggttcagcccagtttgtggggttgggttttttggtttatgtcaccatcatcatcgcggaaagatggggctcgccaatcatgaaatcgtgtgcggttatcgtcggtttgcttgtcggttgtatcgtggctgccgcatgcggatacttttctcacgcctccattgacgctgcgccggccgccacgttcatgtgggtgcatactttcaagctcgaagtgtacggtccggtaattcttccgtttttggccgtctatattgttttgatgatggaggcgattggagatatcaccgctacttctgatgtctccaggttggaagtggagggagaattgtacgactcgcggatccagggcggaattttggccgatgggctcaacggtatgatttcggggttgatgacggtgactcccatgtcgacatttgcccagaataacggtgtgatttccatcaccaaatgtgccaacagaagggttggatactggtgtgcatttttcatgattgttatgggaattttttccaaatttgcagccgccattgtatccattcctaaagcggttcttggtggtatgacgacatttttgttcacatcggtgacggtttctggtatcaagatcatttccaccaccgagttcaccagaagagacaggttcttgttgacggcgtcgttattgcccggacttggtgctactttggtacccaattggttctcgtttgtgttcacgtacggtggagacaataaagcattaaagggatttttggatgctatagttttggttatggagaccggatttgccgtcaccggtttcttgggtatctttttgaacttacttttgcctcaagtggaggatgaagtggaggaaatcaacgaggtggttttggagacggtggggtccgccgaccaaagaggaatggaattgtacgcacaaaaagaaggcatgaagttggagtctatccggtcacgacagatgacgtcgtctcaataa

SEQ ID NO: 2423 - protein, 576 aa, Pichia guilliermondii ATCC 6260
MINGQTVAAAGKRIVRKWTTKEGLFGDYDYKYLFVPDIPFSKKVPKTQPFFGLNSDMPIVLGFILGFQHSLSMLAGVVTPPLIIGGTANLSDEITEYLVSVSLIVSGLLSCIQITRFHIYGTPYYIGTGLLSVVGTSFATITIVTKAIPQMYADGFCKTVDGVPQPCPEAYGRILASAIVCSLLEMFLSFCPPRILQKAFPPIVTGPVVFLIGAHLVETGLEDWVGGSGCMTDSNGNVPGMCGDAHVLPWGSAQFVGLGFLVYVTIIIAERWGSPIMKSCAVIVGLLVGCIVAAACGYFSHASIDAAPAATFMWVHTFKLEVYGPVILPFLAVYIVLMMEAIGDITATSDVSRLEVEGELYDSRIQGGILADGLNGMISGLMTVTPMSTFAQNNGVISITKCANRRVGYWCAFFMIVMGIFSKFAAAIVSIPKAVLGGMTTFLFTSVTVSGIKIISTTEFTRRDRFLLTASLLPGLGATLVPNWFSFVFTYGGDNKALKGFLDAIVLVMETGFAVTGFLGIFLNLLLPQVEDEVEEINEVVLETVGSADQRGMELYAQKEGMKLESIRSRQMTSSQ

SEQ ID NO: 2424 - DNA, 1755 bp, Lodderomyces elongisporus NRRL YB-4239
  CDS (1)..(1755)
atgtacaacttcaaggctaccatcacgcgaatggttcgcaaatggaccactaaggatggtctcgttggtgactacgactacaaatatctattcaccccagatatcccattcgtctccaaagaaccaaagacacagccattctttggtctcaattcagacatgcccattttattgggtgcgcttttagggttgcaacacgcattggccatgattggtggacttgtctccccgcccatattaattagttcagctgcaaacttgagcgcagaaactcaacaatatctagtgtcaacagtgttgattgtctcggccattttgtcatgtatccaaatcactagatttcacatcattggtacaccatactatttaggaactggtctcttgtcagtttgtggtccttcgtttgctacattggccgttaccaacaacgccttccccatgatgtacactgccggcgtttgccccgttgccgatgacggcactcacttaccatgccccgatggatatggtaagatcttggccagcgctatagtatgcggtttactcgaaatcttgctttcattcatgcctgcgaaaatcttgcaaaaagtgtttcccccattggtgaccggtcccgtggtcactttgattggtgtacacttgttggaaacaggctttgaagactgggttggtggttctggttgtgttggagacacatgtaccatgggtaaattctccaaaccatggggatcggcacagtttattggtttgggctttttggtttacgtttcaatcatcttggctgaaaagtttggtgcaccaatcatgaagagttgtgcagtcattgttggtttacttgttggatgtattgttgcagctgcttgtggctactttgactcttcaactatctctgctgcaaagactgcaagtttcatttgggtcgagacttttaaattggaagtttacggcccagcaatacttccattcttagccgtgtatgtggttttgatgatggaggctattggtgatatcactgcaacatcggatgtttcgagattggaagtcgagggtgaagtttacgactcacgtatccaaggtggtatccttgcagacggtctcaatggaatcttggcaggcttgatgactgtgacgccaatgtctgtttttgctcaaaataatggtgttattgccattaccaagtgtgccaaccgtgttgccgggtactggtgtgccttttttcttttgatcatgggaatctttgctaaattcgctgctgctattgtctcgatccctaagccagtgcttggtggaatgacaagtttccttttcacttcggtgatgatctcaggtatcaagattatctcatctactgagttcaccagacgtgaccgttttgtgctcactgctgccgtcttgcctggtttgggtgcaaccttggttccaacatggtttgacaatgtattcacttattcaggtgacaaccacgctctcacagggttctttaacgccattgtacttgttatggagtcgggttttgcagtcaccggtattattggtgttatcttgaaccttgtgttgccacaagtatacgatgatgtggaggaagttaatgaattggtgttggaaacggttggatcagctgacgaacacgcaagagaggaatatgctagaaaagaaggaatcactttggaacagctaaagagtaacatatcgcaccaaaagggttccggcacgactatcatccactcagctgatgggatgcctgatctagcttaa

SEQ ID NO: 2425 - protein, 584 aa, Lodderomyces elongisporus NRRL YB-4239
MYNFKATITRMVRKWTTKDGLVGDYDYKYLFTPDIPFVSKEPKTQPFFGLNSDMPILLGALLGLQHALAMIGGLVSPPILISSAANLSAETQQYLVSTVLIVSAILSCIQITRFHIIGTPYYLGTGLLSVCGPSFATLAVTNNAFPMMYTAGVCPVADDGTHLPCPDGYGKILASAIVCGLLEILLSFMPAKILQKVFPPLVTGPVVTLIGVHLLETGFEDWVGGSGCVGDTCTMGKFSKPWGSAQFIGLGFLVYVSIILAEKFGAPIMKSCAVIVGLLVGCIVAAACGYFDSSTISAAKTASFIWVETFKLEVYGPAILPFLAVYVVLMMEAIGDITATSDVSRLEVEGEVYDSRIQGGILADGLNGILAGLMTVTPMSVFAQNNGVIAITKCANRVAGYWCAFFLLIMGIFAKFAAAIVSIPKPVLGGMTSFLFTSVMISGIKIISSTEFTRRDRFVLTAAVLPGLGATLVPTWFDNVFTYSGDNHALTGFFNAIVLVMESGFAVTGIIGVILNLVLPQVYDDVEEVNELVLETVGSADEHAREEYARKEGITLEQLKSNISHQKGSGTTIIHSADGMPDLA

SEQ ID NO: 2426 - DNA, 1827 bp, Sclerotinia sclerotiorum 1980
  CDS (1)..(1827)
atgtcggttacaatcgacagtggaccacatgatgggccagaccgcattgtccccgaaagttctcctaaccgttcatttggagagcgtatacactccaccgtaagggctttcactacaaaagatggatgggtcgggaactatgattatgcatttctcttcaaacccaatcttcccttcatgaagaaatcgacaagacgagcaccattctttggccttcaagatcgcatgccagttctgctaggtctcctccttggatttcaacatgctctcgctatgttagcgggtgttattacacctcctattctcatagccggatcggcatccttcgacacggaaacaactcaatatcttgtctctacctctctcatcgtatcgggtatattatccgccatccagatcactcggtttaaggttattaaaaccccttattatattggcacgggcttaatttcagttgttggtacttcgtttgccatcataccggttgcttcgaaaggctttgcacaaatgtacgcaaatggtatgtgcaaaacggcagatgatggaactccattgccttgtccggaaggttatggtgcgctccttggaacggcttcgttatgcgcacttctcgaaataggactctcgttcatgacaccgaaacttcttaagaaacttttccctccgattgttacgggcccaactgtcatgctcattggtgtatcgcttattgaaacgggattgcaaggttgggcaggtggtagtggaacttgtatgtcaagaccaactacaggagattatatgctatgtccctccaatgctgccccacacgctcttccatggggatctgcagaattcatcggtcttggtttctcggtttttattactatcatcctttgcgaacgattcggttctcctattatgaagtcactcgccgttgtcctcggtctcttggtaggttgcattatcgctgcagcatgtggatatttcgacagtagtggaattactgcagccccagtcgcatcattcatctgggttaaaactttccctctgagcgtatacgggcctttcatattacctcttctagccatctatctcattttaatgatggaagccattggcgacattaccgctacatgcgacgtttctcgacttcaagtcgacggaaaactcttcgactctcgtatccaaggcggtgttctagctgatgggcttaacggaatgttagcaggtctctgcacaatcacacccatgtcaacttttgctcaaaacaacggtgtaatcgctctcacacgttgtgccaaccgcaaagccggcttcgcagcatgttttttccttatcatcatgggtgtcttcgctaaattcgcagcggccattacatcaatccccgacgcagtcctaggcggcatgacaaccttcctcttcgccagcgtagctgtatccggtctccgcattatttccaccgtcccatttacccgtcgcacgagattcatcctcacgacatctctagcgctaggatatggagccacgctcgtcccaacgtggttttcatacgtctttacgtattctggggataataaggctaaagcgggatttttcgatgctattgttttggttcttgaaacaggatttgcggtcgcggcgtttgtggctgtggttttgaatttggggttgccggaggagagtgaggatgaggagattgagagtttggcgggggatttgggggaaagggagagggaggagagggagttggagatggaattggagatggaggttagaggggagagaggggtggaaggggggagttttgaaatggggaaggcagaggtggggagggaggggaagtga

SEQ ID NO: 2427 - protein, 608 aa, Sclerotinia sclerotiorum 1980
MSVTIDSGPHDGPDRIVPESSPNRSFGERIHSTVRAFTTKDGWVGNYDYAFLFKPNLPFMKKSTRRAPFFGLQDRMPVLLGLLLGFQHALAMLAGVITPPILIAGSASFDTETTQYLVSTSLIVSGILSAIQITRFKVIKTPYYIGTGLISVVGTSFAIIPVASKGFAQMYANGMCKTADDGTPLPCPEGYGALLGTASLCALLEIGLSFMTPKLLKKLFPPIVTGPTVMLIGVSLIETGLQGWAGGSGTCMSRPTTGDYMLCPSNAAPHALPWGSAEFIGLGFSVFITIILCERFGSPIMKSLAVVLGLLVGCIIAAACGYFDSSGITAAPVASFIWVKTFPLSVYGPFILPLLAIYLILMMEAIGDITATCDVSRLQVDGKLFDSRIQGGVLADGLNGMLAGLCTITPMSTFAQNNGVIALTRCANRKAGFAACFFLIIMGVFAKFAAAITSIPDAVLGGMTTFLFASVAVSGLRIISTVPFTRRTRFILTTSLALGYGATLVPTWFSYVFTYSGDNKAKAGFFDAIVLVLETGFAVAAFVAVVLNLGLPEESEDEEIESLAGDLGEREREERELEMELEMEVRGERGVEGGSFEMGKAEVGREGK

SEQ ID NO: 2428 - DNA, 1875 bp, Chlamydomonas reinhardtii
  CDS (1)..(1875)
atgagtgcggtcgaggttcaccataccgagaaacgctcctttaaggagcttatggtcggaacctacgacctgaaatatctctgcctgcctgcttttccatactttcggaaggggaaaggcgtacccccgccgcgcttcttcggcaaggatgattttctgggactgttcgtggccctggtcatgggcctgcagcacgcgctggccatggtgggaggcctcatcacgccgccgctgctagtgtcaaccctggccttcggcaaccggcctgggaccacaactccctatgcccagggcgatccagctgaaattcagcgctacctggtccaggcggcactcatcgtgtgcggtatcatgacctttttccaagtcctgggcgtgcgcatttacaaaaccaagtttcagtacggagcgggtgtgctctcttgtatgggcatctcctttacaaccgtgcccattgcgacctccgtcattggacagctcatgaaggagcagggacgaacttttgaggaggcgtacggcaactttctcggcaccatcgccatgtgcggggtaatccccgtaatcctttcattctttcccattcgtgtcatcaaaaagatcttcccgccccttgtgtgcggcattgtcattatgatgattggcgtgcatctgatcggttctgggtttaagaactggggcggcggcgccttctgtgccgataactggcagcacccgcccgcaaccagagcgtgcttcctgcccgccaagtaccccaacggcaccagttacttgcagctgaaccaatgctgggtgggccccggcgtcatgtgcggcgacaagaccaagaccgaggtattccttcctttcggctctcaggagtacctcggcctgggctttttggtcttcatcaccatcatcttcttggagatcttcggcagccccttcatgcgcaacgcctctgtcattctggcgctgctgttcggctacctcatcgccgctgtcaccacctaccagggcaagaagtacgtgatcaccaccaagattgaccaggcgcccggcatcaccttcctgtggaccaccaccttcccgctaggtttctatccgcccgccattatcccgctgatgattgtgtttatcatcacatccattgagaccgtgggcgacacttcagcaactatggaggcatcacgtatggctgttgacaccgaggacggcacgcggcgcattaagggcgcgctcctgaacgacggcatcagcggcatcttctccgccctggccacctcgctgcccctgaccacgttcgctcagaacaacggcgtcatagctttgaccaacgtggccgctcgtcaggccggctttgctgctgcgttctggctgttcctgctgggcattctaggcaaggtgggcgcctggatcaccaccatcccggagtgtgtgctgggcggcatgaccactttcctgttcgccaacgtcattgcctcgggcattaagattatcatcaacggcgatcccctcacgcgccgctcgcgcttcatcctggcgtgctcattggcgctggcgtttggcgtggagctggtcccgcagtgggccacgctcaacctgtggcccgtcacgcccggcatgtcgcccggcctgcgcggcctgcgtgacgccatcatcctggtcatctccacctccttcaccctgggcgccgtggtggcgctcatcctcaacctcatcataccgctggacaagaccgatcctacagtcacaagatgctctccaggtgctagctcggtcagcactgagaatgacgggaaggatgcttcgttccactcagacgcggcacaggccagcagtgctccaccgccggtggtgaccatcacgcagagacacagcagcaatggcttcgcgtag

SEQ ID NO: 2429 - protein, 624 aa, Chlamydomonas reinhardtii
MSAVEVHHTEKRSFKELMVGTYDLKYLCLPAFPYFRKGKGVPPPRFFGKDDFLGLFVALVMGLQHALAMVGGLITPPLLVSTLAFGNRPGTTTPYAQGDPAEIQRYLVQAALIVCGIMTFFQVLGVRIYKTKFQYGAGVLSCMGISFTTVPIATSVIGQLMKEQGRTFEEAYGNFLGTIAMCGVIPVILSFFPIRVIKKIFPPLVCGIVIMMIGVHLIGSGFKNWGGGAFCADNWQHPPATRACFLPAKYPNGTSYLQLNQCWVGPGVMCGDKTKTEVFLPFGSQEYLGLGFLVFITIIFLEIFGSPFMRNASVILALLFGYLIAAVTTYQGKKYVITTKIDQAPGITFLWTTTFPLGFYPPAIIPLMIVFIITSIETVGDTSATMEASRMAVDTEDGTRRIKGALLNDGISGIFSALATSLPLTTFAQNNGVIALTNVAARQAGFAAAFWLFLLGILGKVGAWITTIPECVLGGMTTFLFANVIASGIKIIINGDPLTRRSRFILACSLALAFGVELVPQWATLNLWPVTPGMSPGLRGLRDAIILVISTSFTLGAVVALILNLIIPLDKTDPTVTRCSPGASSVSTENDGKDASFHSDAAQASSAPPPVVTITQRHSSNGFA

SEQ ID NO: 2430 - DNA, 1980 bp, Chlamydomonas reinhardtii
  CDS (1)..(1980)
atggtggcggacaacgatcacgtcgagccggctgagtgctcgacagcagcaggttggaagtcccgaatggctgcacccttccacaccgaccggtccgtgaaggagttcttggtcgggacctatgacatgaagtacctgtgcatgccgtcgttcccatatttcaagaagtcctcaggcgttgcaccaccgaggtttttcggcaaggacgatttcctaggcctcattgtggccctggtcatgggcctgcagcacgcgctggccatggtgggaggcctcatcacgccgccgctgctcatctccaaccttggctttggcacacgccccggcaccagcccacccgtgccctactcgtccggcaaccctgccgagacccagcgctacctcgtccaggcgtcgctcattgtcacgggcatcatgacctttttccaagtgcttggcgtgcgcatctggaaaaccgacttccagttcggggccggcatcctgtcctgcatgggcgtgtccttcaccaccgtgcccatcgccacctccgtcattggacagctcatgaaggagaagggccacacctttgaggaggcgtacggcatgttcctcggcaccatcgttatgtgcgctatcatccccgtcatcctgtccttcttccccatccgcatcatcaagaaaatcttcccgcccatcgtgtgcggcatcaccatcatgatgattggcgtgcacctgatcggcgctggcttcaagaactggggcggtggcgctttctgcgccgacaactggcagcacccgcccgcccccacgacctgcttcctgcccgccaagtaccccaacggcaccagttacttgcagcaatcgactgtgtgctgggtgggacccggcatcaagtgcggcgacgccaccaagaccgaggtgttcctccccttcggctctcaggagtacctcggcctgggcttcctggtgttcgtcaccatcatcttcttggagatcttcggcagccccttcatgcgcaacgcctctgtcattctggcgctgctgttcggctacctcatcgccgctgtcaccacctaccagggcaagaagtacgtgatcaccaccaaaattgaccaggcgcccggcatcaccttcctgtggaccaccaccttcccgctaggtttctattcacctgccattattccgctcatgattgtgttcattatcacttccattgagaccgtgggcgacactgccgcaacgatggaagcctctcgcatgcttgtcaacaccgaggacggcacgcggcgcattaagggcgcgctcctgaacgacggcatcagcggcatcttctccgccctggccacctcgctgcccctgaccacgttcgctcagaacaacggcgtcatttctctgaccaatgtggccgctcgtcaggccggctttgctgctgcgttctggctgttcctgctgggtgtcctgggcaaggtgggcgcctggatcaccaccatcccggagtgtgtgctgggcggcatgaccactttcctgttcgccaacgtcattgcctcgggcattaagattatcatcaacggtgatcccctcacgcgccgctcgcgcttcatcctggcgtgctcattggcgctggcgtttggcgtggagctggtcccgcagtgggccacgctcaacctgtggcccgtcacgcccggcatgtcgcccggcctgcgcggcctgcgtgacgccatcatcctggtcatctccacctccttcaccctgggcgcggtggtggcgctcatcctcaacctcatcatcccaaaggacacgtccaccgccacatgcaccaacaacagcctgcatgtccccgagctggagggcaaaatgatggctgctgacaagagcggcaaggactcatcaacctcctccaaagatgagctgtcgtcaaacgaggatgcagggcacggcatggtgcctccacgtcaggaaacagtggcgatggttgcagccgacgcaagctgcaaggtatga

SEQ ID NO: 2431 - protein, 659 aa, Chlamydomonas reinhardtii
MVADNDHVEPAECSTAAGWKSRMAAPFHTDRSVKEFLVGTYDMKYLCMPSFPYFKKSSGVAPPRFFGKDDFLGLIVALVMGLQHALAMVGGLITPPLLISNLGFGTRPGTSPPVPYSSGNPAETQRYLVQASLIVTGIMTFFQVLGVRIWKTDFQFGAGILSCMGVSFTTVPIATSVIGQLMKEKGHTFEEAYGMFLGTIVMCAIIPVILSFFPIRIIKKIFPPIVCGITIMMIGVHLIGAGFKNWGGGAFCADNWQHPPAPTTCFLPAKYPNGTSYLQQSTVCWVGPGIKCGDATKTEVFLPFGSQEYLGLGFLVFVTIIFLEIFGSPFMRNASVILALLFGYLIAAVTTYQGKKYVITTKIDQAPGITFLWTTTFPLGFYSPAIIPLMIVFIITSIETVGDTAATMEASRMLVNTEDGTRRIKGALLNDGISGIFSALATSLPLTTFAQNNGVISLTNVAARQAGFAAAFWLFLLGVLGKVGAWITTIPECVLGGMTTFLFANVIASGIKIIINGDPLTRRSRFILACSLALAFGVELVPQWATLNLWPVTPGMSPGLRGLRDAIILVISTSFTLGAVVALILNLIIPKDTSTATCTNNSLHVPELEGKMMAADKSGKDSSTSSKDELSSNEDAGHGMVPPRQETVAMVAADASCKV

SEQ ID NO: 2432 - DNA, 2034 bp, Chlamydomonas reinhardtii
  CDS (1)..(2034)
atgacggtaaccatggacgacgtgcgaggcaaggtggatgaaatgaccggcaagcgcagcatgaaggagctgctgattggcacctacgacatgaaatacctatgcaagcccgtgtttccctacttccgcaagtccaagggtgttcccccgcccatgttcttcggcaaagacgacttcctgggccttttcgtggccctggtcatgggcctgcagcatgcgctggccatggtgggaggcctcatcacgccgccgctgctcatctccaacctgggcttcggcacccgacctggcaccaacccgccagtgccctactcgtccggcaaccccgccgaggtccagcgctacttggtccaggcgtcgctcatcgtgtgcggcatcatgaccttcttccaagtgcttggcgtgcgcatctggaaaaccaacttccagttcggggccggcatcctgtcctgcatgggcgtgtccttcaccaccgtgcccatcgccacctccgtcattggccagcttatgaaggagaagggccacacgtttgaggaggcgtacggcatgttcctcggcaccatcgccatgtgcgctgtcatccccgcgctcctgtcctttttccccatccgcatcatcaagaagatcttcccgcccatcgtgtgcggcatcaccatcatgatgattggtgtgcacctgatcggcgctggctttaagaactggggtggtggcgctttctgcgccgacaactggcagcacccgcccgcgaccaagccttgcttcctgcccgccaactaccccaacggcaccagctacatgcaggccaaccagtgctgggtgggccccggcatcaagtgcggcgacgccaccaagaccgaggtgttcctccccttcggctctcaggagtacctcggcctgggcttcctggtgttcgtcacgatcatcgttttggagatcttcggcagccccttcatgcgcaacgcgtcagtcattctggcgctgctgtttggctacttcatcgccgccgtgaccaactaccagggcaagaagtacgtgatcaccaccaagatcgaccaggcgcccggcatcaccttcctgtggaccaccaccttcccgctaggcttctatcccccggccatcatcccgctcatgattgtgttcatcatcacgtccattgagaccgtgggcgacacggccgccacgctggaggcctcccgcatgcaagtcaacaccgaggacggcacgcggcgcattaagggcgcgctgctgaacgacggcatcagcggcatcttctccgccttggccacctcgctgcccctgaccacgttcgcccagaacaacggcgtcatctcgctgaccaacgtggctgcccgccaggccggcttcgccgcggcgttctggctgttgctgctaggcatcctgggcaaggtgggcgcctggatcaccaccatcccggagtgcgtgctgggcggcatgaccactttcctgttcgccaacgtcattgcgtcgggcattaaaatcatcatcaatggagaccccctcacacgccgctcgcgcttcatcctggcgtgctcgctggcgctggcgtttggcgtggagctggtcccgcagtgggccacgctcaacctgtggcccgtcacgcccggcatgtcgcccggcctgcgcggcctgcgtgacgccatcatcctggtcatctccacctccttcaccctgggcgcggtggtggcgctcatcctcaacctcatcatccccgctgacgccagcaccaaccccagcaccaccaaggcgctgccgctgctggatgctgactcctcccacgacgcctcgggctgcgaggcgtgcgagccgctgccgcccgtcaagaccatcgccggcgggttggaacccgctcccacggtggaggtgacacgggacaacgccgtggacgccaacaccgaccggcgcccccgacagcaccaggctccgatacgcctccagcagctcgcccacgtcccccagccggagctcctcaggccgcaggctggcccgaccaggcggaggcggtgcgctgcttga

SEQ ID NO: 2433 - protein, 677 aa, Chlamydomonas reinhardtii
MTVTMDDVRGKVDEMTGKRSMKELLIGTYDMKYLCKPVFPYFRKSKGVPPPMFFGKDDFLGLFVALVMGLQHALAMVGGLITPPLLISNLGFGTRPGTNPPVPYSSGNPAEVQRYLVQASLIVCGIMTFFQVLGVRIWKTNFQFGAGILSCMGVSFTTVPIATSVIGQLMKEKGHTFEEAYGMFLGTIAMCAVIPALLSFFPIRIIKKIFPPIVCGITIMMIGVHLIGAGFKNWGGGAFCADNWQHPPATKPCFLPANYPNGTSYMQANQCWVGPGIKCGDATKTEVFLPFGSQEYLGLGFLVFVTIIVLEIFGSPFMRNASVILALLFGYFIAAVTNYQGKKYVITTKIDQAPGITFLWTTTFPLGFYPPAIIPLMIVFIITSIETVGDTAATLEASRMQVNTEDGTRRIKGALLNDGISGIFSALATSLPLTTFAQNNGVISLTNVAARQAGFAAAFWLLLLGILGKVGAWITTIPECVLGGMTTFLFANVIASGIKIIINGDPLTRRSRFILACSLALAFGVELVPQWATLNLWPVTPGMSPGLRGLRDAIILVISTSFTLGAVVALILNLIIPADASTNPSTTKALPLLDADSSHDASGCEACEPLPPVKTIAGGLEPAPTVEVTRDNAVDANTDRRPRQHQAPIRLQQLAHVPQPELLRPQAGPTRRRRCAA

SEQ ID NO: 2434 - DNA, 1926 bp, Chlamydomonas reinhardtii
  CDS (1)..(1926)
atgacggtaaccatggacgacgtgcgaggcaaggtggatgaaatgaccggcaagcgcagcatgaaggagctgctgattggcacctacgacatgaaatacctatgcaagcccgtgtttccctacttccgcaagtccaagggtgttcccccgcccatgttcttcggcaaagacgacttcctgggccttttcgtggccctggtcatgggcctgcagcatgcgctggccatggtgggaggcctcatcacgccgccgctgctcatctccaacctgggcttcggcacccgacctggcaccaacccgccagtgccctactcgtccggcaaccccgccgaggtccagcgctacttggtccaggcgtcgctcatcgtgtgcggcatcatgaccttcttccaagtgcttggcgtgcgcatctggaaaaccaacttccagttcggggccggcatcctgtcctgcatgggcgtgtccttcaccaccgtgcccatcgccacctccgtcattggccagcttatgaaggagaagggccacacgtttgaggaggcgtacggcatgttcctcggcaccatcgccatgtgcgctgtcatccccgcgctcctgtcctttttccccatccgcatcatcaagaagatcttcccgcccatcgtgtgcggcatcaccatcatgatgattggtgtgcacctgatcggcgctggctttaagaactggggtggtggcgctttctgcgccgacaactggcagcacccgcccgcgaccaagccttgcttcctgcccgccaactaccccaacggcaccagctacatgcaggccaaccagtgctgggtgggccccggcatcaagtgcggcgacgccaccaagaccgaggtgttcctccccttcggctctcaggagtacctcggcctgggcttcctggtgttcgtcacgatcatcgttttggagatcttcggcagccccttcatgcgcaacgcgtcagtcattctggcgctgctgtttggctacttcatcgccgccgtgaccaactaccagggcaagaagtacgtgatcaccaccaagatcgaccaggcgcccggcatcaccttcctgtggaccaccaccttcccgctaggcttctatcccccggccatcatcccgctgatgattgtgttcatcatcacgtccattgagaccgtgggcgacacggccgccacgctggaggcctcccgcatgcaagtcaacaccgaggacggcacgcggcgcattaagggcgcgctgctgaacgacggcatcagcggcatcttctccgccttggccacctcgctgcccctgaccacgttcgcccagaacaacggcgtcatctcgctgaccaacgtggctgcccgccaggccggcttcgccgcggcgttctggctgttgctgctaggcatcctgggcaaggtgggcgcctggatcaccaccatcccggagtgcgtgctgggcggcatgaccactttcctgttcgccaacgtcattgcctcgggcattaagatcatcatcaacggcgaccccctcacacgccgctcgcgcttcatcctagcgtgctcgctggcgctggcgtttggcgtggagctggtcccgcagtgggccacgctcaacctgtggcccgtcacgcccggcatgtcgcccggcctgcgcggcctgcgtgacgccatcatcctggtcatctccacctccttcaccctgggcgccgttgtggcgctcatcctcaacctcatcatccccgctgacgccagcaccaaccccagcaccaccaaggcgctgccgctgctggatgctgactcctcccacgacgcctcgggctgcgaggcgtgcgagccgctgccgcccgtcaagaccatcgccggcgggttggaacccgctcccacggtggaggtgacacgggacaacgccgtggacgccaacaccgaccgggtatga

SEQ ID NO: 2435 - protein, 641 aa, Chlamydomonas reinhardtii
MTVTMDDVRGKVDEMTGKRSMKELLIGTYDMKYLCKPVFPYFRKSKGVPPPMFFGKDDFLGLFVALVMGLQHALAMVGGLITPPLLISNLGFGTRPGTNPPVPYSSGNPAEVQRYLVQASLIVCGIMTFFQVLGVRIWKTNFQFGAGILSCMGVSFTTVPIATSVIGQLMKEKGHTFEEAYGMFLGTIAMCAVIPALLSFFPIRIIKKIFPPIVCGITIMMIGVHLIGAGFKNWGGGAFCADNWQHPPATKPCFLPANYPNGTSYMQANQCWVGPGIKCGDATKTEVFLPFGSQEYLGLGFLVFVTIIVLEIFGSPFMRNASVILALLFGYFIAAVTNYQGKKYVITTKIDQAPGITFLWTTTFPLGFYPPAIIPLMIVFIITSIETVGDTAATLEASRMQVNTEDGTRRIKGALLNDGISGIFSALATSLPLTTFAQNNGVISLTNVAARQAGFAAAFWLLLLGILGKVGAWITTIPECVLGGMTTFLFANVIASGIKIIINGDPLTRRSRFILACSLALAFGVELVPQWATLNLWPVTPGMSPGLRGLRDAIILVISTSFTLGAVVALILNLIIPADASTNPSTTKALPLLDADSSHDASGCEACEPLPPVKTIAGGLEPAPTVEVTRDNAVDANTDRV

SEQ ID NO: 2436 - DNA, 1761 bp, Aspergillus oryzae RIB40
  CDS (1)..(1761)
atggatggaccagatcagattggtcctgaccttcgtcccaagcgaacttgggccgataaagcccgtcggattgtcaaaaccttcaccacgagggatggcttaataggagactacgattatgcataccttttcacacccaacatcccttttatgcagcaaacgaggcgaacggcaccgtttttcggactggatgatcgagtaccggtcgtgctggctcttattttgggcttacaacattccctagcaatgttggctggagttatctcgcccccaattctcctgggtggttcttccggagccaaccttggagaggatgactaccaatacctcgtgtcgacctccctgatcgtatccgggttactgtccgcccttcagatgctccgctttcgtatctataaaacgccttactcgatcggcacgggtctgatctcagttgtgggtacctcgttctcgattattactgtagcgtcgggaactttcactcagatgtattcgtccggatactgtcccgttgatgcccagggcaaccgtctaccttgtccggcgggctatggagctctcctcggtacctcctgtctatgctctttactccagatcggcctttcattcataagcagcaaggttttgaaacgcgtcttcccacccctggttactggaccaactgtcctcctgatcggagcatccctccttgagaccggtatgaaagattgggcaggaggctcaggcagctgtggcagcgacccctccgcccgtgccctatgccccagcgcagatgcaccgcacgctcttccttggggtagtgcggagtttatcggtctcggattcctggtcttcgtgaccattattctgtgcgaaagatttggctcccctatcatgaaatcttgcgccgtcgtcgttggtctgctagttggatgcattgtggcgggagcatgtggctacttcgaccgctcaaccattgatgcagccccagtagtttccttcatctgggtccggacattccctctaacgatatacgcaccgctcatcctccccttactagccgtctacatcgtgatcatgatggaatcaatcggcgacatcacagccacatgcgacgtttcccaagtagaagtgcaggggcccgacttcgattcgcgcattagaggcggtgtcctcggcaacggtctcacctgtctcctcgccggcctatgtaccatcacgcccatgtccgtgttcgcccaaaacaacggtgtcatcgctctgaccaaatgcgcaaaccgcaaggccggatactgctgctgcttcttcctcgtgatcatgggcatcttcgccaagttcgctgccgcgcttgtcgcaatccctagctctgtcctcggcggtatgaccacattcctcttctcgtccgtcgctgtctccggtatccgtattatttcctccatcccgttcacgcgtcgcaaccgtttcatcctcacggcttctttcgccattggtatggctgccacgttggtgccggactggttcgactatttctttacttacagcggtgataaccacgccctgcaggggctactggatgctgtgacgctcgttatgaccaacggtttcgcagttaccgcagtgttggggctgatcctcaaccttcttatcccggaagacccagaggaagaggcggccatcgtggatgccaggggtagtgaggtccggagtgagagtgaagagacgaagggcacttcggagtcctcgcacttcaagactgccgaggctggtccggctattgtataa

SEQ ID NO: 2437 - protein, 586 aa, Aspergillus oryzae RIB40
MDGPDQIGPDLRPKRTWADKARRIVKTFTTRDGLIGDYDYAYLFTPNIPFMQQTRRTAPFFGLDDRVPVVLALILGLQHSLAMLAGVISPPILLGGSSGANLGEDDYQYLVSTSLIVSGLLSALQMLRFRIYKTPYSIGTGLISVVGTSFSIITVASGTFTQMYSSGYCPVDAQGNRLPCPAGYGALLGTSCLCSLLQIGLSFISSKVLKRVFPPLVTGPTVLLIGASLLETGMKDWAGGSGSCGSDPSARALCPSADAPHALPWGSAEFIGLGFLVFVTIILCERFGSPIMKSCAVVVGLLVGCIVAGACGYFDRSTIDAAPVVSFIWVRTFPLTIYAPLILPLLAVYIVIMMESIGDITATCDVSQVEVQGPDFDSRIRGGVLGNGLTCLLAGLCTITPMSVFAQNNGVIALTKCANRKAGYCCCFFLVIMGIFAKFAAALVAIPSSVLGGMTTFLFSSVAVSGIRIISSIPFTRRNRFILTASFAIGMAATLVPDWFDYFFTYSGDNHALQGLLDAVTLVMTNGFAVTAVLGLILNLLIPEDPEEEAAIVDARGSEVRSESEETKGTSESSHFKTAEAGPAIV

SEQ ID NO: 2438 - DNA, 1539 bp, Culex quinquefasciatus
  CDS (1)..(1539)
atgaaaaacaccgctacgaccgcgcccgcagcacaacggccggaagatgaaaaactcagcgtcggcgccaaccttgcgtacggcatgcagcacgtcctgaccatgtacggcggcatcgttgccgtaccgctgatcctcggtcaggccgccggcctctcccccgccgagatcggcctgctgatcgccgcctcgctcttcgccggtggcctcgccaccctcctccagacccttggtgttcccttcttcggcagccagatgcccctggtccagggcgtgtcctttgccggcgtggcgaccatgatcgccatcctccagagcggcgaaggcggcggcatccagtcggtgctcggcgcggtgatggcggcctcgctcatcggcctgctgatcaccccggtgttttcccgcatcaccaagttcttcccgccgctggtcaccggcgtggtcatcaccaccatcggcctgacgctgatgccggtggccgcgcgctgggccatgggtggcaacagccagtcgccggagttcggcagcatggccaacatcggcctcgccgggctcaccctcgcggtggtcctgctattgagcaaggtgggcagcgccaccatctcgcgcctgtcgatcctgctggccatggtgatcggcaccctggtggccatgtccctgggcatggcggacttctccaaggtgtccgaaggcccgctggtagccttcccctcgatcttccacttcggcatgccgaccttccatgtggccgccatcatctccatgtgcatcgtcatcatggtgaccctggtggaaacctccgccgacatcctcgccgtgggcgagatcatcggcaccaaggtggactcccgccgcctgggtgacggcctgcgtgccgacatgctgtccagcatcctggcgccggtgttcggctccttcacccagagcgccttcgcccagaacgtcggcctggtggccgtcaccggggtgaagagccgctacgtggtggccaccggcggcctgatcctggtgaccctcggcctgctgccggtgatgggtcgcatcatcgcggcggtgcccacctccgtgctgggcggcgccggcatcgtgctgttcggcaccgtggccgccagcggcatccgcaccctggccaaggtggaataccgcaacaacatgaacctgatcatcgtcgccacctccatcggcttcggcatgatccccatcgccgcgccgaccttctaccaccagttccccggctggttcgaaaccatcttccactccggcatcagctccgccgcgatcatggccatcgtgctcaacctggtgttcaaccacttcaccgccggcacgcccgaccagccttcggtgatcgccgccggccgcgagcgccagctgcgctacaccgacatcgcctgcctgaacgagggtgactacttccagaacggcaagctgtacgacgccgccggcaatgaagtgcccctgtgcgaggacgacgaccaccaccccgcaccacgcagtgccgggcgcagcagcaaggcggcggaacccagtagtgcgtga

SEQ ID NO: 2439 - protein, 512 aa, Culex quinquefasciatus
MKNTATTAPAAQRPEDEKLSVGANLAYGMQHVLTMYGGIVAVPLILGQAAGLSPAEIGLLIAASLFAGGLATLLQTLGVPFFGSQMPLVQGVSFAGVATMIAILQSGEGGGIQSVLGAVMAASLIGLLITPVFSRITKFFPPLVTGVVITTIGLTLMPVAARWAMGGNSQSPEFGSMANIGLAGLTLAVVLLLSKVGSATISRLSILLAMVIGTLVAMSLGMADFSKVSEGPLVAFPSIFHFGMPTFHVAAIISMCIVIMVTLVETSADILAVGEIIGTKVDSRRLGDGLRADMLSSILAPVFGSFTQSAFAQNVGLVAVTGVKSRYVVATGGLILVTLGLLPVMGRIIAAVPTSVLGGAGIVLFGTVAASGIRTLAKVEYRNNMNLIIVATSIGFGMIPIAAPTFYHQFPGWFETIFHSGISSAAIMAIVLNLVFNHFTAGTPDQPSVIAAGRERQLRYTDIACLNEGDYFQNGKLYDAAGNEVPLCEDDDHHPAPRSAGRSSKAAEPSSA

SEQ ID NO: 2440 - DNA, 1755 bp, Unknown
  Unidentified
  CDS (1)..(1755)
atgtcagacgtcgttggccagcagccgggacccaccgtgctaccggtggtgcactcgtcttctaagctagaatatgtgaaggaccgtgtttccagtatcaagcacaagctgtcaacgaaagacgggtggattggggattatgattatgcatggctatgcacacctactcttcctttccttaggaacaagacgagcccacctccgttctatgccctcgatgacgatcttcctcttatacttgccatctctagcggattgcagcatgccctcgccatgcttgcgggtttaatcacacctcctatcattttcgcttctgctctcaatctggatgtcgccacttcggcttacatgatttcagcttctctcattggttgtggcatcctgagccttgtgcaaatgtcccgcattcgcctgtttaaaggatactatcttgggacagggcttatcacggttgttggaacgagttttgctaccttaagcacagcaagcgcgatcttcaatgcaatgtacaaggatgggacatgcccttcaaccacagcagctgatgggtccattgttcaaggggcgtgtcctgatgcttatggcaaagtgctgggaacttctttgatttgttccttcctcgaaattgggatgtccttctgctctccaaggctgcttaaacgtctttttcctccccttgtaactggatctgtcattctattgatcggagcatccctcatcggctcatctggtgttccaaattggggtgggggttcaaatgactgtcaaaatcgtccaacgtctggaattttcgaactatgcccaaccatattcgctcccagaccactaccatggggatcgcctgaattcatagggctcggcttcctgtcgtttgtcgcgatcattcttacggagatatttggctctcccttcttgaagaatatcggtatcattgtagggctggctgtagggtgtatcgttgctggtgcaaccgggtacatcgacggttcgacaatcaagtcctctcctgctatcacattcctgtgggtgcacacatttaagatcagtgtctaccctccagctatcttgcctatgctggctgtatacgtgtctctagcaatggaagccattggcgacattacagcctcagcagaagtatcccgccagccagtcgtcggtgacgtgttcgactctcgaatccagggaggcatcctcagcgacgggatcggtggcttcttgtctgccctcttcaccgtgacccctctatccgtcttcgcacagaacaacggggttatcgctatcactcggtgcgcaaatcgcggtgcagggcgatggtgttgcgcattccttatcctgttcggtgtactgggcaagatctctggcgtcttcctcgccattccgaaccccgtccttggaggagtgacgacgttcttattcgcaagcgttgctgtgtccggaatcagggtccttgggtatgttaagttcacgagaagggagcggttcgtccttggtgcagctttggcgtttggatttggaaacctcctcaagccggacatattcacgcatctgtttgatggagttaagaaccccaattcgggattgcaggggttgtttgattcgattacgattgtgcttagcacccctttcctggctggaggtgttgtggccgctgtgctcaaccttattttgccgcaggagcaagaagagattgttcctcgtgaagggtcagtggatcaggtcgatgtggagtcacaagaggacgagaagaggctctaa

SEQ ID NO: 2441 - protein, 584 aa, Unknown
  Unidentified
MSDVVGQQPGPTVLPVVHSSSKLEYVKDRVSSIKHKLSTKDGWIGDYDYAWLCTPTLPFLRNKTSPPPFYALDDDLPLILAISSGLQHALAMLAGLITPPIIFASALNLDVATSAYMISASLIGCGILSLVQMSRIRLFKGYYLGTGLITVVGTSFATLSTASAIFNAMYKDGTCPSTTAADGSIVQGACPDAYGKVLGTSLICSFLEIGMSFCSPRLLKRLFPPLVTGSVILLIGASLIGSSGVPNWGGGSNDCQNRPTSGIFELCPTIFAPRPLPWGSPEFIGLGFLSFVAIILTEIFGSPFLKNIGIIVGLAVGCIVAGATGYIDGSTIKSSPAITFLWVHTFKISVYPPAILPMLAVYVSLAMEAIGDITASAEVSRQPVVGDVFDSRIQGGILSDGIGGFLSALFTVTPLSVFAQNNGVIAITRCANRGAGRWCCAFLILFGVLGKISGVFLAIPNPVLGGVTTFLFASVAVSGIRVLGYVKFTRRERFVLGAALAFGFGNLLKPDIFTHLFDGVKNPNSGLQGLFDSITIVLSTPFLAGGVVAAVLNLILPQEQEEIVPREGSVDQVDVESQEDEKRL

SEQ ID NO: 2442 - DNA, 1767 bp, Podospora anserina DSM 980
  CDS (1)..(1767)
atggatgaggatcaaggtccgtcccagattgtccctgggcagacgcccaagaagacctttggcgatcgcctcaataccatcagaaagaccttcactaccaaggatggtctcatcggcgactatgactacgcattccttttccggccgaacctccccttcatggccaaatccgacaaggctccaccattcttcggcctcaacgaccgcatgcccgtcgtccttgccctgattctcggcttccagcacgctcttgccatgttggctggtatcatcacacctccaatcatcatgtccggcgccggcggtgtcaacctcaccaccgagcaaactcagtacctcgtctctaccgccctcatcgtctccggtctcctctccgctatccagattacccgtgtgcacatcaagggcactccctactacattggcactggtctgatctctgtcgtcggtatctcgttcgccattattcccgttgccaccggtgccttcaaccagatgtacgagaatggcttttgccaaaaggatgagtttggtgccaagctcccttgccccgatgcctacggtgctgttctcggcacagctgccctttgcgccctcctcgaaatcgccctgagcttcatgccaccaaagatcatgctccgtatcttccccccaatagtcaccggccctaccgtcatgctcatcggtatccacctaatcgagtccggcttcaagaactgggccggtggctctggtctctgcgctgagaagaaccccgccgagttctttgcccgctgccccgatatttctgcgccaaacgccctgccgtggggttcgccagagtacctcggtctcggcttcagcgtcttcgttaccatcatcctctgcgagcgtttcggttctcccatcatgaagtctacctctgtcattattggtctcttgactggctgcatcattgctgctgccactggctacttcaaccgtgccggtatcgacaatgcgcctgttgcctccttcatctgggtcaagaccttcaagcttacgctttatggaccgctggtgttgccgctgatggctgtgttcatcatctgcgcttgcgaggctattggtgatatcaccgctacttgcgatgtctccagactcgaggtggagggcaagctctacgagagcagaatccagggtggtgtcttggctgatggtatcaacggtatgctggctgccctctgcaccatcactcctgttaccacgtttgcccagaacaatggtgttattgctttgactcgctgcgccaacagaagcgccggttactgctgctgcttcttccttgtcatcatgggtgtcttcgccaagttcgccgcctcccttgttgctattccatctgccgtcctcggtggcatgaccaccttccttttcaccgctgtcgccgtttccggtatggccattatcactaagggtgtgccattcaaccgccgcaacagattcatcctcactgctggtcttgctctcggctatggtgctactcttgtgccgaactactttgagaatgtcttcagctacagcggcgaggacaagggcctgcagggcttccttgatgccatctccctcatcatggagactggctttgctgtcacggccatgatctgcatgatcttgaacctgacgctcccgatggaggtggaggatgttactgaggcggttgctgggcagaaccagagtgtggtgactgcggcgaggccgacgagtgcgggggatagtgttgaggaggagaagggtgtcaagagcgcctga

SEQ ID NO: 2443 - protein, 588 aa, Podospora anserina DSM 980
MDEDQGPSQIVPGQTPKKTFGDRLNTIRKTFTTKDGLIGDYDYAFLFRPNLPFMAKSDKAPPFFGLNDRMPVVLALILGFQHALAMLAGIITPPIIMSGAGGVNLTTEQTQYLVSTALIVSGLLSAIQITRVHIKGTPYYIGTGLISVVGISFAIIPVATGAFNQMYENGFCQKDEFGAKLPCPDAYGAVLGTAALCALLEIALSFMPPKIMLRIFPPIVTGPTVMLIGIHLIESGFKNWAGGSGLCAEKNPAEFFARCPDISAPNALPWGSPEYLGLGFSVFVTIILCERFGSPIMKSTSVIIGLLTGCIIAAATGYFNRAGIDNAPVASFIWVKTFKLTLYGPLVLPLMAVFIICACEAIGDITATCDVSRLEVEGKLYESRIQGGVLADGINGMLAALCTITPVTTFAQNNGVIALTRCANRSAGYCCCFFLVIMGVFAKFAASLVAIPSAVLGGMTTFLFTAVAVSGMAIITKGVPFNRRNRFILTAGLALGYGATLVPNYFENVFSYSGEDKGLQGFLDAISLIMETGFAVTAMICMILNLTLPMEVEDVTEAVAGQNQSVVTAARPTSAGDSVEEEKGVKSA

SEQ ID NO: 2444 - DNA, 1767 bp, Pyrenophora tritici-repentis Pt-1C-BFP
  CDS (1)..(1767)
atgactgtagaaattttgagcgagagtgaaccaaaatcaaattacgccgaagaaagtgctccacgctcggcggtgaccagtcaagaggcgggtacggcgacgacgaaatggcaagacacacttgcagacctcaaatatgccttcacgacgagagacggatggattggtgactacgactacgtctacctcatcaccccgaacatctggccactgagcaagaaatacaaaacttacaaggcacctttctatgggctcaatgaccgcgttcccattcttctgacactgcttctgggcctccagcatgcgctcactatgatcgggtcgatcgtttcgccgccgcttgccatagcctccggagctttcaactttgatcccgcaatgaccacctacctcgtgtcgaccgctttcatcaccactggtattgcaacggcgctgcaggttacccggctacacattatgaagacacctttcttcatcggcacaggactattgagcgttgtcggaccaacattcgacattctgcccattgtattcaactactccgctctacgatacaagtccggaagctgtccagtgcttgcagatggaacccagggaccatgccctgatgcctggggtgcctgcttaggcactatgctttgctgtgtctggctccagatcgcattggcctttgttcccccaaagatcttaaacagggtctttcctaagctcatcactggatctcttttaacacttgtcggtgtctatctcatcggcaacggactacagaactggggaggatcatcaaactgccacaacggaaagggcttctacgccatgtgtccgaacattgctgcacccaagccactcgtatggggccacccaaagtttatcgggatgggcttcagtgtgtttgctaccatcattctcgttgaagcactgggtgcgccactcatgcgctctgcttccgtcatcatcggtctcgccgtcggctgcgccatctctggagcgactggatactggtcaacagagaagctcgatcaagcgcccaacggtacatttctctgggtgcatacgttcaaactctccgtcgatggcgtcttggctcttcccatgatcatcatgtttgcctgccaggctgtatcgtgtattcctgatatcttggccactgccgagctatcaaacgtggacattgaaggaacagagttcaacagtaggattcaaggtggcatcttgtgtgatggcataggcagtttcttcagcgcactggctaccggtcccccgatggtaagccaggctggtaacaacggtgtcattgttcttacgggttgcgcgtctcgtcgcgccggctgggcagcaagtggctttctagtcttgatgggcattattgcaaagtttggagccgtgtttgcttccatgccaccttctgtcctaggaggcatgcaagtgttcctctacagtaccatcgctgtagccggagtccgcgtcctcgcactcataccttggacacgccgcgaccgtttcatccttacggtcgcgctcggtgtcggcttcatggatatctgccagccggactggtttgcacaagtgctggcgtacaatggtcccaatcagaacctggtcgggtttgaacagggcatcaatctcgctgtcggtaccccatttgtctttgcggctattgtaggtgtcttcctcaatgctgtgctgccaaaggatagaaatgccatgtccactataggctacggagatgagagaaagcatcccaggataggcgagcgtgaagattga

SEQ ID NO: 2445 - protein, 588 aa, Pyrenophora tritici-repentis Pt-1C-BFP
MTVEILSESEPKSNYAEESAPRSAVTSQEAGTATTKWQDTLADLKYAFTTRDGWIGDYDYVYLITPNIWPLSKKYKTYKAPFYGLNDRVPILLTLLLGLQHALTMIGSIVSPPLAIASGAFNFDPAMTTYLVSTAFITTGIATALQVTRLHIMKTPFFIGTGLLSVVGPTFDILPIVFNYSALRYKSGSCPVLADGTQGPCPDAWGACLGTMLCCVWLQIALAFVPPKILNRVFPKLITGSLLTLVGVYLIGNGLQNWGGSSNCHNGKGFYAMCPNIAAPKPLVWGHPKFIGMGFSVFATIILVEALGAPLMRSASVIIGLAVGCAISGATGYWSTEKLDQAPNGTFLWVHTFKLSVDGVLALPMIIMFACQAVSCIPDILATAELSNVDIEGTEFNSRIQGGILCDGIGSFFSALATGPPMVSQAGNNGVIVLTGCASRRAGWAASGFLVLMGIIAKFGAVFASMPPSVLGGMQVFLYSTIAVAGVRVLALIPWTRRDRFILTVALGVGFMDICQPDWFAQVLAYNGPNQNLVGFEQGINLAVGTPFVFAAIVGVFLNAVLPKDRNAMSTIGYGDERKHPRIGERED

SEQ ID NO: 2446 - DNA, 1767 bp, Unknown
  Unidentified
  CDS (1)..(1767)
atggcagatatgatcggaccagaccatacgccaaagcgtagctttggagaaaaggcacgacgtgcctctaacaacaacagagatggactggtcggcacatacgactatgcctttcttttccgaccaaatcttccatttatgaagaaggaacgtagagcggctcctttcttcggtctaaatgaccgcatgcccgtcctactggcccttctacttggatttcagcatgccctcgccatgttagcaggtgtcattacacctcccatcatcctcgccaatgccgccaacttgagttcagaccaacagcgctacctcgtctcgacttcgctcgtagtatgcggtatcttgtcctctattcaaatcacgcgatttcacatctggaagactccgtactatatcggtaccggcctgatctccgtggttggcacttcttttgctactattccggtggcgactggggcgctgagccaaatgtatgcaactggcttctgtccaactgctgctgatggcacaaaacttccttgcccagacggctacggtgctattctgggtacatgtgctgtatgtgccttgctcgaaattggcatgtccttcactagtccgcgtatcctgaagaagatcttccctcccctagtcactggaccaacggttttgctcatcggtgtcaaccttgtaactactggattccaaaactgggctggtggttctggagactgtcagtctcgtcccgaatctggtctctttcgtctctgccccaacatcaacgcaccccatgctcttccttggggtagcgcagagttcatcggtctcggtttcagcgtcttcatcacaatcatcatctgtgagcgcttcggcgctccaatcatgaagtccactgctgtcgtcattggtctcttagtcggatgcatcatcgccggcgccacaggctactttgacaaatccaccattgacgctgcaccggcagcatccttcatctgggtcaacacattcaagctcactgtctacgggcccattgtcctacccctcctagccgtctacatggtctgcgccatggaagccatcggcgacatcaccgctacatgcgatgtctcgcgtctcgaagtcgacggcgaaatgttcgattcccgcatccaaggcggtgtcctcgcagacggtctcaacggcatgattgctgccctctgcacaatcacgcccatgtcgactttcgcacagaacaacggcgtcattgccctcacgcggtgtgcgaatcgtaaagcaggttatgcatgctgtttctggttgattatcatgggtatctttgccaagttcgctgctgctcttgtggctattccttctgcggtgctaggcggtatgacgactttcctcttcagcgctgttactgtcagtggtatccgtattatcagcactatgccatttacccgaaggaaccgctttatcctcaccgctggctttacgcttgggttcggcgctactatggttcctgactggttcgctcacgtcttcacttacgatgggcccaacgcggcgctcctgggattctacaacgccatcgttcttatcatggaaactggattcgcggttgtcgctttcgtcaacattgtgctgaatcttgttctgcccgaggagattgaggatgaggagacgcccgagttgacggcgaatgaggttgatgagccaaaggatagggaggagtgggcgaggattaggaaggtggctgaggatgtggaggggagggctagttcggagattacgcctggtaaagctgcgtag

SEQ ID NO: 2447 - protein, 588 aa, Unknown
  Unidentified
MADMIGPDHTPKRSFGEKARRASNNNRDGLVGTYDYAFLFRPNLPFMKKERRAAPFFGLNDRMPVLLALLLGFQHALAMLAGVITPPIILANAANLSSDQQRYLVSTSLVVCGILSSIQITRFHIWKTPYYIGTGLISVVGTSFATIPVATGALSQMYATGFCPTAADGTKLPCPDGYGAILGTCAVCALLEIGMSFTSPRILKKIFPPLVTGPTVLLIGVNLVTTGFQNWAGGSGDCQSRPESGLFRLCPNINAPHALPWGSAEFIGLGFSVFITIIICERFGAPIMKSTAVVIGLLVGCIIAGATGYFDKSTIDAAPAASFIWVNTFKLTVYGPIVLPLLAVYMVCAMEAIGDITATCDVSRLEVDGEMFDSRIQGGVLADGLNGMIAALCTITPMSTFAQNNGVIALTRCANRKAGYACCFWLIIMGIFAKFAAALVAIPSAVLGGMTTFLFSAVTVSGIRIISTMPFTRRNRFILTAGFTLGFGATMVPDWFAHVFTYDGPNAALLGFYNAIVLIMETGFAVVAFVNIVLNLVLPEEIEDEETPELTANEVDEPKDREEWARIRKVAEDVEGRASSEITPGKAA

SEQ ID NO: 2448 - DNA, 1779 bp, Penicillium marneffei ATCC 18224
  CDS (1)..(1779)
atggacggccccgatcagatcgggcctgataccagccccaaacgaacaatcgcagatcggttccgacgagtcggacggtcggtaaccaccaaggagggcctcatcggtgactatgactatgccatgctcttcaaaccacgtctcccattcatgaaaaaaacccgctcgtcaactccatttttcggcctccacgacaaaattcctcttgtcctcgcgatactgctcggtctccagcatgccctggctatgcttgcaggcgtcattactccgcccataattgtcagcggagccgccggtttcgatacttccacttcgcaatacctcgtctcctcatcgttgatcgtctcaggtattctgtcggccattcaaatcacccgactcaagatccgcggaacaccctactacatcggaaccggtctgatttcggttgctggtacatcattctcgacattgaccattgccaacaatgcattgactcaaatgtacaactctggatattgccccatcgaccccgagacaggcgcaaagctcgcttgccctcagggctacggcgctattttgggcacatcttgtctctgctctctactcgaaattggtctatcgttcgtcccgatcgatgtcatcaaacgcattttccctcctttggtgactggtcccaccgtcatgctgatcggtgtcagtctgattgagagcggattaaaaaattgggccggtggctctggcgcctgtctcgcgaatgctgcctctcgcgctttgtgcccttccgcaacggcaccacatcccttgccctggggaagcgccgaattcatcggtctcgggtttttggtgtttgtgtctatcatcctatgtgaacgctttggatcccccattatgcgaacctgctcagtcgccgtgggtctacttgttggctgcattgtcgcagctgcatgtggatatttcgatccgtcatccatccagcaagcacccgtcgcatcatttgtctgggtcaagaccttccctctctcgatctacgcacccctgatcttacccttcttggcactctatatcgtgctgatgatggaagccattggcgacataacagccacctgcgacgtatcccgtctcgacatcgagggtgaactcttcgactcccgaatccgcggtggtgtcctcgccgacggcctgaacggtctactcgctggtctcttcacaatcacacccgtgtccacctttgctcaaaacaacggcgttatcgctttgactcgctgtgcaaaccgcaaagccggttattggtgctgtttcttcttgattgtgatgggcatattttccaagtttgctgccgcgcttgtggctatcccctcgtccgtgttgggtggtatgacgacattcttgttctcgtccgtcgccatctccggtattcgcattattgccgccacacctttcacccgccgtaataggttcattttgaccgctgcgtttgcggttggtatgggcgctacccttgtgccgacttggttctcatatgtgtttacctactccggcaacaataagggattgagaggtctcattgatgcaatcgagttggtcatgacgaccggattcgtggttacgggtctgctggcgttggttttgaatttattgttgcctgaggaagacgacgacgaagatgatgatgcccgtctgttggatggtgatgctactactaccagtgaagaacacagcaagttggctgcggcttcggagagtgcggctcctgcatcgagtgagaatggggagggcaagtcagtgaagctttcttga

SEQ ID NO: 2449 - protein, 592 aa, Penicillium marneffei ATCC 18224
MDGPDQIGPDTSPKRTIADRFRRVGRSVTTKEGLIGDYDYAMLFKPRLPFMKKTRSSTPFFGLHDKIPLVLAILLGLQHALAMLAGVITPPIIVSGAAGFDTSTSQYLVSSSLIVSGILSAIQITRLKIRGTPYYIGTGLISVAGTSFSTLTIANNALTQMYNSGYCPIDPETGAKLACPQGYGAILGTSCLCSLLEIGLSFVPIDVIKRIFPPLVTGPTVMLIGVSLIESGLKNWAGGSGACLANAASRALCPSATAPHPLPWGSAEFIGLGFLVFVSIILCERFGSPIMRTCSVAVGLLVGCIVAAACGYFDPSSIQQAPVASFVWVKTFPLSIYAPLILPFLALYIVLMMEAIGDITATCDVSRLDIEGELFDSRIRGGVLADGLNGLLAGLFTITPVSTFAQNNGVIALTRCANRKAGYWCCFFLIVMGIFSKFAAALVAIPSSVLGGMTTFLFSSVAISGIRIIAATPFTRRNRFILTAAFAVGMGATLVPTWFSYVFTYSGNNKGLRGLIDAIELVMTTGFVVTGLLALVLNLLLPEEDDDEDDDARLLDGDATTTSEEHSKLAAASESAAPASSENGEGKSVKLS

SEQ ID NO: 2450 - DNA, 1737 bp, Penicillium marneffei ATCC 18224
  CDS (1)..(1737)
atggagccctcaacgaaagaagaggctgcattgaagcacccggatactcagacatcattgtcgtcagtccctgagccggcatcgtcttcgcaatgggcatacttgaaacattactttaccagtcgcgatggttggattggtgattatgactacatgtatctcataacccccaacatctggccgctcaacaaaaaatacaaagacttcgaagccccattctatgggctgaacgaccacgtccccattttactgaccatcatcctgggtctgcaacatgccctaaccatggttggcgcggtggtttcgccgccgttagcaattgctggcggcgcattctacctcacctcggagcagacgcaatacctcgtttcagcggcgttcatcaccactggaattgctacggcgttacaagtcacacgggtgcacatcgccaagacgccattctacatcggcacgggattgttgtctgttgtcggaccgacgtttgatattctcaacatcgcgtttaattatacaaatatgagatatgcgaatgggacgtgtcctgttgatgagacaggcgcaaaactgccttgccccgaagcatggggtgccatgctcgggacgatgttgtgtactgtctgggttcagttcttgatgtcgcttgttccgcccaagattctcaatcggatattccccaagattgttacgggtagtttgttggttctggtgggtgtgttcttgatcggtaacggaatggagaattggggcggaagctcgaactgtgatggtggaactggcttttatgctctgtgtccaaataccgctgctcctaatcctctgccttggggcgatcctaaattaatcggactcggattcagcgtttttgtaaccatcattttcgtggaaatcttcggctctcctctcatgcgctctgcatccgtcattttcggcttggctgttggctgcgccatttctggcgccgctggatactggtcgacagataacatcgatgctgctcccgttggcacctttttgtgggttcacaccttcaaactatccgtcgacagagcgctcgtcttgcctttgatgatcatgtttgtctgtgaagccgttagttgcatgccagatatccttgcaaccgctgagctttcaggtgtcgatattgatggcacagaattcaacagtcgtatacaaggtggaatcatgtgcgatggtttatgcagtctgatcagtgccctgggtactggactgcctatggtcagtcaggctggtaacaatggtgtgatttcattgacaggatgcgctagccgccgcgctggctggtgtgcctcggcattcctagttctaatgggcatatttggcaaatttggtgcggtcttcggttccatgccaccctcagttctgggcgggatgcaggttttcttgtacagcacaatcgccattgccggtatacgtgtgctcagtcttgtcgaattcacccgacgaaacagattcatcttgacagccgctttgggaattggcttcatcgatatcgtctcaccgcactggttttccaagattttggcttatagcggaccaaacgtgaacttgcagggattcgaacaaggcctcaatttgatagtggaaactcctttcatcattgcggctgttattggagtcgtgttgaacctcgcaattccagaagagaagggtgcatccaagaatacgcatatgctgccatggcagagacagtcgaccgaattatccgagtcgtag

SEQ ID NO: 2451 - protein, 578 aa, Penicillium marneffei ATCC 18224
MEPSTKEEAALKHPDTQTSLSSVPEPASSSQWAYLKHYFTSRDGWIGDYDYMYLITPNIWPLNKKYKDFEAPFYGLNDHVPILLTIILGLQHALTMVGAVVSPPLAIAGGAFYLTSEQTQYLVSAAFITTGIATALQVTRVHIAKTPFYIGTGLLSVVGPTFDILNIAFNYTNMRYANGTCPVDETGAKLPCPEAWGAMLGTMLCTVWVQFLMSLVPPKILNRIFPKIVTGSLLVLVGVFLIGNGMENWGGSSNCDGGTGFYALCPNTAAPNPLPWGDPKLIGLGFSVFVTIIFVEIFGSPLMRSASVIFGLAVGCAISGAAGYWSTDNIDAAPVGTFLWVHTFKLSVDRALVLPLMIMFVCEAVSCMPDILATAELSGVDIDGTEFNSRIQGGIMCDGLCSLISALGTGLPMVSQAGNNGVISLTGCASRRAGWCASAFLVLMGIFGKFGAVFGSMPPSVLGGMQVFLYSTIAIAGIRVLSLVEFTRRNRFILTAALGIGFIDIVSPHWFSKILAYSGPNVNLQGFEQGLNLIVETPFIIAAVIGVVLNLAIPEEKGASKNTHMLPWQRQSTELSES

SEQ ID NO: 2452 - DNA, 1788 bp, Schizosaccharomyces japonicus yFS275
  CDS (1)..(1788)
atggctacattaggggcaaagttgcgccgagcgaaagagagcttctttagcaaagctttttgggttggtgactataattaccttgacatgattgtaccggcaattccctttacgaaacgtcggccatcgcaaccaccgtttttctcactcaatgattcggtgcctttgctaatgtcggtcctgttaggttttcagcatgccttggccatggttggcggcgtcacaactcctcctcgtatcattggatctgcagcgaacttgtcggaaaaagatctgaattacctggtgtcagctggactgattgccagtggcattcttacattgattcaaattgctcgctttcatattcctaaaacgaagtattacatcggaacgggcatgctctcggtacttggtatctctttcaccactgtgtcaattgccccgaaagctttccagcaaatgtacgaaaatggcatgtgcacaattaatgagaacggtgtaaaagaaccgtgtcttgcaggctatggcgctcttttgggcacttcctgtgtgtgtgcactgctcgaagttgtcttgtctttccttcctccgcgcattttgaagaaaatgtttccaaacatcgttaccggcccagttgtgttgctcattggcgtgtcgttggtgagcactggcatggcagattgggccggtggaagcggctcgtgtactggacatcccacagaatcgcaaatgccggggtactctttgtgtccttatgatacagcaccacatgctcttccttggggaagtgctcaatttattggtcttggatttagtgtttttgcgacgattattattttggaacgtttcggttcgcctctcatgaagactacttctgttgtaattggcttggtagttggtatgattatctctgcggctacaggctattgggaccgctcgatcattgatgcagcttcagtcgtgaattttaattgggttcgtacgtttccactcaaggtttatggtcctttggtattaccgttgttggctacgtttattgtgaatatgatggaagcaattggcgatattggtgcaacgtctgatgtgtccatgttgcccattgatggtcctgagtttgattctcgtgttcagggcggaattctgggtgatggcctcgcgtctattcttgccggtctgatgaccattacgcctctcacaacattcgctcaaaacaacggtgtcatctctctgactcgttgtgccaatagacgtgcgggttatgcctgtgctggctttttaattatcatgggcttttttgcgaaatttgctgcaatctttgttgccatcccttcgcctgtcttggggggaatgacaaccttcttgttttcttctgtgtgtgcttctggtctgcgtatcatctccagcattaagtttacaagacggaacaggttcattcttacggcttctttgtgtttgggattaggtgctacaatggtaccgtcttggtttacctacttcttcacttattccggcgacaacaagtcgttgcgcggtttcctggatgccataactctggttatggaaactggttttgcattgtcggcggtagtttccattgtgctcaacttagttttaccggaagaagagaattcgccccttaatgatcacggagagattcgtgtagctgaagtggaaaatgttgttgtattgcctgatgttcctatgaaaacaattgattcttatgacggtgattcatccttggaaacggaaataagatctgatgagaagaagaagaacgacgtgcttactatggctaatatggtgtaa

SEQ ID NO: 2453 - protein, 595 aa, Schizosaccharomyces japonicus yFS275
MATLGAKLRRAKESFFSKAFWVGDYNYLDMIVPAIPFTKRRPSQPPFFSLNDSVPLLMSVLLGFQHALAMVGGVTTPPRIIGSAANLSEKDLNYLVSAGLIASGILTLIQIARFHIPKTKYYIGTGMLSVLGISFTTVSIAPKAFQQMYENGMCTINENGVKEPCLAGYGALLGTSCVCALLEVVLSFLPPRILKKMFPNIVTGPVVLLIGVSLVSTGMADWAGGSGSCTGHPTESQMPGYSLCPYDTAPHALPWGSAQFIGLGFSVFATIIILERFGSPLMKTTSVVIGLVVGMIISAATGYWDRSIIDAASVVNFNWVRTFPLKVYGPLVLPLLATFIVNMMEAIGDIGATSDVSMLPIDGPEFDSRVQGGILGDGLASILAGLMTITPLTTFAQNNGVISLTRCANRRAGYACAGFLIIMGFFAKFAAIFVAIPSPVLGGMTTFLFSSVCASGLRIISSIKFTRRNRFILTASLCLGLGATMVPSWFTYFFTYSGDNKSLRGFLDAITLVMETGFALSAVVSIVLNLVLPEEENSPLNDHGEIRVAEVENVVVLPDVPMKTIDSYDGDSSLETEIRSDEKKKNDVLTMANMV

SEQ ID NO: 2454 - DNA, 1842 bp, Neurospora crassa OR74A
  CDS (1)..(1842)
atggatgaggaccagggtccctcccacatcgctcctcatgcgatgccaaagaggaccatcggcgaccgagtgactggcttcacacgaaccctcgcccacacctttctcaccaaggagggatggctaggcgactacgactatggctttctcttcaggcccaacttacccttcatgagaaaaatcaacaagcccgccgtattcttcggcctcaacgacaggatgcccgtcctcctcgcccttatccttggtttccagcattccctcgccatgttggctggcatcatcactcctcccattattcttgccggaggaggtggtgccaacttcaccgctgaacaatcgcaatacctcgtttcgagcgccctcattgtctctggcctgctgtcctgtatccaaatagcccgattccgcatcctgaagacgccctactacattggaacgggcctgatttccgtcgtcggcatctccttcgccatcatccccgttgccaccggtaccttcaaccagatgtacgccaacggcatgtgtcccaccgccgcagacggcactcgcctgccctgccccgacggctacggagctatcctcggcacagctgctgtctgcgccttactcgaagtcctcctctccttcctgccgcccaagtacatgctgcgcatgttcccgcccatcgtcactggccccaccgtcatgctcattggcatcagcctcatccagtctggctttcagaactgggctggcggttccggctcttgcgcggccgccaacccccttcccgagtacgtggtgtgccccaacgttggcgcccctcacgctcttccctggggctcggccgagtacttgggtctgggcttcctcgtcttcgtcaccatcatcttctgtgagcggttcggttcccccatcatgaaatccacgagcgtcattctcggtctgcttgtcggctgcatcgtcgctgctgcctgcggctactttgaccgctccagcattgacgccgctcctgtcgcctcctttatgtgggtacataccttcaagctcacggtgtacggtccccttgtgttgcccttactagccgtctaccttgtctgcgcctgcgaggccgtcggtgacattactgccacctgcgatgtgtcccgtctggaggttgagggtgagatctacgagagccgtgtccagggcggtgtgttggcggacggcatcaacggtatcctcgccgctctgtgcaccatcacgcccatgacgacttttgctcaaaacaacggtgtcattgccttgacccgatgtgccaaccgaaccgctggtttctgctgctgcttcttccttgtcatcatgggcgtcttctccaaattcgccgcctccctcgtcgccattccctcctccgtcatcggtggaatgaccaccttcctcttcacctccgtcgccgtctcaggtatcgccatcatcgcccgcggtgtgccattcaaccgccgcaaccgcttcgtgctgaccgccggtctggctctcggctatggcgccacgctcgtgcccacctactttgccaccttcttcacctacaagggcgacagcaagtcgctccagggcttcctcgacgccatcgagctcatcatggaaaccggcttcgctgtcaccgcgctgttcaccatgttcctgaacttggtgattccttatgagtttgaagatatcgatgaccaggccgtcgagggcttgcccaccggtgtggcgctttccaaagagggcgcgcccgggggtatggtgccggaaaagggaagctttagcgccagcggggtcggtagtgatgatatcaggccggtagagggcggatcgggaaaaacggtgaaggaggcttga

SEQ ID NO: 2455 - protein, 613 aa, Neurospora crassa OR74A
MDEDQGPSHIAPHAMPKRTIGDRVTGFTRTLAHTFLTKEGWLGDYDYGFLFRPNLPFMRKINKPAVFFGLNDRMPVLLALILGFQHSLAMLAGIITPPIILAGGGGANFTAEQSQYLVSSALIVSGLLSCIQIARFRILKTPYYIGTGLISVVGISFAIIPVATGTFNQMYANGMCPTAADGTRLPCPDGYGAILGTAAVCALLEVLLSFLPPKYMLRMFPPIVTGPTVMLIGISLIQSGFQNWAGGSGSCAAANPLPEYVVCPNVGAPHALPWGSAEYLGLGFLVFVTIIFCERFGSPIMKSTSVILGLLVGCIVAAACGYFDRSSIDAAPVASFMWVHTFKLTVYGPLVLPLLAVYLVCACEAVGDITATCDVSRLEVEGEIYESRVQGGVLADGINGILAALCTITPMTTFAQNNGVIALTRCANRTAGFCCCFFLVIMGVFSKFAASLVAIPSSVIGGMTTFLFTSVAVSGIAIIARGVPFNRRNRFVLTAGLALGYGATLVPTYFATFFTYKGDSKSLQGFLDAIELIMETGFAVTALFTMFLNLVIPYEFEDIDDQAVEGLPTGVALSKEGAPGGMVPEKGSFSASGVGSDDIRPVEGGSGKTVKEA

SEQ ID NO: 2456 - DNA, 1863 bp, Magnaporthe grisea 70-15
  CDS (1)..(1863)
atggaagagactcgcgagctaccggcagaggccatgccggtctcggcgccacaacggcgcacaatgggcgactatgcgaggcgagtcaagaggtcactgacgacgcgcgacggcctcgtcgggaactacgactacaagtacctgtttacgccaaagctgccgttcatgaagacgccgcggtcggcggctccgttcttcggcctcaacgaccgcatgcccgtgttcctggccatgctgctcggcttccagcacgcgctggccatgcttgccggactgataacggtgccgctgctcctctcgggcaccgggggcgccaacctcccgccggccacgcagcagtacctggtctcgtccgtcatgatcgtcgccggcatcctgtccaccgtccagatcacgcgctttcacctcttcaagaccccctactatctcggcaccggtctcatctccgtcgtcggctgctcctttgccgtcatccccgtggccaccggcggcatcaagcaaatgtacgccagcggtttctgcccgtccggcccagacggcaccccgctgccgtgtcccgatgcctacggcgctctcttgggcaccgcggccgtgtgtgctctgtttgagatcttgctgtctttcttgccgcccaaggtcgtgctgcgcatctttcctcccattgtcaccgggccgacggtgatgcttatcggaatctcgctcgtgagatcgggcttcaccaactgggcaggtgggacaggtccttgtagcaacgcagacccaactccctttttcgccagttgtcccaacatcaacgcacctcacgctctcccctggggaagtgcagagtatctcggactcggcttctccgtctacatgaccatcttcctgtgcgagcgcttcggcgcacccctgatgcagtcggcagccatcgtcatcggcctggccgtcggctgcatcatcgccgcggcgactggctactttgacaactcgggcatcaacagcgcgcccgccgtgtccttcatctgggtccagaccttcaagctgcaggtctacccgccgctcgtcctgcccatgatggcggtcgtgctgatttgcatgtgtgagaccattggagacatcacggccacctgcgacgtgagccgtctcgaggttgagggcaggatgtacgagagccgtatccagggaggcgtgctggctgacggtgtcaacagtatttttgcggccttgatgaccatcactcccatgaccacctatgctcagaacaatggtgtcattgccctgacgcgttgtgcgaaccggaaggcgggatacttttgctgtctctttcttataatcatgggcgtctttgccaaattcgccgcggccctcgtcgcgatccccgctcccgtcttgggcggcatgaccacgttcctcttctcctcggtcgccgtgtcgggcatcgccatcatcaccaagggcgtgcccttcaaccgccgcaaccgcttcatcctgaccgcgggcctggccctgggctacggcgcgactctggtgccgacctacttccacagcgtctttggcccgaccgacaacgggtcgctccagggcttcctcaacgccatcgagctcatcatggagacgggcttcgccgtcgccgccttcatctgcgtcgtcttcaacctgctgctgccggacgaggtggtggacgaggccgacgacgcggcgcagcagcagctccgcggcggggcggcgtcgtcgtcgtctgctgctgacctctcggagcgcggtgatgctcacccgccgtcgggcaaggcggcagagaggggaggcgtgtcgcaggtggtggcgtcgggcggggaggcggggtctgataccggcatcgagcacaaggtcaaggacagctag

SEQ ID NO: 2457 - protein, 620 aa, Magnaporthe grisea 70-15
MEETRELPAEAMPVSAPQRRTMGDYARRVKRSLTTRDGLVGNYDYKYLFTPKLPFMKTPRSAAPFFGLNDRMPVFLAMLLGFQHALAMLAGLITVPLLLSGTGGANLPPATQQYLVSSVMIVAGILSTVQITRFHLFKTPYYLGTGLISVVGCSFAVIPVATGGIKQMYASGFCPSGPDGTPLPCPDAYGALLGTAAVCALFEILLSFLPPKVVLRIFPPIVTGPTVMLIGISLVRSGFTNWAGGTGPCSNADPTPFFASCPNINAPHALPWGSAEYLGLGFSVYMTIFLCERFGAPLMQSAAIVIGLAVGCIIAAATGYFDNSGINSAPAVSFIWVQTFKLQVYPPLVLPMMAVVLICMCETIGDITATCDVSRLEVEGRMYESRIQGGVLADGVNSIFAALMTITPMTTYAQNNGVIALTRCANRKAGYFCCLFLIIMGVFAKFAAALVAIPAPVLGGMTTFLFSSVAVSGIAIITKGVPFNRRNRFILTAGLALGYGATLVPTYFHSVFGPTDNGSLQGFLNAIELIMETGFAVAAFICVVFNLLLPDEVVDEADDAAQQQLRGGAASSSSAADLSERGDAHPPSGKAAERGGVSQVVASGGEAGSDTGIEHKVKDS

SEQ ID NO: 2458 - DNA, 1770 bp, Gibberella zeae PH-1
  CDS (1)..(1770)
atggatgaggatcaaggaccacaatccattgcgcctgagcatgcaccatccaagacaatcgctcagcgctacaatggtctcgtcaaagcgtttacaactaggcacggtctgatcggcgattacgactatggcttcctctttcgaccaaacctgcctttcatgaagaagagcgttaacccaagccctttctttggactcaacgataagatgccagttcttcttggtttgctgctggggttccagcatgcactagccatgttggcaggagtcattacaccacccatcatcatcagcagcagcgccaatctattacctgaacaacaacaataccttgtctcgactgccctcattgtttcgggcatcttctccgctgtccaaattactcggttcagacttttcggcacaaactactaccttggcactggagtattatcagtcgtgggcgtgtctttctcagtgattcccgttgccaccggaggccttgctcagatgtatgctaatggtttctgtccttccgactcttctggaaaccctttgccttgccctaagggatacggtgcgatcctgggtacttcggctgtatgcgctcttgtcaacgttctagtctctttcatccctgccaagttcttgttgcgagtactaccacccatcgttaccggtcctacagtcatgctcattggcatcaaactcatcaagtcgggtttctccaactggatgggaggcagcggaggctgtatgacagctacggatggattgtttgctttgtgccctgatatcaacgcaccccatcctctaccatggggatctgcagaattcttgggtctgggattctctgtttttgttgccatcatcctgtgtgagcgatttggttcacctattatgaagtcaacgtcagtcgttattggattactgtttgggtgcatcatagctgccgcttgcggctatttcgaccgatccggcatcgacgcagctcctgttgcatcgtttgcatgggtacacaccttcccactctcagtttatggaccccttgtccttcctctcatcgcagtttaccttgtctgcgctactgaagctatcggcgatgtcacggctacatgcgacgtttcgaaactcgaggtcactggaaagacttatgagtctcgtatccagggtggtatcctgtctgatggccttgcaggctgcattggcgctctgatgaccatgactcccatgtctgtcttcgctcagaacaacggtgtcattgttctcacccgctgtgctaaccgtaaagctggtcttgcttgcgcaatgttcttggttattatgggaatttttgccaagtttgctgcggcccttattgccatcccgtcagccgtgctgggtggtatgaccactttcctcttcagcgccgttgccgtgtctggcatgtcaatcattgtccgtggtgtaccatttactcgacgtaatcgctttattctcactgccggctttgccttgggatatggtgctacacttctccctacttactttgacaaagtcttcacatacaagggagacaaccgctccttgcagggtttcttggacgccatcgttctgattatggagaccggatttgctattgccgccatagtctgcgtggtattgaacctcacccttcctgaggagttaggggatgagattgatgctgcacgatcaacaaccgatattacgatgcacgaggagacagagcagaacaaggccattgcgggaccaagtcgagatcacagcatcgacccgaaaaaggagggctga

SEQ ID NO: 2459 - protein, 589 aa, Gibberella zeae PH-1
MDEDQGPQSIAPEHAPSKTIAQRYNGLVKAFTTRHGLIGDYDYGFLFRPNLPFMKKSVNPSPFFGLNDKMPVLLGLLLGFQHALAMLAGVITPPIIISSSANLLPEQQQYLVSTALIVSGIFSAVQITRFRLFGTNYYLGTGVLSVVGVSFSVIPVATGGLAQMYANGFCPSDSSGNPLPCPKGYGAILGTSAVCALVNVLVSFIPAKFLLRVLPPIVTGPTVMLIGIKLIKSGFSNWMGGSGGCMTATDGLFALCPDINAPHPLPWGSAEFLGLGFSVFVAIILCERFGSPIMKSTSVVIGLLFGCIIAAACGYFDRSGIDAAPVASFAWVHTFPLSVYGPLVLPLIAVYLVCATEAIGDVTATCDVSKLEVTGKTYESRIQGGILSDGLAGCIGALMTMTPMSVFAQNNGVIVLTRCANRKAGLACAMFLVIMGIFAKFAAALIAIPSAVLGGMTTFLFSAVAVSGMSIIVRGVPFTRRNRFILTAGFALGYGATLLPTYFDKVFTYKGDNRSLQGFLDAIVLIMETGFAIAAIVCVVLNLTLPEELGDEIDAARSTTDITMHEETEQNKAIAGPSRDHSIDPKKEG

SEQ ID NO: 2460 - DNA, 1743 bp, Aspergillus nidulans FGSC A4
  CDS (1)..(1743)
atggacggcccagatcagatcgggccagacgtcaggcccaggaggacatttggagaccgcgtgcgacgagctgctcgtgcttttaccacgagagatggcctgatcggtgactacgactatggctttctctttacaccaagacttccatttgtgaagcagaaaaggagggctgctccgttctttggcctcgaggataagatcccactggtcctcgctttgcttctgggattgcagcatgcgctggcgatgcttgctggagttattactcctccaatcctgctggctggatcgtctggggccaactttggcgccgatgagtcgcaataccttgtctcgacctcgcttattgtgtcagggcttctttccgcagttcaaatgttccgtctgcatgtgtacaagactcgctactatgtcggcaccggactggtttcggtggtaggaacttcgttcgcaacgattacagttgcaaccgggacgtttaatcagatgtactcaactggatactgtccagtcgatggctcaggaaacaggctgccctgtccgaaaggttatggggcactcctagccacctcctgcctttgctcgcttctcgaaatcgggctttccttcatgagcagcaggctgctcaaagctctcttcccgccaatcgtcactggcccaactgtcttcctgattggtgcgagtctaatcggcaacgcaatgaaagactgggccggcggttctggaacctgcagcagcaatccgggcaatggcgctctttgccccagcgccgatgcaccacaccccctgccttggggcagcgccgagttcatcggccttggcttcctcgttttcgccaccatcatcctctgcgagcgcttcgggtccccaatcatgaaatcctgcgctgtcattgtcggcctgctggtcggctgcatcgtcgccgcggcctgtggctacttcgaccgctccggcattgacgccgcccccgtcgcatccttcatctgggtgaaaacgtttccgttaacaatctacgccccactcattctccccctcctcgcggtgtatatggtcatcatgatggaatccatcggcgacatcacggccacctgcgatgtttcccgtctccaagtagagggtgctacttttgactctcgcattcagggtggcgtcctgggaaacggcataacatgtcttctcgccggtctctgcaccattaccccgatgtcagtatttgctcagaacaacggcgttatcgccctcacccgctgcgcaaaccgcaaagctggctactgctgctgcttcttcctcgttgtaatgggcatctttgcaaaattcgccgcggctcttgttgccattccttcatccgtcttgggcggcatgacaacgttcctcttctcctccgttgcgatctccggcgtccgaatcatgtgcagcgttgactggacccgccgcaatagattcattctcacggcttcgttcgcggtcggtatggctgccacacttgtaccagattggttctcgtatttttttacgtatagtggtgacaaccatgcgcttgaggggcttttgcaggctgtcgagctggtcatggcaaatgggttcgcggttacagggttcttgggtctcctactgaatttgatcctacccgaggatatggaggaggatgttgtggagtccgaagaggactatgaagccacaactgtggtggggatgcagggcgggagtgagcctggttcctctggtcagaatgtgaaggcctaa

SEQ ID NO: 2461 - protein, 580 aa, Aspergillus nidulans FGSC A4
MDGPDQIGPDVRPRRTFGDRVRRAARAFTTRDGLIGDYDYGFLFTPRLPFVKQKRRAAPFFGLEDKIPLVLALLLGLQHALAMLAGVITPPILLAGSSGANFGADESQYLVSTSLIVSGLLSAVQMFRLHVYKTRYYVGTGLVSVVGTSFATITVATGTFNQMYSTGYCPVDGSGNRLPCPKGYGALLATSCLCSLLEIGLSFMSSRLLKALFPPIVTGPTVFLIGASLIGNAMKDWAGGSGTCSSNPGNGALCPSADAPHPLPWGSAEFIGLGFLVFATIILCERFGSPIMKSCAVIVGLLVGCIVAAACGYFDRSGIDAAPVASFIWVKTFPLTIYAPLILPLLAVYMVIMMESIGDITATCDVSRLQVEGATFDSRIQGGVLGNGITCLLAGLCTITPMSVFAQNNGVIALTRCANRKAGYCCCFFLVVMGIFAKFAAALVAIPSSVLGGMTTFLFSSVAISGVRIMCSVDWTRRNRFILTASFAVGMAATLVPDWFSYFFTYSGDNHALEGLLQAVELVMANGFAVTGFLGLLLNLILPEDMEEDVVESEEDYEATTVVGMQGGSEPGSSGQNVKA

SEQ ID NO: 2462 - DNA, 1800 bp, Aspergillus nidulans FGSC A4
  CDS (1)..(1800)
atgcatgatagggccggcctggaccattcaccagcaccagcagtcggccctgatccctattcgagtgacgacagcatggacaactccatccattcaaccgacggccccgactccgtcatccccaactccaaccccaagaagaccgtccgacagagagtccgcttgctggctaggcatctgacgacccgcgagggcctgatcggcgactatgactatggcttccttttccggcccgagctacccttcatgaagaaagatccacgggcgccgcctttttttggcctcaacgagaagattcccgtgctgttggcgtttatcctgggtcttcagcatgcgcttgccatgttggcgggtgtggtcactcctcctctgatcatatcaagctcgctgagcctgccgtccgatctccagcagtatctcgtttcgacctcgcttatcgtctgcgggctgctgtcgatggtccagataacgcgatttcatatctacaagacaccgtactatatcggcagtggcgtcctctcagttatgggggtctcgttctccatcatctccgtcgccagcggcgccttcaaccagatgtactcgaacgggttctgtcaactcgacgaggctggaaacagactcccttgccccgaagcgtacggcgccttgattggcacctcggcctgctgtgctttggtggagatcctcctcgctttcgtgcctcccaaagtgatacagaaaatcttcccgcccatcgtcactggtcccactgtaatgcttatcgggataagtctgattggaactgggttcaaagactgggctggcggctcggcgtgtatggatgacgggatgctgtgcccgtccgcaactgcaccgcgccctctcccgtgggggagtccagagttcatcggcctgggttttctagtctttgtatcgatcatcctctgcgaacgatttggagccccgattatgaagtcctgttctgttgtcatcgggctgctcgtcggttgtatagtcgctgcagcctgcggctacttcagccacgccgatattgacgctgcccctgccgcctcattcatctgggtcaagactttccctctctctgtctatggtccgatggttctcccgatcatcgcggttttcatcatctgcgcctgcgagtgcatcggtgatgtaaccgccacctgcgacgtctcgcgtctcgaagtccgcggcggcacattcgagtcgcgcatccagggcgccgtcctagcagacgggatcaactcggtagtcgctgcccttgcgacaatgacccccatgacgacctttgcgcagaacaacggcgtgattgccctcactcgctgcgcaaaccgctgggccggatactgctgctgtctgatattgatagtagccggtatctttgctaaattcgctgcagccattgttgccatacccaacagtgtcatgggcgggatgaagacgtttctcttcgcttcggtcgttattagcggacaggcgatcgtggccaaggcgccgttcacaaggcgaaatcggtttatcctcaccgcgtcaatggccctgggatacggggcgacgctggtgcccacttggtttgggaatgtattccctcagaccgagaatagagacctggaggggtttgaaaatgcgatcgagctcgtgcttgagacggggtttgcggtcacggcatttgttgctatgctcttgaacgcaatcatgcctgctgaagtcgaagagatcggtgccgtcacccctatgccggtctctgctcatgataatcgggatggcgaggcggagtatcagagcaagcaggcttag

SEQ ID NO: 2463 - protein, 599 aa, Aspergillus nidulans FGSC A4
MHDRAGLDHSPAPAVGPDPYSSDDSMDNSIHSTDGPDSVIPNSNPKKTVRQRVRLLARHLTTREGLIGDYDYGFLFRPELPFMKKDPRAPPFFGLNEKIPVLLAFILGLQHALAMLAGVVTPPLIISSSLSLPSDLQQYLVSTSLIVCGLLSMVQITRFHIYKTPYYIGSGVLSVMGVSFSIISVASGAFNQMYSNGFCQLDEAGNRLPCPEAYGALIGTSACCALVEILLAFVPPKVIQKIFPPIVTGPTVMLIGISLIGTGFKDWAGGSACMDDGMLCPSATAPRPLPWGSPEFIGLGFLVFVSIILCERFGAPIMKSCSVVIGLLVGCIVAAACGYFSHADIDAAPAASFIWVKTFPLSVYGPMVLPIIAVFIICACECIGDVTATCDVSRLEVRGGTFESRIQGAVLADGINSVVAALATMTPMTTFAQNNGVIALTRCANRWAGYCCCLILIVAGIFAKFAAAIVAIPNSVMGGMKTFLFASVVISGQAIVAKAPFTRRNRFILTASMALGYGATLVPTWFGNVFPQTENRDLEGFENAIELVLETGFAVTAFVAMLLNAIMPAEVEEIGAVTPMPVSAHDNRDGEAEYQSKQA

SEQ ID NO: 2464 - DNA, 1680 bp, Debaryomyces hansenii CBS767
  CDS (1)..(1680): transl_table=12
atgaacgtccaagacataaaaaaaattggtaaaagagtgatacgcaaatggaccactaaggatggcttcataggggactatgattacaagtatctatttgtacctgaaataccattcaaaaaaacggtgaccaagagacagccattctttggtctaaattcagatatgccacttttgttagggtttattctagggttccaacatgctttggcgatgcttgccggggtggttacacctcctattcttattgcttctgctgcaaatcttgatagtgctacacaagaatatctcgttagtgcttccttgattgtgtcaggattattgtcatgtattcaaattactagattccatatttacaagacaccgtactacttgggtacggggttactttcagtggtgggaacgtcgtttgcaaccatatcgatagtcactaaagccctaccagtgatgtatctgacaggggtatgtccagtcgtggacggtgtaaatcagccgtgccctgacggatatggaatgattttgggaacaggaatagtttgttcgctcttggaaatcctcttgtcattcatgcctgctaagcagttacaaaagatattccctcctattgttactggtcctgtcgtgttattgatcggggtacatttgattgagacaggtttccaagattgggttggaggttctgattgtgtgggtgaaatgtgcggttccgctcatccattagaatggggttcagctgagttcataggattaggttttctcgtttatgttacaatcattatcgccgaaagatttggctctcctattatgaaatcatgtgctgttatcgttgggttattaataggttgtattgttgcagcagcctgtgggtacttcagtaaaacaaacattgattctgctccagctgcaacattcatatgggtgcatacgtttaaattaagagtttatgggcctgcggttttgccattcctagctgtatatattgtattaatgatggaagcgatcggtgacataacagctacttctgatgtttcaagattggaagttgaaggagaattgtatgaatcaagagtccaaggaggtatattggcagatggtttcaatggattattatcgggtttgatgactgtgacgccgatgtctacttttgcccagaataacggggttatttctatcactaagtgtgctaatagaaaagttggatattggtgtgctttcttcatgatcataatgggtgtcttttctaagttcgctgcttcgattgtggcgataccaaaggcagtattgggtggcatgacgtctttcttgtttacctcggtcgctgtatctggtattagaattatctctacaattgaatttaccagaagagataggtttgtgttgaccgcatccttgttgcctggtttcggttcaattttagtatcaaactggtttgataatgtattcacctattccggtaataatactgctttgctgggctttttcgatgcgatagtcttggttatggaaactggctttgccgtaactggttttatagggttaatcttgaacctcattttgcctgaaatggatgacgacatagaagagtttgacgatgtggtcatcgaatcatctgagtcaaatcagcatagctcggacgataattctaagcaaaacaaaattgtgaaggtagagagtgtatag

SEQ ID NO: 2465 - protein, 559 aa, Debaryomyces hansenii CBS767
MNVQDIKKIGKRVIRKWTTKDGFIGDYDYKYLFVPEIPFKKTVTKRQPFFGLNSDMPLLLGFILGFQHALAMLAGVVTPPILIASAANLDSATQEYLVSASLIVSGLLSCIQITRFHIYKTPYYLGTGLLSVVGTSFATISIVTKALPVMYLTGVCPVVDGVNQPCPDGYGMILGTGIVCSLLEILLSFMPAKQLQKIFPPIVTGPVVLLIGVHLIETGFQDWVGGSDCVGEMCGSAHPLEWGSAEFIGLGFLVYVTIIIAERFGSPIMKSCAVIVGLLIGCIVAAACGYFSKTNIDSAPAATFIWVHTFKLRVYGPAVLPFLAVYIVLMMEAIGDITATSDVSRLEVEGELYESRVQGGILADGFNGLLSGLMTVTPMSTFAQNNGVISITKCANRKVGYWCAFFMIIMGVFSKFAASIVAIPKAVLGGMTSFLFTSVAVSGIRIISTIEFTRRDRFVLTASLLPGFGSILVSNWFDNVFTYSGNNTALLGFFDAIVLVMETGFAVTGFIGLILNLILPEMDDDIEEFDDVVIESSESNQHSSDDNSKQNKIVKVESV

SEQ ID NO: 2466 - DNA, 1722 bp, Yarrowia lipolytica CLIB122
  CDS (1)..(1722)
atggcccgaatcatcaaacacaagctcaccactcgagaaggactcattggagactacgactacgcatttctcttcacccccaagatccccttcatgaagaaacgagaagacgaaccctcgacctttttccctctcaactcgtcacttcctctcttcctagcaattctgctgggattccagcattctctggccatggtggctggagtcgtcacacctcctctgatcatgggtggttctgccaactttggacctgatctcagccagtacctcgtctctgcatgcctcattggctctggaattctgtcgctcatccatattattcgattcaaaattcccaaaactaatatctacattggaaccggcctgatttccgtggttggaacctcattcgctaccatcaacgtcttcaccagttcactgcccattatgtaccgatcaggtatttgtcagacagctgctgacggaactcctcttccctgtcctgatggctacggtcgtctcattgctactgccatggtctgcgcgcttctggaagtcgtgctttcattcctgcctgctaaggtcctcaagaaggtcttccctcccatcgtcaccggccctgtagtgcttctcattggtgtcgagcttgtatcttccggtttcaaggactgggctggaggatctggcccctgctacggacgacctacttctggagacttcatgatgtgtcctgccaacggtgctccgatggccgctccctggggctcagcccagttcatcggtcttggattcctcgtcttcatctctattctcttctgtgaaaagtggggagctcccatcatgaagtcctgctcggttgtcattggtctgctggtcggatgtattgtggctgctgcttgtggatactttgatggaaccaacatcgatgctgctcctgtcggaaccttcctgtggacccacaccttcaagctcaagatctacggaccagcagtacttcctatgcttgctgtctatctagtgctgatgatggagtccattggtgacattaccgccacatgtgacgtatctcgacaagccgttgagggccccgagtacgagtctcgaatcaagggaggcattcttggtgatggtatcattggtatccttgccggagccttcactcttactcccatgtctacgtttgctcagaacaacggtgttattgctctcaccaagtgtgccaacagacaggctggagcctgggcctgtttctttatgctcatcatgggtattttcgccaagtttgctgctgctattgtggccatccccaagcctgttctgggaggcatgaccacctttctcttctcttctgtctgcgtctctggtattgccattataacccgagccggcaagatccagcgacgagagcgactgattctgacagcctctctggtcatgggtcttggtgctaccatggtccccgattggttcacttacgtattcacctacaagggcgacaaccactctcttcggggcttctacgatgctatcgagctagttatgaccaatggtttcgcaattgccggatttgttggtattgcttgcaacctcatcttggctgaggaggagaacgttgacgatgaacaggaaatgcaggtggtcgagattgacgctgctgaggaggagaactctagctccgatgatatgatggttcctgaggccaagcgagcctccgaggaccacaagcgagtggacatggtttag

SEQ ID NO: 2467 - protein, 573 aa, Yarrowia lipolytica CLIB122
MARIIKHKLTTREGLIGDYDYAFLFTPKIPFMKKREDEPSTFFPLNSSLPLFLAILLGFQHSLAMVAGVVTPPLIMGGSANFGPDLSQYLVSACLIGSGILSLIHIIRFKIPKTNIYIGTGLISVVGTSFATINVFTSSLPIMYRSGICQTAADGTPLPCPDGYGRLIATAMVCALLEVVLSFLPAKVLKKVFPPIVTGPVVLLIGVELVSSGFKDWAGGSGPCYGRPTSGDFMMCPANGAPMAAPWGSAQFIGLGFLVFISILFCEKWGAPIMKSCSVVIGLLVGCIVAAACGYFDGTNIDAAPVGTFLWTHTFKLKIYGPAVLPMLAVYLVLMMESIGDITATCDVSRQAVEGPEYESRIKGGILGDGIIGILAGAFTLTPMSTFAQNNGVIALTKCANRQAGAWACFFMLIMGIFAKFAAAIVAIPKPVLGGMTTFLFSSVCVSGIAIITRAGKIQRRERLILTASLVMGLGATMVPDWFTYVFTYKGDNHSLRGFYDAIELVMTNGFAIAGFVGIACNLILAEEENVDDEQEMQVVEIDAAEEENSSSDDMMVPEAKRASEDHKRVDMV

SEQ ID NO: 2468 - DNA, 1776 bp, Candida albicans SC5314
  CDS (1)..(1776): transl_table=12
atgtcagctattcaaaagactttaaaacgaatggttcgtaaatggaccacaaaagatggacttctaggagattatgattataaatatttatttactccagatattccttttataactaaagaacttaaaactcaaccatttttcggagttgattccgatatgccaatattattaggagcaatattaggttttcaacatgcattagccatgttagctgggattgttactgtaccgattatggttgcctctacggccaatttatcagttgaaatcgaacaatatttagttagtacatcattgattgttagtggagtgttatcattaattcaaatcacaagatttcatattcctaaaactccttattatataggaacaggtttattatccgttgtggggacatcatttgccactattactattgtcactaaggcattcccaatgatgtatgccgatggaacttgtcctatggccagtgatggtgtcactaaattaccgtgtcccgatggatatgggaaaattttggctagtgcttgttgttgtgcattattagaaatcttattatcatttatgaaaccatcaatgttgcaaaaaattttcccaccattggttactggacccgtggttatgttgattggagttcatttagtagaaagtggattcactgattgggttggtggtgccggttgtcaaaattctgatacttgtacttatgggaaattttctgcaccttggggtgatgcaaaattcattggtttgggatttttagtttatgtatcaattatcttagcggaaagatttggggcccccattatgaaaagttgtgccgttatatttgggttattaattggttgtatagttgctgctgctgctggttatttcagttctgataatgttgatgctgctccagctgctagttttatgtgggttcatacatttaaattgacagtttatggtcctgttgtattaccatttttggctgtttatattgtccttatgatggaatgtattggtgatgttactgccactagtgatgtttctcgtttaccagtttctggagaaatgtatgaatcaagaattcaaggtggggttttgggtgatggtatttgtggtattctttcaacattaatgaccatgactccaatgtcagtttttgctcaaaataatggggttatttcaattacaaaatgtgctaatagaaaagttggttattggtgtgcatttttcttaattgttatgggagtatttgctaaatttgctggtgccattacatcaattcctaaaccagtacttggtggtatgacaagtttccttttctgtctggtggccattagtggtattaaaatcatttcgactactgaattcactagaagagatagatttgttttgacagcagctgtattacctggattaggagctacaatgcttcctaattggtttgaacacgttttcacttatcaaggtggtaataaatctttaaaagggtttttcaatgctattattgttgttgttgaaagtggattttgtttatctggggttatcgctgtgattttgaatcttttaattcctcaagtggaagatgatgttgaagaaattaatgaattggtgcttgatgtcgttggtagtgctactgaaagtgctagacaaaaatttgaagaaaaagaaggagttaaattagaagctttaagaagtcaattgagtaatattaaaagtaatggagggagtcaagatgccattactgtacttcatagaaatgatggattccctgatttgaagtaa

SEQ ID NO: 2469 - protein, 591 aa, Candida albicans SC5314
MSAIQKTLKRMVRKWTTKDGLLGDYDYKYLFTPDIPFITKELKTQPFFGVDSDMPILLGAILGFQHALAMLAGIVTVPIMVASTANLSVEIEQYLVSTSLIVSGVLSLIQITRFHIPKTPYYIGTGLLSVVGTSFATITIVTKAFPMMYADGTCPMASDGVTKLPCPDGYGKILASACCCALLEILLSFMKPSMLQKIFPPLVTGPVVMLIGVHLVESGFTDWVGGAGCQNSDTCTYGKFSAPWGDAKFIGLGFLVYVSIILAERFGAPIMKSCAVIFGLLIGCIVAAAAGYFSSDNVDAAPAASFMWVHTFKLTVYGPVVLPFLAVYIVLMMECIGDVTATSDVSRLPVSGEMYESRIQGGVLGDGICGILSTLMTMTPMSVFAQNNGVISITKCANRKVGYWCAFFLIVMGVFAKFAGAITSIPKPVLGGMTSFLFCSVAISGIKIISTTEFTRRDRFVLTAAVLPGLGATMLPNWFEHVFTYQGGNKSLKGFFNAIIVVVESGFCLSGVIAVILNLLIPQVEDDVEEINELVLDVVGSATESARQKFEEKEGVKLEALRSQLSNIKSNGGSQDAITVLHRNDGFPDLK

SEQ ID NO: 2470 - DNA, 1752 bp, Aspergillus fumigatus Af293
  CDS (1)..(1752)
atggacggtcctgatcgaatcggccctgatcacagtcccaggcggactctccgtgataaagctcgacggctggtgaagacatggactaccaaagaaggattggttggagactacaactacgcctacctgttcacaccaagaatcccttttaccaagaacatcagaaggacggcccctttctttggactgcatgacaggttacctgtgctgcttgccttcattctgggtcttcaacatgctctcgcaatgttggctggagtcatatcccctcccatcatcttgggcggttctagcggcgccaatttcggggatgccgaataccagtaccttgtttccacatccctgattgcctccggtctgctatccgcggttcagatggcccgcttacgcatttggaagacccgctacttcattggtactggattgatctcggtcgtcggcacctccttctccacaatcaccgtcgcatcgggaacattctctcagatgtatgcgtctggatactgtcccacagatgccaacggcaacagattgccatgccccagaggttacggtgctatcctgggcacggcttgcttatgctctctacttacgatcggcctgtctttcatgagtccaaggattttaaaacgcattttcccgcctatggtgacgggtcctacggttctcttgatcggagcaagcctcattgaaagtggcatgaaggactgggctggtggctctggctgtggatctgacccatccgctcgtgctttgtgtcccagtgctggtgcgccacatgctctcccctggggaagtgccgagttcattggcctcggattcctggttttcgtgacgatcattctttgcgagcggttcggatcccccattatgaaatcgtgcgccgtcgtggtcggccttctggttggctgtatcgtggcagctgcctgcggctatttcgaccggtcgggcatcgactctgcgcccgttgtctcgttcatctgggtgaaaaccttcccattgactatctacgcgcctctgatccttccgttcctcgcgctctacatcgttatcatgatggaatcaatcggtgatatcactgccacatgcgacgtctcccagctcgaagtcgaaggcgcggactttgattcgcgcgtccagggtggtgtgctaggcaatggattgacgtgcctgctggctggactctttaccatcacgcccatgtcggtctttgctcagaacaacggtgtcattgctctgacaaagtgcgccaatcgcaaggccgggtactgctgctgcttcttcctcgtcgtcatgggtgtcttcgccaagtttgctgctgccatcgtggccatccccaagcctgtcctgggcggcatgaccacgtttttgttctcgtccgtagccatctccggcatccgtatcatctccacgatcccatttacccggcgtaaccggtttattctgacggcctctttcgcggtgggtatggcggctacgctggtgcccgactggttctcgtacttcttcacgtatagtggtgataaccatgccctggagggtctgttgaacgctgtggagctcgtcatggaaaatggatttgctattactgcggtcatcggattggtcctcaacctcgtccttccggaagatccggaagacgaggcggccatcgtcgaggctacggcaagggatgcgccaacggaggagctgaaggactcagacccttcgtcacttaaagctgggcaaccgtccggctctctggctgtatga

SEQ ID NO: 2471 - protein, 583 aa, Aspergillus fumigatus Af293
MDGPDRIGPDHSPRRTLRDKARRLVKTWTTKEGLVGDYNYAYLFTPRIPFTKNIRRTAPFFGLHDRLPVLLAFILGLQHALAMLAGVISPPIILGGSSGANFGDAEYQYLVSTSLIASGLLSAVQMARLRIWKTRYFIGTGLISVVGTSFSTITVASGTFSQMYASGYCPTDANGNRLPCPRGYGAILGTACLCSLLTIGLSFMSPRILKRIFPPMVTGPTVLLIGASLIESGMKDWAGGSGCGSDPSARALCPSAGAPHALPWGSAEFIGLGFLVFVTIILCERFGSPIMKSCAVVVGLLVGCIVAAACGYFDRSGIDSAPVVSFIWVKTFPLTIYAPLILPFLALYIVIMMESIGDITATCDVSQLEVEGADFDSRVQGGVLGNGLTCLLAGLFTITPMSVFAQNNGVIALTKCANRKAGYCCCFFLVVMGVFAKFAAAIVAIPKPVLGGMTTFLFSSVAISGIRIISTIPFTRRNRFILTASFAVGMAATLVPDWFSYFFTYSGDNHALEGLLNAVELVMENGFAITAVIGLVLNLVLPEDPEDEAAIVEATARDAPTEELKDSDPSSLKAGQPSGSLAV

SEQ ID NO: 2472 - DNA, 1386 bp, Yersinia enterocolitica subsp. enterocolitica 8081
  CDS (1)..(1386): transl_table=11
atgtctacgcaatccgccgaacttaatacaccgcagcaggcaaccactcaccctagcgaattaatttatcgtttagaagaccgccccccactcgctcaaactctgtttgctgcatgccaacatttattggctatgtttgttgcagtgataactcctggcttactgatttgtcaggcgctagggctaccagcggaagatactcaacgaattatcagcatgtcactgtttgcctctggtctggcatcactgctacaaattaaaacctgggggccggttggttctggcctgttatccattcagggcaccagttttaactttgtttctccactgattatgggcggtttggcactgaaaaatggcggagcggatatcccgaccatgatggcagccctgttcggtaccttgatggtcgcatcttgtactgaaattatattatcccgtttcctgcatctggcgcggcgcattatcactccactggtatccggtattgtggtgatgattatcggcctgtcattgattcaggttgggctgacatctattggtggcggttatggtgcgatgagcgaccatacatttggttcacctaaaaacctcatgttggcgggtgcagtactcgtagtcattatcttattaaaccgccagcgcaacccgtatctgcgtgtcgcctcactggttatcgccatggctgtgggctatctgttagcgtggacgctgggtatgctgcccgaaagccgccctgtcgttgacaccgcactgatcaccatcccgacgccgctatactatggcttatcttttgactggaacctgctggtgccattaatgcttatcttcatggtgacctcacttgagaccatcggggatatcacggcgacctcggatgtatcagagcaacccgttcatggcccgctgtatatgaagcgcttaaaaggtggtgttttggcgaatggtttgaactccatgctatcagccgtgttcaataccttccctaactcctgcttcggccaaaataatggggttatccaattaaccggtgttgccagccgctatgtcggttttgttgtcgcactgatgctgattgtactgggcttgttcccagccgtcgctgggttcgtacaacatatcccagagccggtgctgggtggtgccactctcgtgatgttcggaacaattgccgcttccggtgtgcgtatcgtgtcacgcgaaacccttaatcgtcgcgcgattatgattatggcattgtcactagcagttgggatgggcgtggcgcagcaaccactgattctgcaatttgcaccagattggatcaaaaccctgctttcttccgggattgctgccggtggtattactgccatcgtacttaacctcatcttcccacaagaaaaataa

SEQ ID NO: 2473 - protein, 461 aa, Yersinia enterocolitica subsp. enterocolitica 8081
MSTQSAELNTPQQATTHPSELIYRLEDRPPLAQTLFAACQHLLAMFVAVITPGLLICQALGLPAEDTQRIISMSLFASGLASLLQIKTWGPVGSGLLSIQGTSFNFVSPLIMGGLALKNGGADIPTMMAALFGTLMVASCTEIILSRFLHLARRIITPLVSGIVVMIIGLSLIQVGLTSIGGGYGAMSDHTFGSPKNLMLAGAVLVVIILLNRQRNPYLRVASLVIAMAVGYLLAWTLGMLPESRPVVDTALITIPTPLYYGLSFDWNLLVPLMLIFMVTSLETIGDITATSDVSEQPVHGPLYMKRLKGGVLANGLNSMLSAVFNTFPNSCFGQNNGVIQLTGVASRYVGFVVALMLIVLGLFPAVAGFVQHIPEPVLGGATLVMFGTIAASGVRIVSRETLNRRAIMIMALSLAVGMGVAQQPLILQFAPDWIKTLLSSGIAAGGITAIVLNLIFPQEK

SEQ ID NO: 2474 - DNA, 1389 bp, Burkholderia pseudomallei 668
  CDS (1)..(1389): transl_table=11
atgcaacccgcccccctcgcccgccccgcttcccacggcgccgacgccgccgaatccgcgcacgatctcgtctacggccccgacgagcgccccgcgccgatgatcgcctgcgtcgccgcgctccagcatctgctcgcgatcctcgtgccgatcgtcacgcccggcctgctgatctgccaggcgctcggcgtatcgagccgcgacacgacgctgatcgtgtcgatgtcgctcgtgatctccggcatcgcgaccttcgtccagtgcaggcgcttcggcccgctcggcgcgggcctgctgatcgtccagggcacgagcttcaacttcgtcgggccgctgatcgcgggcggcagcctgatggtcaagcagggcacgccggtcgaaaccgtgatggccgcgatcttcggcgtcgtcatcgccggctcgttcgtcgagatggccgtgtcgcgcatcctgcctttcgtgaagcgcctgatcaccccgctcgtcaccggcgtcgtggtgctgctgatcggcctcacgctcatcaaggtcggcctcgtcagcatgggcggcggctatggcgcgatcgccaagggcagcttcggcagcgcccagaacctgacgctgtcggggctcgtgctcggcgccatcatcgtgctcaatcgcgtgcccatcgtctgggtgcgcagcaccgcactcgtcatcgcgctcgcgatcggctatctcgcggccgccgcgatgggccgtctcgatttcaccggcgcgcgcgaggccgcgctgttccagatcccgacgccgctgcacttcggcctgggcttctcgtgggcgctgttcatgccgatgctgatcatctatctcgtcacgtcgctcgaggcgatcggcgatgtcacggccacgagcaagatctcgcggcaacccgtcgaggggccgctgtggatgcggcgcatcaagggcggcgtgctcgtcaacggcgcgaactcgctgctcgccggcgtcttcaatacgttcccgagctcggtcttcgcgcagaacaacggcgtgatccagctcaccggcatcgcgagccgccatgtcggcatctggatcgcgggcatgctcgtgctgctcgggctcttccccgtcgtcgcgggcgtcctgcaagcggtacccgagcccgtgctcggcggcgcggcgatggtgatgttcggcgcggtggccgcgtccggcatcaatatcctcgccggcatccggctcgatcgccgcgcgctgctgatcatcgcggtgtcgctcgcgctcggcctgggcgtgtcgcaggtgccggagatcctgacgaacctgccgcacgcgctcgggaacgtgctcgaatcgggcgtcgcgacgggcggcatctgcgcgctcgtgatgaactggttcctgcccgagaagcaatga

SEQ ID NO: 2475 - protein, 462 aa, Burkholderia pseudomallei 668
MQPAPLARPASHGADAAESAHDLVYGPDERPAPMIACVAALQHLLAILVPIVTPGLLICQALGVSSRDTTLIVSMSLVISGIATFVQCRRFGPLGAGLLIVQGTSFNFVGPLIAGGSLMVKQGTPVETVMAAIFGVVIAGSFVEMAVSRILPFVKRLITPLVTGVVVLLIGLTLIKVGLVSMGGGYGAIAKGSFGSAQNLTLSGLVLGAIIVLNRVPIVWVRSTALVIALAIGYLAAAAMGRLDFTGAREAALFQIPTPLHFGLGFSWALFMPMLIIYLVTSLEAIGDVTATSKISRQPVEGPLWMRRIKGGVLVNGANSLLAGVFNTFPSSVFAQNNGVIQLTGIASRHVGIWIAGMLVLLGLFPVVAGVLQAVPEPVLGGAAMVMFGAVAASGINILAGIRLDRRALLIIAVSLALGLGVSQVPEILTNLPHALGNVLESGVATGGICALVMNWFLPEKQ

SEQ ID NO: 2476 - DNA, 1398 bp, Aeromonas salmonicida subsp. salmonicida A449
  CDS (1)..(1398): transl_table=11
atggaacaggctgccgccgcgcgcgcaaccagagaggcacatccccccagacgtgcccacagcgaactggtctatggcatagacgatgtcccccccctgccccagaccctgttcgccgccctgcagcatatgctcgccatgtttgtcgccatcatcactccgcccctcatcatcgccaacgccctcggcctccctgccgccgacacccgttatatcgtctccatgtcgctggtcatgtccggcatcgcctccttcatccagacccgccgcttcggccccatcggttccggcctgctctcggtacagggcaccagcttcaatttcctcggtcccatcatcgccagtggcctcgctctcaaacaggcagccatgcctaccgaggatctgctgggtaccctgtttggcaccatgctggtggccgccctcaccatggtggtgatgagccgcttcctccatctggtcaagcaggtgatcaccccgttggtaaccggcatagtggtgctgctgatcggcctgaccctgatcaaggtgggactcatcagcatgggtggcggttacgccgcgctctctgacggcagcttcgccagccacagcaacctctttctctccctgctggtgctgggtcttatcgtgctgctgcagcgcagccgcaacccctggctgcgcctctccgccatcatgatcgccatgctggtgggctatgcggcagcactgatactgggcaaggtcacggcccccaccttcgacggtcccctggtgatggtgccgatcccgctccactacgggctcggctttgactggcagctgtttgtgccgctggccatcatcttcgtggtgactgcgcttgaagccatcggcgacatgacggccacatcggacatctcgggggaaccgctgaaagggcccgtctacatggcgcggatcaaggggggcgtgctggccgatggcgccaactccatgctggcggcggtcttctccaccttccccatgtccacctttgcccagaacaacggcgtcatccagctgaccggggtggccagtcgccatgtcggcctctttatcgccgccatgctcgccctgctcggcctgttcccggcggtcgccagtctggtgcagcagatcccggaacccgtgctgggtggagccaccatcgtcatgttcggcaccatagccgcagccggggtgcgcatcatctcccgtgaggagctggacaggcgcgccctcatgatactggcagtgtcgctggccatgggactgggtgtggcacaggtgcctgaagtgctgcaacatctgccggagctggccaaaagcgtgctctcctatggcgttgccaccggtggcctcaccgccatcatcatgaacctgctgctgcccaaacgcggcatctctcatccatga

SEQ ID NO: 2477 - protein, 465 aa, Aeromonas salmonicida subsp. salmonicida A449
MEQAAAARATREAHPPRRAHSELVYGIDDVPPLPQTLFAALQHMLAMFVAIITPPLIIANALGLPAADTRYIVSMSLVMSGIASFIQTRRFGPIGSGLLSVQGTSFNFLGPIIASGLALKQAAMPTEDLLGTLFGTMLVAALTMVVMSRFLHLVKQVITPLVTGIVVLLIGLTLIKVGLISMGGGYAALSDGSFASHSNLFLSLLVLGLIVLLQRSRNPWLRLSAIMIAMLVGYAAALILGKVTAPTFDGPLVMVPIPLHYGLGFDWQLFVPLAIIFVVTALEAIGDMTATSDISGEPLKGPVYMARIKGGVLADGANSMLAAVFSTFPMSTFAQNNGVIQLTGVASRHVGLFIAAMLALLGLFPAVASLVQQIPEPVLGGATIVMFGTIAAAGVRIISREELDRRALMILAVSLAMGLGVAQVPEVLQHLPELAKSVLSYGVATGGLTAIIMNLLLPKRGISHP

SEQ ID NO: 2478 - DNA, 1395 bp, Enterobacter sp. 638
  CDS (1)..(1395): transl_table=11
atgtccgctaacgccatagagtctcaagatgcgcaaccgattgcgcagattcagcataacagtgaattaatctaccgcctcgaagatcgccccccgctggcgcagactctgttcgccgcctgtcagcatctgctggcgatgtttgtggcggtgatcaccccggcgctgctgatttgtcaggcgcttggactcccggcgcaggatacccagcacattatcagcatgtctctgttcgcttccggtgtggcctcgattattcagattaaagcctggggtccggtgggatcgggtttgctctccattcagggcaccagctttaactttgttgcaccgctgattatgggcggaacggcactcaaaaccggcggcgcggatgtccccacgatgatggcggcgctgttcggcacgctgatgctggcaagctgcacggaaatggttatctcccgcgtgctgcacatggcgcgccgcgttattacaccgctggtttccggcgtggtggtgatgattatcggcctgtcgctgattcaagtgggcctgacgtccatcggtggcggctacgcggcgatgagcgacaacacttttggcgcaccgaaaaatctgctgctcgcgggcgttgtgctggccatcattattctgcttaaccgtcagcgtaacccatacctgcgcgtggcttccctggtgatcgccatggccgccgggtatctgatggcgtgggcgctgggcatgttgccggaaaataccgcgtcaactaacagcccgttgattatggtgccaacgccgctctattacggcctgggcatcgactggaacctgctcctgccgctgatgctggtctttatgatcacctctctggaaaccatcggcgatatcacggcgacctctgacgtctccgagcagcccgtttctggcccggtttacatgaagcgtctgaaaggcggcgtgctggcgaacggtctgaattcattcgtctctgcggtgttcaatactttcccgaactcctgcttcggccagaacaacggcgtgatccagctgaccggcgtagccagccgctatgtgggctttgtggttgcgctgatgctgatcgtgctcggcctgttcccggcggtgagtggttttgtgcagcacattccggaaccggttctgggtggcgctacgcttgtgatgttcggcaccatcgcggcttctggcgtgcgtatcgtgtcgcgtgagcccctgaaccgccgcgcaatcatgattatcgcgctgtccctggccgtcggtctgggtgtgtctcagcagccgctgatcctgcagttcgcgccagattgggtgaaaaacctgctctcctccggcatcgccgcgggcggtattaccgctatcgttctgaacctcgttttcccgcctgaaaagaactga

SEQ ID NO: 2479 - protein, 464 aa, Enterobacter sp. 638
MSANAIESQDAQPIAQIQHNSELIYRLEDRPPLAQTLFAACQHLLAMFVAVITPALLICQALGLPAQDTQHIISMSLFASGVASIIQIKAWGPVGSGLLSIQGTSFNFVAPLIMGGTALKTGGADVPTMMAALFGTLMLASCTEMVISRVLHMARRVITPLVSGVVVMIIGLSLIQVGLTSIGGGYAAMSDNTFGAPKNLLLAGVVLAIIILLNRQRNPYLRVASLVIAMAAGYLMAWALGMLPENTASTNSPLIMVPTPLYYGLGIDWNLLLPLMLVFMITSLETIGDITATSDVSEQPVSGPVYMKRLKGGVLANGLNSFVSAVFNTFPNSCFGQNNGVIQLTGVASRYVGFVVALMLIVLGLFPAVSGFVQHIPEPVLGGATLVMFGTIAASGVRIVSREPLNRRAIMIIALSLAVGLGVSQQPLILQFAPDWVKNLLSSGIAAGGITAIVLNLVFPPEKN

SEQ ID NO: 2480 - DNA, 1503 bp, Pseudomonas mendocina ymp
  CDS (1)..(1503): transl_table=11
atgaccacagacagcaacacccaagcccccgctgcgccttccggcaatagcgacctgatctaccagctggacgacacgccagcgttcgccccagccatcttcgcggcgctgcagcatgtgctggccagcttcgtcggcatcatcacccccaccctgatcgtcggcagtgccctgggcctcggcgctcatgtgccgtatctggtgagcatggcgctgttcgtctccggcctcggcaccttcgttcaggccaagcgcatcggcccgatcggctccggcctgctgtgcctgcagggcaccagcttcggctttctcagcgtgatcctaagcgccggtttcatcgtcaaggggcgcggtgccagcgaggaggagatactcgccacgctgttcggcatctgcttctgcgccgccttcgtcgagatcgtcttcagccagttcatcaacaagctgcgcaaggtgatcaccccggtggtcaccggcaccatcatctgcctgatgggcctgtcgctgatcaaggtgggcatgaccgatctggccggcggctacggcgcagcggatctcggcgccctgcaccacctggccctcggcggcctggtactgggcaccatcgtcctgctcaaccgcgcctcctcgcaggtgttgcgcctgtcggcggtgatcatcgggctggccctgggcttcgcggtggcttggttcaccggccgggtggacttcgccaacatggccgaggtgccgctgatcagcgtgccgcagcctttcaagtacggcttcggcttcgactggatcgccttcgtgccgatcgccgtgatcttcctgatcaccccgctggaaaccgccggcgacctgaccgccaactcgatcatctccaaacagccggtcaaggggccgctgtacatgcgccggatcaagtccggggtgctggccgacggctgcaactcggcggtcgccgccatgttcaacagcctgccgatgaccaccttcagccagaacaacggggttatccagctcaccggcgtggccagccgtcacgtggccttctacatcgccggcatcctggtgctgctcggcctgttcccggcagtcggcgcggtgctgcaactgatgcccaagccggtactgggcggcgccaccctgatcatgttcggcaccgttgcggtggccggtatcaagatcctcagcgaagccggcctgcaccgccgcaacgtgctgatcgtggccatctcgctgggcatgggcctgggcgtggccggcgtgccggacgtgctgtcgcacatgcccgacgtgctgaagaacatcttcggctcgcccatcaccatcggcgccttcagtgccattctgctgaacatcttcctgcccgatgaagctcacgaagtggaggaagacgactacgatcccgaagcgcacctgcacaccgtgctgcagaaccgcgaggacgacgatcacatcgacgacagcagcctgaagaccctgagccgcgacctggccaccaccacgcgctccggctga

SEQ ID NO: 2481 - protein, 500 aa, Pseudomonas mendocina ymp
MTTDSNTQAPAAPSGNSDLIYQLDDTPAFAPAIFAALQHVLASFVGIITPTLIVGSALGLGAHVPYLVSMALFVSGLGTFVQAKRIGPIGSGLLCLQGTSFGFLSVILSAGFIVKGRGASEEEILATLFGICFCAAFVEIVFSQFINKLRKVITPVVTGTIICLMGLSLIKVGMTDLAGGYGAADLGALHHLALGGLVLGTIVLLNRASSQVLRLSAVIIGLALGFAVAWFTGRVDFANMAEVPLISVPQPFKYGFGFDWIAFVPIAVIFLITPLETAGDLTANSIISKQPVKGPLYMRRIKSGVLADGCNSAVAAMFNSLPMTTFSQNNGVIQLTGVASRHVAFYIAGILVLLGLFPAVGAVLQLMPKPVLGGATLIMFGTVAVAGIKILSEAGLHRRNVLIVAISLGMGLGVAGVPDVLSHMPDVLKNIFGSPITIGAFSAILLNIFLPDEAHEVEEDDYDPEAHLHTVLQNREDDDHIDDSSLKTLSRDLATTTRSG

SEQ ID NO: 2482 - DNA, 1377 bp, Pseudomonas mendocina ymp
  CDS (1)..(1377): transl_table=11
atgaccagtcaatcgcaacccagctccgaactgctctacggcctggacgaccgtccggcgccgctaccggccttcttcgccgccttgcagcatgtactcgcctgcttcgtcggcatcgtcacgccgacgctgatcatcggcggcgtgctcggcctgcatgagcagctgccctacctgatcagcatgggcctgatggtgtccggcgtcggcaccctgatccaggcgcgccggccgttcggtataggcgccgggatgatctgcgtgcagggcaccagcttcgccttcctcagcgccgtactggccgcggggttgatggtcaaggcacgcggcggcagcccggacgacatcctggcgatgatcttcggcgtgtgtttcttcggcgccttcatcgagatggtgctgagccgcttcatcggccacctgcagcgggtcatcacgccgctggtgaccggcatcgtcatcaccatcatcggcgtcagcctgatcaaggtcggcatcaccgatgtcggcggcggcgccaaggccgagaacttcggcgcaccgatcaacctggccctgggcgccctggtgctggtcaccatcatcgcgctcaaccgcctgcgcaacccctggctgcgcctgtcggcgatcatcatcggtctgctggtcggctcgctggccgcctggctcagcggcgtgctgatgcccaagccgctgcccgatctgccgctggtgagcctgccgatgccctttcgctacggcttcgacttcgactggatggccttcgtcccggtggcgctgatctacctgatcaccgccatcgaaaccaccggcgacctgaccgccaactgcatgatctccagacagccgatcaagggcccgcagtacctgcagcgaatcaggggcggagtgctgggcgacggcatcagctcgctgatcgccgcggtgttcaatacctttcccaacaccaccttcagccagaacaacggggtgatccagctctccggcgtggccagccggcacgtcggctattacatcggcgcgatcctggtgatcctcggcctgttccccgtgctcggcgcgattctccagcagatccccaagccggtgctgggcggcgctaccttggtgatgttcggcaccgtcgccgccgccggcattcgcatcctcgcccaggcgccgctggaccggcgcagcctgctgatcatggccaccagcttcggcatcggcctgggcgtttccagccagcccgagctgctcagccagatgccgaccctggtgcagaacctgttcggctcggcgatcaccagcggcggcctgactgccatcctcatgaccctgttgctgccgctggagcagcctgaggtcaccacctccgagcaggcccagagggtctga

SEQ ID NO: 2483 - protein, 458 aa, Pseudomonas mendocina ymp
MTSQSQPSSELLYGLDDRPAPLPAFFAALQHVLACFVGIVTPTLIIGGVLGLHEQLPYLISMGLMVSGVGTLIQARRPFGIGAGMICVQGTSFAFLSAVLAAGLMVKARGGSPDDILAMIFGVCFFGAFIEMVLSRFIGHLQRVITPLVTGIVITIIGVSLIKVGITDVGGGAKAENFGAPINLALGALVLVTIIALNRLRNPWLRLSAIIIGLLVGSLAAWLSGVLMPKPLPDLPLVSLPMPFRYGFDFDWMAFVPVALIYLITAIETTGDLTANCMISRQPIKGPQYLQRIRGGVLGDGISSLIAAVFNTFPNTTFSQNNGVIQLSGVASRHVGYYIGAILVILGLFPVLGAILQQIPKPVLGGATLVMFGTVAAAGIRILAQAPLDRRSLLIMATSFGIGLGVSSQPELLSQMPTLVQNLFGSAITSGGLTAILMTLLLPLEQPEVTTSEQAQRV

SEQ ID NO: 2484 - DNA, 1401 bp, Vibrio cholerae O395
  CDS (1)..(1401): transl_table=11
atgatacaaccgacttcacgtaaggcagatctggtctatcaactcaatgatcgtccccctttgcctcaaactctcttcgcagccttgcaacatctgctggcgatgtttgtcgccgtgatcaccccatcgctgatcatttgccaatcccttggtgtacctgccgatcaaaccaataccattatcagcatgtcactgtttgcttcgggtttgtcatccttcattcaaatccgtacctttggcccaattggctcaggtttgctttccattcaaggcaccagctttaactttttaggccccattattggtgctggacttgcgctcaaagcaggcggtgcagatatagagaccatgatggccgcgatttttggtacgattttggtcgcctcaagcgctgaaattttactgtcccgcgtgctgcaatttgcccagcgcgtgattacgccgttagtctctgggattgtggtgaccttgattggcctaacgctggtacaagtcggattgatttcgatgggtggcggttatgcggctatggctgacggcagctttggtagcctcgataagcttgcgctagctggcaccgtattggcgatcattgtgctgctgaaccgagcgcacaacccttacgtgcgagtggcttcgattgtgattgcgatgctggtaggttatgtaatggcgtacctgatgggcatggtcaataccgataacttggcacagactcaactcatcgcactgcctatcccgatgcaatatggcttagggtttgactggtcgctgtttattcctctggtgctgattttcctcatcacggcactagaagcgattggtgatatcacggcgacctccgaagtctctggtgagcccgtgaaaggccctgtgtatatgaagcgcatcaaaggcggcgtattggccgatggcctcaactctgcccttgccgcggtatttaacagctttccaaactccacctttagccaaaacaacggcgtgatcctattaaccggcgttgccagccgttatgtgggttactttatcgcgggcatgttggtgctacttggcctcttccccggcgttgcaagctttgtacagttgattcctgaacctgtgcttggcggcgcaacgattgtgatgtttggtacgattgctgcggcaggcgtgcgcattatctctcgcgtcgatttggatcgccgtgcgattctgatcatggcgctctccttctcaatgggtttgggaattgcgcaaaagccagagattctgcagtttatgccggaatttattaagaatctgttctcttcaggtgtagccgcaggtggtattaccgccatcgtgcttaacctgctgctgccagaagtacgccgagatgaaaacgccgcttcggttaccgaaacggcgcaagagtcaaactaa

SEQ ID NO: 2485 - protein, 466 aa, Vibrio cholerae O395
MIQPTSRKADLVYQLNDRPPLPQTLFAALQHLLAMFVAVITPSLIICQSLGVPADQTNTIISMSLFASGLSSFIQIRTFGPIGSGLLSIQGTSFNFLGPIIGAGLALKAGGADIETMMAAIFGTILVASSAEILLSRVLQFAQRVITPLVSGIVVTLIGLTLVQVGLISMGGGYAAMADGSFGSLDKLALAGTVLAIIVLLNRAHNPYVRVASIVIAMLVGYVMAYLMGMVNTDNLAQTQLIALPIPMQYGLGFDWSLFIPLVLIFLITALEAIGDITATSEVSGEPVKGPVYMKRIKGGVLADGLNSALAAVFNSFPNSTFSQNNGVILLTGVASRYVGYFIAGMLVLLGLFPGVASFVQLIPEPVLGGATIVMFGTIAAAGVRIISRVDLDRRAILIMALSFSMGLGIAQKPEILQFMPEFIKNLFSSGVAAGGITAIVLNLLLPEVRRDENAASVTETAQESN

SEQ ID NO: 2486 - DNA, 1380 bp, Pseudomonas putida F1
  CDS (1)..(1380): transl_table=11
atgagctcacacgaacacagcccaggcgcagcggcgcctgccaatgaactggtgcttggtctggaggacaagccacggctgttgatcggcctgttggcagccctgcagcacctgctggcgatcatcgtacctatcgtcacccctggcctgctgatctgccaggcgctgggcgtatctgcacgtgataccaatttgatcgtttcgatgtcgctggtgatctcgggtatcgccaccttcgtccagtgcaaacgcttcggcccatttggcgcggggctgctgatcgttcagggcaccagcttcaacttcgtcggcccgctgattgccggcggtgcgctgatggtcaagcaaggtacgccggttgagggcgtaatggcggccatttttggtgtggtaatcgcaggctcgttcgtcgagatgggcgtgtcgcgcatcctgcccttcgtcaaacgcctgatcaccccgctggtgactggcatcgtggtgttgatgatcggcctgacactgatcaaggtcggcctgatcagcatgggaggcggctttggtgccatggccaatggcacctttgccaatggcgaaaacctgctgatgtcgggcgtggtattggcgatcatcgtcgttctcaaccgtatcccggtggtgtggatgcgcagctgcgccatcgtcatcgccctcgcggtcggctatgcgctggccggtttcctgggccgcctggactttaccggcatgcacgaggccgcgctgttccaggtgccgacaccgctgcactttggcctgggcttctcgtgggcgctgttcattccgatgctggtgatctacctggtcacttcgctggaagccatcggtgacgttaccgccaccagcaaggtgtcgcgccagccggtcgaagggccggtgtggatgcagcggatcaaggggggcgtgctggtcaacggcgccaactcgctgctggccggtctgttcaacaccttccctagctcgatctttgcccagaacaacggggtgattcagctgaccggtattgccagccgtcatatcggtatgtggattgccgtaatgctggtgttgctgggtctgttcccgagtgttgccggggtgattcaggccgtgccggagccggtgctgggcggcgcggcgatggtcatgtttggcgcggttgcggcgtcgggtatcaatattctggccagcacccggctggaccgtcgggcgctgctgattattgcggtgtcgttggcgctggggctgggcgtggcgcaggtgccggaattcctggcgcacatgccggcggcgattcgcaacgtgctggagtcgggcgtggctaccggggggatttgtgcgctggtgctgaactggttcttgccggagggcaaggagcaggcttga

SEQ ID NO: 2487 - protein, 459 aa, Pseudomonas putida F1
MSSHEHSPGAAAPANELVLGLEDKPRLLIGLLAALQHLLAIIVPIVTPGLLICQALGVSARDTNLIVSMSLVISGIATFVQCKRFGPFGAGLLIVQGTSFNFVGPLIAGGALMVKQGTPVEGVMAAIFGVVIAGSFVEMGVSRILPFVKRLITPLVTGIVVLMIGLTLIKVGLISMGGGFGAMANGTFANGENLLMSGVVLAIIVVLNRIPVVWMRSCAIVIALAVGYALAGFLGRLDFTGMHEAALFQVPTPLHFGLGFSWALFIPMLVIYLVTSLEAIGDVTATSKVSRQPVEGPVWMQRIKGGVLVNGANSLLAGLFNTFPSSIFAQNNGVIQLTGIASRHIGMWIAVMLVLLGLFPSVAGVIQAVPEPVLGGAAMVMFGAVAASGINILASTRLDRRALLIIAVSLALGLGVAQVPEFLAHMPAAIRNVLESGVATGGICALVLNWFLPEGKEQA

SEQ ID NO: 2488 - DNA, 1332 bp, Bacteroides vulgatus ATCC 8482
  CDS (1)..(1332): transl_table=11
atgcaggaatctcaaaccgcccaatccaataccggactgatttacggattgaacgaccgcccccctgtacgagaggccatttttgctgccatacagcatttgcttgctatttttgtagccatcatcactccgcctcttatcatcgctggagcattaaaactggatttggaaaccaccagtttcctagtatccatgtctctctttgcctcaggtatttctacctttatccaatgcagacggataggaggcatcggcaccggtctcttatgtatccaaggaaccagtttttcatttatcggtcccatcatctcggcaggtatgctgggcggacttccactgattttcggcacttgcatcgtggcatcatctgtagagatggtcatcagccgcatcttaaaatatacccgtaaaataatcacccctctggtatcgggcattgtagtcactttgattggaatgagcctgataaaagtaggtatcacagcttgtggcgggggtgtttccgcccaaagcaacggcactttcggaagttttgagaatctaggtctagctctgctggtacttatcctcattatcctttttaatagaagttccaaccgctacctacgtatgagttccatcgttatcggtctgattataggatatttagttgcctggggactcggtagaattgatttctcggcagtacaaagttttggtggtttcaatattcccctcccatttaaatacggactggatttcgacttttccgcattcatagctttggggttagtattcttgataacagccatagaagcctatggagacattactgccaactcactgatatcaggagaacctgtagaaggaaaaacattcatcaaacgtgcttcgggaggaattttggcagacggattcaattcgatgatggcaggtattctcaactcttttccaaactccgttttcgcgcaaaataacggtatgatacaactgacaggagtagccagccgatatgtaggctattacattgcaggttttcttattctattaggattatttcccagtgtaggattaattttctccctaatgcccgaacctgtattgggaggcgctactttactgatgttcggaacagtagcttcagcaggcattcgtattatcgcagcacagaagatcaaccggaaagcaacattagtcatcgcacttagtttcgctttaggtttaagtgtagaaatggttcctgaaatactatgtcaatttccggaatcaataaagaatattttctcatccggcattacaacaggcggagtgactgccatcatttcaaatgcactgatacggatgaaagagtaa

SEQ ID NO: 2489 - protein, 443 aa, Bacteroides vulgatus ATCC 8482
MQESQTAQSNTGLIYGLNDRPPVREAIFAAIQHLLAIFVAIITPPLIIAGALKLDLETTSFLVSMSLFASGISTFIQCRRIGGIGTGLLCIQGTSFSFIGPIISAGMLGGLPLIFGTCIVASSVEMVISRILKYTRKIITPLVSGIVVTLIGMSLIKVGITACGGGVSAQSNGTFGSFENLGLALLVLILIILFNRSSNRYLRMSSIVIGLIIGYLVAWGLGRIDFSAVQSFGGFNIPLPFKYGLDFDFSAFIALGLVFLITAIEAYGDITANSLISGEPVEGKTFIKRASGGILADGFNSMMAGILNSFPNSVFAQNNGMIQLTGVASRYVGYYIAGFLILLGLFPSVGLIFSLMPEPVLGGATLLMFGTVASAGIRIIAAQKINRKATLVIALSFALGLSVEMVPEILCQFPESIKNIFSSGITTGGVTAIISNALIRMKE

SEQ ID NO: 2490 - DNA, 1326 bp, Parabacteroides distasonis ATCC 8503
  CDS (1)..(1326): transl_table=11
atggatacggatttgatttacgggatcgatgaccgtccgcctttgaaagagacgctttttgccgccatccagcatctactggctattttcgtggcgatcataacacctcccttgattatcgccggggcgctgaaactggatctggagacgaccggtttcttggtttccatggccctattcgcctccggggtatccacattcgttcaatgtcgtaaattaggaccggtcggggcggggctgctatgtatccaaggaaccagcttctcgtttatcggcccgattatcacggctggtttggcgggagggcttccccttattttcggcgtttgtatcgccgcctctccggtagagatgatcgtgagccgtacttttaagtatctgcgctcggtgattactcccttggtatcgggtatcgtggtgttgctcatcggcttgagcttgatcaaggtaggagtggtcgcttgcggcggggggtatacggctatggataacggtacgttcggtagtttgcgtaatattggggtagctgtgtgcgtcttgttgagtgtcttgttcttcaatcgttgtaagaacaagtacttgcggatgagttccatcgtactggggttgtgtatcggttatgcgatcgctttcgccatggggatggtggatatggaggctgtctcctcgcaaaacctgagagggtttaatatcccggttcctttcaaatatggattggattttaatatctcttcattcgtggcgatcgcattgatctatctgatcacggcgatcgaggctacgggggatattacggccaactcgatgatatcgggaaaatcgatcgagggagaagggtacctgaagcgagtctccggcggggtgctggcggatggggtgaactcgtttatctccggtgtttttaactctttcccgaactctatcttcgcccagaataacgggatcatccagctgacgggagtcgccagccggtacgtagggtattatatcgcaggtatgctgatcctgttgggattattcccggttgtcggcgttatcttctccttgatgcccgatccggtgctgggaggggctaccctgctgatgttcggtacggtggcggcggcaggtatccgtattatcgccgcccaagatatcaaccggaaggccacgttggtgttggcggttagtttgtccttggggctgggggtggagctgatgccggatattttaggggccgcccctcaggtgatccgtggcattttctcctccggtattacgacggggggcttgacggccattctggcgaatttatttatacgtgtaaaagaagatcaaacagaataa

SEQ ID NO: 2491 - protein, 441 aa, Parabacteroides distasonis ATCC 8503
MDTDLIYGIDDRPPLKETLFAAIQHLLAIFVAIITPPLIIAGALKLDLETTGFLVSMALFASGVSTFVQCRKLGPVGAGLLCIQGTSFSFIGPIITAGLAGGLPLIFGVCIAASPVEMIVSRTFKYLRSVITPLVSGIVVLLIGLSLIKVGVVACGGGYTAMDNGTFGSLRNIGVAVCVLLSVLFFNRCKNKYLRMSSIVLGLCIGYAIAFAMGMVDMEAVSSQNLRGFNIPVPFKYGLDFNISSFVAIALIYLITAIEATGDITANSMISGKSIEGEGYLKRVSGGVLADGVNSFISGVFNSFPNSIFAQNNGIIQLTGVASRYVGYYIAGMLILLGLFPVVGVIFSLMPDPVLGGATLLMFGTVAAAGIRIIAAQDINRKATLVLAVSLSLGLGVELMPDILGAAPQVIRGIFSSGITTGGLTAILANLFIRVKEDQTE

SEQ ID NO: 2492 - DNA, 1392 bp, Klebsiella pneumoniae subsp. pneumoniae MGH 78578
  CDS (1)..(1392): transl_table=11
atgtccgttaacaccgcagagtcagaaaatgcgcaaccggttgcgcataaaccagccagcgaattaatctaccgcctcgaagatcgcccgccgctaccgcaaaccctgttcgccgccttccagcacctgctggcgatgtttgtcgcggtgatcaccccggcgctgttaatctgccaggctctcggtctcccggcgcaagatacccaacatatcatcagcatgtcgctgttcgcctccggcgtcgcctctattattcagatcaaagcctggggcccggtcggctccggactgctctccatccagggcaccagcttcaactttgtcgccccgctgatcatgggcggtaccgccttgaaaaccggcggcgccgacgtccccaccatgatggccgccctcttcggcaccctgatgctggccagctgcaccgaaatggtcctctcccggatcctgcacctggcgcgccgtatcattaccccgctggtttccggcgtggtggtgatgattatcggcctgtcgctgattcaggtcggactgacctccatcggcggcggctacgcggcgatggccgaccacacctttggtgcgccgaaaaatctgctgctggcgggtatcgtgctggcgctgattattatcctcaaccgccagcgcaacccgtacctgcgcatcgcctcgctggtgatcgcgatggctgccggttatctggcggcgtggttcctcgatatgctgccggctaacaccgcgcctaccaacagcagcctgatcactatccctacgccgctctattacggcctgggcatcgactggagcctgctgctgccgctgatgctggtctttatgatcacctccctggaaacgatcggcgatatcaccgccacctccgacgtttctgaacaaccggtctccggcccgctgtatatgaaacgcctgaaaggcggcgtactggcgaacggcctgaactcatttgtttccgccgttttcaataccttcccgaactcctgcttcggccagaacaacggcgtgatccagctgaccggggtcgccagccgctacgtcggctttgtggtcgccctgatgctgatcgtcctcggcctgttcccggcggtgagcggcttcgtgcagcacatccctgagccggtgctcggcggcgccacgctggtgatgttcggcaccatcgccgcgtccggcgtgcgcatcgtctcccgtgaaccgctgaaccgtcgggcgatcctgattatcgctctgtcgctggcggtaggcctcggcgtgtcgcagcagccgctgatcctgcagttcgccccggactggctgaaaaacctgctttcctccgggattgccgccggcggtatcacggcgattgttctgaatttaattttcccgccagaaaaggcgtga

SEQ ID NO: 2493 - protein, 463 aa, Klebsiella pneumoniae subsp. pneumoniae MGH 78578
MSVNTAESENAQPVAHKPASELIYRLEDRPPLPQTLFAAFQHLLAMFVAVITPALLICQALGLPAQDTQHIISMSLFASGVASIIQIKAWGPVGSGLLSIQGTSFNFVAPLIMGGTALKTGGADVPTMMAALFGTLMLASCTEMVLSRILHLARRIITPLVSGVVVMIIGLSLIQVGLTSIGGGYAAMADHTFGAPKNLLLAGIVLALIIILNRQRNPYLRIASLVIAMAAGYLAAWFLDMLPANTAPTNSSLITIPTPLYYGLGIDWSLLLPLMLVFMITSLETIGDITATSDVSEQPVSGPLYMKRLKGGVLANGLNSFVSAVFNTFPNSCFGQNNGVIQLTGVASRYVGFVVALMLIVLGLFPAVSGFVQHIPEPVLGGATLVMFGTIAASGVRIVSREPLNRRAILIIALSLAVGLGVSQQPLILQFAPDWLKNLLSSGIAAGGITAIVLNLIFPPEKA

SEQ ID NO: 2494 - DNA, 1401 bp, Serratia proteamaculans 568
  CDS (1)..(1401): transl_table=11
atgaccctgccatccgccgagctcgatgccgcgcaaaaaacctctgccacaccccgtaacagcgagctgatttatcgcctggaagaccgcccacctctgccgcaaacgctgtttgccgccggtcagcacctgttggcaatgtttgttgcggtgatcaccccggcgctgttgatttgtcaggcgttagggttaccggcacaagatactcagcacattatcagcatgtcgctgtttgcctccggtctggcctctatcctgcaaattaaaacctggggaccggtcggttctggcctgctgtccattcagggcaccagctttaactttgtctcgccgctgattatgggcggtctggcgctgaaaaacggcggtgccgacgtgccgaccatgatggcagcgctatttggcacgctaatggtcgcctcctgcaccgaaatcctgttgtcgcgcgtccttcacctggcacgccgtattatcaccccgctggtctccggcattgtggtgatgattatcggtttatcgctgatccaggtcgggctgacctccatcggcggcggttatgctgcgatgaacgggggcagcttcggcgcccctaaaaacctgctgctggccggtgcggtattattggttatcattctgcttaaccgtcagcgcaacccctacctgcgcgttgcctcactggtgattgccatggcggtcggctatctgctggcctgggccatggatatgttgccgcaaagccaaccggctctcgagacggcagccatagtcatcccaacgccgctctattacggtctgggctttgactggaacctgctgttacctctgatgttgatctttatggtcacctcactggaaaccatcggcgatatcaccgccacctcggacgtgtcggaacagccggtcagcggtccgctgtatatgaagcgcctgaagggcggtgtgttggctaacggcctgaactcgatgttgtcggcagtattcaacaccttccccaactcctgctttggtcagaacaatggcgtgatccaactgaccggtgttgccagccgctatgtaggtttcgtggtggcgctgatgctgatcgtactggggctattcccggcggtggccggtttcgtacaacatattcccgagccggtcctgggcggtgcaaccctggtgatgttcggcaccatcgccgcatctggcgtgcgtatcgtgtctcgcgaacgactgaatcgccgcgcaatcatgattatggcgctgtctctggcggtgggtatgggcgtgtcgcaacagccgctgatcctgcagttcgcgccggactggctgaaaaccctgctttcctccggtattgctgccggtggcatcaccgctatcgtgttgaacctggtgttcccacacgaacacgaaaagccataa

SEQ ID NO: 2495 - protein, 466 aa, Serratia proteamaculans 568
MTLPSAELDAAQKTSATPRNSELIYRLEDRPPLPQTLFAAGQHLLAMFVAVITPALLICQALGLPAQDTQHIISMSLFASGLASILQIKTWGPVGSGLLSIQGTSFNFVSPLIMGGLALKNGGADVPTMMAALFGTLMVASCTEILLSRVLHLARRIITPLVSGIVVMIIGLSLIQVGLTSIGGGYAAMNGGSFGAPKNLLLAGAVLLVIILLNRQRNPYLRVASLVIAMAVGYLLAWAMDMLPQSQPALETAAIVIPTPLYYGLGFDWNLLLPLMLIFMVTSLETIGDITATSDVSEQPVSGPLYMKRLKGGVLANGLNSMLSAVFNTFPNSCFGQNNGVIQLTGVASRYVGFVVALMLIVLGLFPAVAGFVQHIPEPVLGGATLVMFGTIAASGVRIVSRERLNRRAIMIMALSLAVGMGVSQQPLILQFAPDWLKTLLSSGIAAGGITAIVLNLVFPHEHEKP

SEQ ID NO: 2496 - DNA, 1389 bp, Burkholderia multivorans ATCC 17616
  CDS (1)..(1389): transl_table=11
atgcaacccgcctcccacgcccaatccgcctcccacggcgccgacgatgcagaatcggcgcgcgacctcgtctacggcccgaacgaccgccctgcgccgatggtcgcgttcgtcgccgcgctccagcatctgctcgcgatcatcgtgccgatcgtcacgcccggcctgctgatctgccaggcgctcggcgtgtcgagccacgacacgacgctgatcgtctcgatgtcgctcgtcatctcgggcatcgcgaccttcgtccagtgcaaacgtttcggcccgctcggcgccgggctgctgatcgtccagggcacgagcttcaacttcgtcggcccgctgatcgcgggcggcagcctgattgtcaagcaaggcacgccggtcgagaccgtgatggccgcgattttcggcgtcgtgatcgcgggttcgttcgtcgaaatgggcgtgtcgcgcatcctgccgttcgtgaagcggctgatcacgccgctcgtcacgggcatcgtcgtgctgctgatcggcctcacgctgatcaaggtcgggctcatcagcatgggcggcggctacggcgcgatggcgaaaggcacattcgcgagcgcgcaaaacctgacgctgtcgtgcctcgtgctcggcacgatcatcctgctgaaccgcgtgcccgtcgtctgggtgcgcagcaccgcgctcgtcatcgcgctcgcgatcggctacgccgccgccgcgttcctcggccgcctcgacttcaccggcatgcatcaggccgccgtgttccaggtgccgacgccgctgcatttcgggatcggcttctcgtggtcgctgttcgtgccgatgctgatcatctacctcgtcacctcgctcgaggcgatcggcgacgtcacggccaccagcaagatctcgaaggagcccgtcgaaggcccggtgtggatgcagcggatcaagggcggcgtgctcgtgaacggcgcgaactcgctgctcgccggcgtgttcaacacgttcccgagctcggtgttcgcgcagaacaacggcgtgatccagatcacgggcgtcgcgagccgctacgtcggcatctggatcgcggcgatgctcgtcgtgctcggcctcttccccgtcgtcgccggcgcgctgcaggcggttccggaaccggtcctgggcggcgcggcgatggtgatgttcggcgcggtcgcggcctccggcatcaacatcctcgcgggcatccagctcgatcggcgcgcgctgctgatcatcgcggtgtcgctcgcgctcggtctcggcgtatcgcaggtgcccgacatcctgaacagcctgccgcacgcgctgaagaacgtgctggaatcgggcgtcgcgacgggcggcatctgcgcgctggtcatgaactggttcttgcctgagaagaagtaa

SEQ ID NO: 2497 - protein, 462 aa, Burkholderia multivorans ATCC 17616
MQPASHAQSASHGADDAESARDLVYGPNDRPAPMVAFVAALQHLLAIIVPIVTPGLLICQALGVSSHDTTLIVSMSLVISGIATFVQCKRFGPLGAGLLIVQGTSFNFVGPLIAGGSLIVKQGTPVETVMAAIFGVVIAGSFVEMGVSRILPFVKRLITPLVTGIVVLLIGLTLIKVGLISMGGGYGAMAKGTFASAQNLTLSCLVLGTIILLNRVPVVWVRSTALVIALAIGYAAAAFLGRLDFTGMHQAAVFQVPTPLHFGIGFSWSLFVPMLIIYLVTSLEAIGDVTATSKISKEPVEGPVWMQRIKGGVLVNGANSLLAGVFNTFPSSVFAQNNGVIQITGVASRYVGIWIAAMLVVLGLFPVVAGALQAVPEPVLGGAAMVMFGAVAASGINILAGIQLDRRALLIIAVSLALGLGVSQVPDILNSLPHALKNVLESGVATGGICALVMNWFLPEKK

SEQ ID NO: 2498 - DNA, 1392 bp, Neisseria meningitidis 053442
  CDS (1)..(1392): transl_table=11
atgagcggtcatatgggaaaaggggcggatgcgcctgatttggtgtacggtttggaggataggccgccgttcggtaatgcgctgttgagcgcggttacccatcttttggcgattttcgtgccgatgattacgcccgcgctgattgtgggcggcgcgctggaactgccggtggagatgacggcgtatctcgtgtcgatggcgatggttgcgtcgggtgtcggcacttatttgcaggtcaaccgcttcgggccggtcggttcggggatgctgtccatccagtcggtgaatttctcgttcgttaccgtcatgattgcgctgggcgcggggatgaaagagggcggtttgactaaggatgcgatgatttcgacgctcttgggcgtatcgtttgtcggcgcgtttttggtgtgtttctcggcgtggcttctgccgtatttgaaaaaagtgattacgccgacggtcagcggcgtggtcgtgatgctcattggtttgagtttggtacacgtcggcattaccgatttcggcggcggcttcggcgcgaaggcggacggcacgttcggctcgatggaaaacttggggctggcttcgctggtgttgctgattgtgttggtgttcaactgcatgaaaaacccgctgttgcgcatgagcggcattgcggtcgggctgattgccggctatatcgtcgcgctgtttttgggcaaggtggatttttccgcgctgcaaaacctgccgctggttacgctgcccgtaccgtttaaatacggttttgctttcgactggcacgcgtttattgtggcgggcgcgattttcttgttgagcgtgtttgaggcggtcggcgatttaaccgcgacggcaatggtgtccgaccagccgattgaaggcgaggaatacaccaaacgcctgcgcggcggcgtgttggctgacggcttggtgtcggtgattgcgacggctttgggttcgctgccgctgacgacgtttgcgcaaaacaacggcgtgattcagatgaccggcgtggcttcgcgccatgtgggcaaatatattgccgtgattttggtgctgttgggtctgttccccgttgtcggacgcgcgtttacgacgattccgagtccggtgttgggcggcgcgatggttttgatgttcggcttgattgcgattgcgggcgtgcggattttggtcagtcacggcatccgcaggcgcgaagcggtaattgcggcaacgtcggtcggtttgggcttgggtgtcgcgtttgagccggaagtgtttaaaaacctgcccgtcttgttccaaaactctatttccgccggcggcattacggcagtcttgctgaatttggtcttgcccgaagataaaaccgaggcggcggtcaagtttgataccgaccacttggaacactga

SEQ ID NO: 2499 - protein, 463 aa, Neisseria meningitidis 053442
MSGHMGKGADAPDLVYGLEDRPPFGNALLSAVTHLLAIFVPMITPALIVGGALELPVEMTAYLVSMAMVASGVGTYLQVNRFGPVGSGMLSIQSVNFSFVTVMIALGAGMKEGGLTKDAMISTLLGVSFVGAFLVCFSAWLLPYLKKVITPTVSGVVVMLIGLSLVHVGITDFGGGFGAKADGTFGSMENLGLASLVLLIVLVFNCMKNPLLRMSGIAVGLIAGYIVALFLGKVDFSALQNLPLVTLPVPFKYGFAFDWHAFIVAGAIFLLSVFEAVGDLTATAMVSDQPIEGEEYTKRLRGGVLADGLVSVIATALGSLPLTTFAQNNGVIQMTGVASRHVGKYIAVILVLLGLFPVVGRAFTTIPSPVLGGAMVLMFGLIAIAGVRILVSHGIRRREAVIAATSVGLGLGVAFEPEVFKNLPVLFQNSISAGGITAVLLNLVLPEDKTEAAVKFDTDHLEH

SEQ ID NO: 2500 - DNA, 1386 bp, Yersinia pestis Angola
  CDS (1)..(1386): transl_table=11
atgtctacgcaatctgccgaacttgatactgcaccgccatcaccggctcaccccagcgaattgatctaccacctagaagaccgaccgccactcccacaaacactgtttgccgcttgccagcatctcttggcgatgtttgttgcggtaatcacccccggtttattgatttgtcaggctttggggttacccgcagaagatactcaacgcattattagtatgtcgttatttgcttcgggcctagcgtctttactgcagattaaaacttggggccccgtgggttcaggcctgttatccattcaaggcaccagttttaactttgtttctccgttgattatgggggggctggcgctaaaaaacggtggggcagatatcccaacgatgatggcggcgctgttcggtacgttaatggttgcgtcctgcaccgagatcttactctcacatgtgctgcatctggcacgccgtattatcaccccgctggtatccggtattgtggtgatgattatcggcctgtcattgattcaagttgggctgacatctattggtggtggttatggtgcgatgagcgataacacctttggtgcaccgaaaaacttattattagccggtgccgtattgggggtgatcattctgcttaaccgccagcgtaacccgtatttacgtgttgcctctttggtgatcgctatggccgtgggttatctgctcgcctgggcattggggatgttgcctgagagccgcccagttgtagataccgcgctgattactattccaacgccgttgtactatgggctgtccttcgactggaacttactgattcctctgatgctgatctttatggtgacctcactggaaaccataggcgatattaccgcaacatctgatgtatcagagcaaccggttcgcggcccgttatatatgaaactcctaaaaggcggtgtactggccaatggtttgaactcgatgctgtccgctatattcaataccttccccaactcctgcttcggtcagaataatggcgtgatccaattgactggcgttgccagccgttatgtcggttttgttgtggcaataatgctcatcattttgggcctgttccctgctgtcgctgggtttgtgcagcatattcctgagccggtactgggtggagcaactctcgtgatgttcgggactatcgcagcgtctggtgtgcgtattgtgtcacgcgagaccctgaatcgccgggcgattatgataatggccttatcattagcggttggtatgggtgtcgcacagcagccattgattttgcaatttgcgcctgactggatcaaaacgctgttctcttctgggattgccgctggcggtattactgccatcgtacttaacttactcttcccacaagaaaaatag

SEQ ID NO: 2501 - protein, 461 aa, Yersinia pestis Angola
MSTQSAELDTAPPSPAHPSELIYHLEDRPPLPQTLFAACQHLLAMFVAVITPGLLICQALGLPAEDTQRIISMSLFASGLASLLQIKTWGPVGSGLLSIQGTSFNFVSPLIMGGLALKNGGADIPTMMAALFGTLMVASCTEILLSHVLHLARRIITPLVSGIVVMIIGLSLIQVGLTSIGGGYGAMSDNTFGAPKNLLLAGAVLGVIILLNRQRNPYLRVASLVIAMAVGYLLAWALGMLPESRPVVDTALITIPTPLYYGLSFDWNLLIPLMLIFMVTSLETIGDITATSDVSEQPVRGPLYMKLLKGGVLANGLNSMLSAIFNTFPNSCFGQNNGVIQLTGVASRYVGFVVAIMLIILGLFPAVAGFVQHIPEPVLGGATLVMFGTIAASGVRIVSRETLNRRAIMIMALSLAVGMGVAQQPLILQFAPDWIKTLFSSGIAAGGITAIVLNLLFPQEK

SEQ ID NO: 2502 - DNA, 1380 bp, Pseudomonas putida GB-1
  CDS (1)..(1380): transl_table=11
atgagctcacacgaacacagcccaggcgcagcggcgcctgccaatgaactggtgcttggccttgaggacaagccacggctgttgatcggcctgctggcagccctgcagcacctgctggcgatcattgtgccgatcgttacccctggcctgctgatctgccaggcgctgggcgtttcggcgcgtgataccaacctgatcgtttccatgtcgctggtgatctccggtattgccaccttcgtccagtgcaaacgcttcggcccatttggcgccgggctgctgatcgttcagggcaccagcttcaatttcgtaggcccgctgattgccggcggcgcgctgatggtcaagcaaggcacgcccgttgaaggggtgatggcggccatttttggtgtggtgattgcgggctcgttcgtcgagatgggggtgtcgcgcattctgcccttcgtcaaacgcctgatcaccccgctggtgacgggcatcgtcgtgctgatgatcggcctgaccttgatcaaggtaggcctgataagcatgggtggcggctttggtgccatggccaacggtaccttcgccaatggcgaaaacctgctgctgtcgggcgtggtgctggcgattatcgtgatccttaaccgcattcccgtggtgtggatgcgcagttgtgccatcgtcatcgccctggcggtcggctacgcgctggccggctatatgggccgcctggacttcactggcatgcacgaggccgcgctgttccaggtgccgacgccgctgcacttcggcctgagcttttcctgggcgctgttcattccgatgctggtgatttacctggtcacttcgctggaagccattggtgacgtgaccgccaccagcaaggtgtcgcgccagccggtcgaagggccggtatggatgcagcggatcaagggcggtgtactggtcaacggcgccaactcgctgctggccggcttgttcaacaccttccctagttcgatctttgcccagaacaacggggtaattcagctgaccgggattgccagccgccatatcggtatgtggattgccgtgatgctggtgctgctggggctgttccccagcgttgccggggtgatccaggcggtgccagagccggtgctgggtggcgcggccatggtgatgttcggggcggttgcggcttcgggcatcaacattctggccagcacccggctggatcgtcgcgcgctgctgatcattgccgtgtcgttggcactgggcctgggtgtggcgcaggtgccggagttcctggcgcacatgccggcggcgattcgcaatgtgctggagtcgggtgtggccaccggggggatctgtgccctggtgctgaactggttcttgccggaaagcaaggaacaggcgtaa

SEQ ID NO: 2503 - protein, 459 aa, Pseudomonas putida GB-1
MSSHEHSPGAAAPANELVLGLEDKPRLLIGLLAALQHLLAIIVPIVTPGLLICQALGVSARDTNLIVSMSLVISGIATFVQCKRFGPFGAGLLIVQGTSFNFVGPLIAGGALMVKQGTPVEGVMAAIFGVVIAGSFVEMGVSRILPFVKRLITPLVTGIVVLMIGLTLIKVGLISMGGGFGAMANGTFANGENLLLSGVVLAIIVILNRIPVVWMRSCAIVIALAVGYALAGYMGRLDFTGMHEAALFQVPTPLHFGLSFSWALFIPMLVIYLVTSLEAIGDVTATSKVSRQPVEGPVWMQRIKGGVLVNGANSLLAGLFNTFPSSIFAQNNGVIQLTGIASRHIGMWIAVMLVLLGLFPSVAGVIQAVPEPVLGGAAMVMFGAVAASGINILASTRLDRRALLIIAVSLALGLGVAQVPEFLAHMPAAIRNVLESGVATGGICALVLNWFLPESKEQA

SEQ ID NO: 2504 - DNA, 1449 bp, Unknown
  Unidentified
  CDS (1)..(1449)
atggacaatacccaatctaccagtatcgagttagcctacggccttgatagcaaaccgcccttcttatcatcactatttgccgctatgcagcatttgctcgccatgattgttggtgtggcgacaccgccaattctaattggtagtgcactcaatctaagtcctgagaatgtcacctacttagtgagtatgtcactatttatgtcaggcattggtacctttgtgcaggtaaagcgtcttggtgggtttattggctcaggtctactgacagttcaggccacaagctttgcctatcctgcaacaattatctcaatcggcacctcatttttggctgcgggtatgagccaagatcagatgttgagcaccatctttggggtgctatttgcaggctcatttgtcactatatttgccagccgcttattgccaatgctacgtaaagtcatatcgccgacagtctctggcatcacagtgatgttgataggcatatctttagttgaagtcgggatgacagactttgctggcggctatgccagtaaacttgacggctcattcggctctatagaaaatctgatgctaggctttatagtacttgtcagtattttacttttcttccgtagccgcagtcagtatgtcaggatgagcgccatcatcttgggtatggcccttggctatttagtcgcgctctatatgggaaaaaccgattttagcgctttttccaatgtacctctgtataacataccagcccccttcaagttcggtctgtttcaaatagattggcaagctttctttcttattggttttgtctatctagtcgtgattattgaagccgttggtgcgttaactgcgacttgtatgctttgtaacagacccctaatgggcaaagaatacaatcaaaggatctccggaggggtacttgcagatggcgtggtctccgctatcgcatcggtttttaacgcatttcctctgactgcatttagccagaacaatggcgtgattcagatgactggcgtggccagtcgtaaggttggactatttgttgcaacgctgctgattatcttcggcctatttccggtgatttctatcatttttacctcattgcctaagcctattttaggcggggcgacattaatcctatttggtacagtggccgctgcaggaataggaattatcacccaagttaaacttgatcgccgtgaaagtatgattatttcggtctctattggggtcgcattaggcgcagcgtttgtacctgatgcaatttctctgcttccgcctatgctgcaaaaaatgcttggaacaccagcgattgctggaggtttgactgcgctaatggttaacctacttctgccgcgtccagttcctgagacaatacgtaaagccgaatctgtgcgtaaggtgaaagcaaaatttgatgcttcatcccaagataaaaaaaaatcagctacagagtag

SEQ ID NO: 2505 - protein, 482 aa, Unknown
  Unidentified
MDNTQSTSIELAYGLDSKPPFLSSLFAAMQHLLAMIVGVATPPILIGSALNLSPENVTYLVSMSLFMSGIGTFVQVKRLGGFIGSGLLTVQATSFAYPATIISIGTSFLAAGMSQDQMLSTIFGVLFAGSFVTIFASRLLPMLRKVISPTVSGITVMLIGISLVEVGMTDFAGGYASKLDGSFGSIENLMLGFIVLVSILLFFRSRSQYVRMSAIILGMALGYLVALYMGKTDFSAFSNVPLYNIPAPFKFGLFQIDWQAFFLIGFVYLVVIIEAVGALTATCMLCNRPLMGKEYNQRISGGVLADGVVSAIASVFNAFPLTAFSQNNGVIQMTGVASRKVGLFVATLLIIFGLFPVISIIFTSLPKPILGGATLILFGTVAAAGIGIITQVKLDRRESMIISVSIGVALGAAFVPDAISLLPPMLQKMLGTPAIAGGLTALMVNLLLPRPVPETIRKAESVRKVKAKFDASSQDKKKSATE

SEQ ID NO: 2506 - DNA, 1419 bp, Yersinia pseudotuberculosis YPIII
  CDS (1)..(1419): transl_table=11
atgccccctttgccgatctggaaataccacgccatgtctacgcaatctgccgaacttgatactgcaccgccatcaccggctcgccccagcgaattgatctaccacctagaagaccgaccgccactcccacaaacactgtttgccgcttgccagcatctcttggcgatgtttgttgcggtaatcacccccggtttattgatttgtcaggctttggggttacccgcagaagatactcaacgcattattagtatgtcgttatttgcttcgggcctagcgtctttactgcagattaaaacttggggccccgtgggttcaggcctgttatccattcaaggcaccagttttaactttgtttctccgttgattatgggggggctggcgctaaaaaacggtggggcagatatcccaacgatgatggcggcgctgttcggtacgttaatggttgcgtcctgcaccgagatcttactctcacgtgtgctgcatctggcacgccgtattatcaccccgctggtatccggtattgtggtgatgattatcggcctgtcattgattcaagttgggctgacatctattggtggtggttatggtgcgatgagcgataacacctttggtgcaccgaaaaacttattattagccggtgccgtattgggggtgatcattctgcttaaccgccagcgtaacccgtatttacgtgttgcctctttggttatcgctatggccgtgggttatctgctcgcctgggcattggggatgttgcctgagagccgcccagttgtagataccgcgctgattactattccaacgccgttgtactatgggctgtccttcgactggaacttactgattcctctgatgctgatctttatggtgacctcactggaaaccataggcgatattaccgcaacatctgatgtatcagagcaaccggttcgcggcccgttatatatgaaacgcctaaaaggcggtgtactggccaatggtttgaactcgatgctgtccgctatattcaataccttccccaactcctgcttcggtcagaataatggcgtgatccaattgaccggcgttgccagccgttatgtcggttttgttgtggcaataatgctcatcattttgggcctgttccctgctgtcgctgggtttgtgcagcatattcctgagccggtactgggtggagcaactctcgtgatgttcgggactatcgcagcgtctggagtgcgtattgtgtcacgcgagaccctgaatcgccgggcgattatgataatggccttatcattagcggttggtatgggtgtcgcacagcagccattgattttgcaatttgcgcctgactggatcaaaacgctgttctcttctgggattgccgctggcggtattactgccatcgtacttaacttactcttcccacaagaaaaatag

SEQ ID NO: 2507 - protein, 472 aa, Yersinia pseudotuberculosis YPIII
MPPLPIWKYHAMSTQSAELDTAPPSPARPSELIYHLEDRPPLPQTLFAACQHLLAMFVAVITPGLLICQALGLPAEDTQRIISMSLFASGLASLLQIKTWGPVGSGLLSIQGTSFNFVSPLIMGGLALKNGGADIPTMMAALFGTLMVASCTEILLSRVLHLARRIITPLVSGIVVMIIGLSLIQVGLTSIGGGYGAMSDNTFGAPKNLLLAGAVLGVIILLNRQRNPYLRVASLVIAMAVGYLLAWALGMLPESRPVVDTALITIPTPLYYGLSFDWNLLIPLMLIFMVTSLETIGDITATSDVSEQPVRGPLYMKRLKGGVLANGLNSMLSAIFNTFPNSCFGQNNGVIQLTGVASRYVGFVVAIMLIILGLFPAVAGFVQHIPEPVLGGATLVMFGTIAASGVRIVSRETLNRRAIMIMALSLAVGMGVAQQPLILQFAPDWIKTLFSSGIAAGGITAIVLNLLFPQEK

SEQ ID NO: 2508 - DNA, 1401 bp, Escherichia coli SMS-3-5
  CDS (1)..(1401): transl_table=11
atgtctgatataaaccatgcaggttctgaccttatatttgaactggaggatcgccctccctttcatcaggctctcgttggtgccattacccatctgttggcaattttcgttccgatggtaacccccgcgttaatcgtgggtgcggccttacagctttccgctgaaacaactgcctatcttgtttcaatggcgatgatcgcctctggtattggtacctggttacaagtaaaccgctatggcatcgtcggttctggcctactctcaattcagtcagtcaatttttcatttgttacggtcatgattgcgctgggcagcagcatgaaaagcgacggttttcacgaagagttaatcatgtcgtcgctcctcggcgtctccttcgttggcgcatttctggttgtcggctcttcttttatcctgccctatttacgtcgggttattacgcctaccgtcagcggcattgtggtgctgatgatcggcttaagcctgattaaagtcggcattatcgattttggtggaggatttgcagccaaaagcagcggtacattcggcaattacgaacatctcggcgttggtttattggttttgattgtggtgatcggctttaactgctgtagcagtccgttgctacgcatgggagggatcgccattgggctatgtgtcggctatatcgcatcgttatgcctgggcatggtggatttcagcagtatgcgcaatttgccgttaatcaccatcccacatccgttcaaatacggctttagttttagcttccatcagttcctggtggttggcacgatttatctgcttagcgtgctggaagctgtcggcgatatcaccgccacggcaatggtttcccgccgccccattcagggggaagagtatcagtcccgactgaaaggcggcgtgctggcagacggtctggtttctgttatcgcctccgctgtcggatcattacccttaaccacgtttgcgcaaaataatggggttattcagatgactggcgtcgcttcacgttatgtcgggcgaaccatcgcggtaatgctggttatcctcggcttatttccgatgattggcggcttcttcacgaccattccctcggcagttctgggaggcgcaatgacgttgatgttttccatgattgccatcgcagggattcgcatcatcatcaccaacggtttaaagcgccgagaaacacttattgtcgccacttctttaggtttagggcttggcgtctcctacgatcccgaaatttttaaaatattgccagcctctatttatgtactagttgaaaaccctatttgtgctggcgggttaactgcgattttattaaatattatcctccctggtggctaccgacaggaaaacgttctgcctggtattacctcagcggaagagatggattaa

SEQ ID NO: 2509 - protein, 466 aa, Escherichia coli SMS-3-5
MSDINHAGSDLIFELEDRPPFHQALVGAITHLLAIFVPMVTPALIVGAALQLSAETTAYLVSMAMIASGIGTWLQVNRYGIVGSGLLSIQSVNFSFVTVMIALGSSMKSDGFHEELIMSSLLGVSFVGAFLVVGSSFILPYLRRVITPTVSGIVVLMIGLSLIKVGIIDFGGGFAAKSSGTFGNYEHLGVGLLVLIVVIGFNCCSSPLLRMGGIAIGLCVGYIASLCLGMVDFSSMRNLPLITIPHPFKYGFSFSFHQFLVVGTIYLLSVLEAVGDITATAMVSRRPIQGEEYQSRLKGGVLADGLVSVIASAVGSLPLTTFAQNNGVIQMTGVASRYVGRTIAVMLVILGLFPMIGGFFTTIPSAVLGGAMTLMFSMIAIAGIRIIITNGLKRRETLIVATSLGLGLGVSYDPEIFKILPASIYVLVENPICAGGLTAILLNIILPGGYRQENVLPGITSAEEMD

SEQ ID NO: 2510 - DNA, 1392 bp, Escherichia coli SMS-3-5
  CDS (1)..(1392): transl_table=11
atgtctgtttccaccctcgagtcagaaaatgcgcaaccggttgcgcagactcaaaacagcgaactgatttaccgtcttgaagatcgtccgccgcttcctcaaaccctgtttgccgcatgtcagcatttgctggcgatgttcgttgcggtgatcacgccagcgctattaatctgccaggcgctgggtttaccggcacaagacacgcaacacattattagtatgtcgctgtttgcctccggtgtggcatcgattattcaaattaaggcctggggtccggttggctccgggttgttgtctattcagggcaccagcttcaactttgttgctccgctgattatgggcggcacagcgctgaagaccggtggtgctgatgttcctaccatgatggcggctttgttcggcacgttgatgctggcaagttgtaccgagatggtgatctcccgcgttctgcatctggcgcgccgcattattacgccgctggtttctggcgttgtggtgatgattatcggcctgtcgctaattcaggtggggctgacctccattggcggcggttacgcagccatgagcgataacaccttcggcgcaccgaaaaatctgctgctggcaggcgtggtcttagccttaattatcctgcttaaccgtcaacgtaacccttacttacgcgtggcctcactggtgattgcgatggcggccggatatgcgctggcgtggtttatggacatgttgccagaaagcaacgaaccgatgacgcaagaactgattatggtgccaacgccgctctattacggtcttggcattgaatggagtctgctgctgccgctgatgctggtctttatgatcacttcgctggaaaccattggcgatatcacggcgacctctgacgtttccgaacagccggtttccggtccgctgtacatgaaacgcctgaaaggcggcgtgctggcaaacggcctgaactcgtttgtctcggcggtatttaataccttcccgaactcctgcttcgggcagaacaacggggtgatccagttaaccggtgttgccagccgctatgtcggttttgtcgtcgcgctgatgttgatcgtgctgggtctgttcccggcagtgagcggttttgtgcaacacattccagaaccggttctgggcggcgcaacgcttgtaatgtttggcaccatcgctgcctccggtgtgcgcattgtgtctcgtgagccgctgaaccgtcgggcgattctgattatcgcgctgtcgctggcggttggtctgggcgtgtctcagcagccgctgattttgcagtttgcccctgaatggctgaaaaacctgctctcctccgggatcgccgcgggcggtattactgccatcgtgctgaatctgattttcccaccagaaaaacagtaa

SEQ ID NO: 2511 - protein, 463 aa, Escherichia coli SMS-3-5
MSVSTLESENAQPVAQTQNSELIYRLEDRPPLPQTLFAACQHLLAMFVAVITPALLICQALGLPAQDTQHIISMSLFASGVASIIQIKAWGPVGSGLLSIQGTSFNFVAPLIMGGTALKTGGADVPTMMAALFGTLMLASCTEMVISRVLHLARRIITPLVSGVVVMIIGLSLIQVGLTSIGGGYAAMSDNTFGAPKNLLLAGVVLALIILLNRQRNPYLRVASLVIAMAAGYALAWFMDMLPESNEPMTQELIMVPTPLYYGLGIEWSLLLPLMLVFMITSLETIGDITATSDVSEQPVSGPLYMKRLKGGVLANGLNSFVSAVFNTFPNSCFGQNNGVIQLTGVASRYVGFVVALMLIVLGLFPAVSGFVQHIPEPVLGGATLVMFGTIAASGVRIVSREPLNRRAILIIALSLAVGLGVSQQPLILQFAPEWLKNLLSSGIAAGGITAIVLNLIFPPEKQ

SEQ ID NO: 2512 - DNA, 1380 bp, Pseudomonas putida W619
  CDS (1)..(1380): transl_table=11
atgagctcacacgaacacagcccgggcgcggatgcgcctgccaacgaactggtgcttggcctcgaggacaagccacggctgcttatcggcctgctggcggcgctgcagcacctgctggcgatcatcgtgccgatcgtgaccccgggcctgctgatctgccaggcgctgggtgtttcggcgcgtgataccaacctgatcgtgtcgatgtcgctggttatctcgggtatcgccaccttcgtgcagtgcaagcggtttgggccgtttggcgcgggcttgctgatcgtgcagggcaccagcttcaactttgtcggcccactgattgccggcggtgcgctgatggtcaagcagggcacgcctgtcgaaagcgtgatggcagcgattttcggcgtggtgatcgccggctcgttcgtcgagatgggcgtgtcgcgcatcctgcccttcgtcaaacgtctgatcacgccgttagtgacgggcattgtggtgctgatgatcggcctgaccctgatcaaggtcggtttgatcagcatgggcggcggctttggcgccatggccaatggcaccttcgccaatggcgaaaacctgctgctgtcgggcgtggtgctggcaatcatcgtagtcctgaaccgcattccggtggtgtggatgcgcagctgcgccatcgtcatcgccctggcggtgggttatgccctggcgggttacctcggccggctggacttcaccggcatgcatgaagctgcactgttccaggtaccgacgccgctgcactttggcctcggtttctcgtgggcgctgttcatcccgatgctggtgatctacctggtgacctcgctcgaagccatcggcgacattacagccaccagcaaggtctcgcgccaaccggtcgaaggcccggtgtggatgcagcgcatcaagggcggcgtgctggtcaacggcgccaactcgctgctggcaggcctgttcaacaccttccccagctcgatcttcgcgcagaacaacggggtcattcagctgaccggcatcgccagccgccacatcggtatctggattgccgtgatgctggtggtactgggcttgttcccgagtgttgccggcgtgattcaggctgtgcctgagcctgtgctgggcggcgcggccatggtcatgttcggtgccgtggccgcttcgggcatcaacattctggccagcacgcgtctggaccgccgtgcactgctgatcatcgccgtgtcgttggcgttgggcttgggcgtggcccaggtgccggagttcctggcgcacatgccggcggccattcgtaacgtactggagtcgggcgttgccaccggtggcatctgcgccctggtgctgaactggttcctgccagagagcaaggaacacgcctga

SEQ ID NO: 2513 - protein, 459 aa, Pseudomonas putida W619
MSSHEHSPGADAPANELVLGLEDKPRLLIGLLAALQHLLAIIVPIVTPGLLICQALGVSARDTNLIVSMSLVISGIATFVQCKRFGPFGAGLLIVQGTSFNFVGPLIAGGALMVKQGTPVESVMAAIFGVVIAGSFVEMGVSRILPFVKRLITPLVTGIVVLMIGLTLIKVGLISMGGGFGAMANGTFANGENLLLSGVVLAIIVVLNRIPVVWMRSCAIVIALAVGYALAGYLGRLDFTGMHEAALFQVPTPLHFGLGFSWALFIPMLVIYLVTSLEAIGDITATSKVSRQPVEGPVWMQRIKGGVLVNGANSLLAGLFNTFPSSIFAQNNGVIQLTGIASRHIGIWIAVMLVVLGLFPSVAGVIQAVPEPVLGGAAMVMFGAVAASGINILASTRLDRRALLIIAVSLALGLGVAQVPEFLAHMPAAIRNVLESGVATGGICALVLNWFLPESKEHA

SEQ ID NO: 2514 - DNA, 1419 bp, Yersinia pseudotuberculosis PB1/+
  CDS (1)..(1419): transl_table=11
atgccccctttgccgatctggaaataccacgccatgtctacgcaatctgccgaacttgatactgcacagccatcaccggctcgccccagcgaattgatctaccacctagaagaccgaccgccactcccacaaacactgtttgccgcttgccagcatctcttggcgatgtttgttgcggtaatcacccccggtttattgatttgtcaggctttggggttacccgcagaagatactcaacgcattattagtatgtcgttatttgcttcgggcctagcgtctttactgcagattaaaacttggggccccgtgggttcaggcctgttatccattcaaggcaccagttttaactttgtttctccgttgattatgggggggctggcgctaaaaaacggtggggcggatatcccaacgatgatggcggcgctgttcggtacgttaatggttgcgtcctgcaccgagatcttactctcacgtgtgctgcatctggcacgccgtattatcaccccgctggtatccggtattgtggtgatgattatcggcctgtcattgattcaagttgggctgacatctattggtggtggttatggtgcgatgagcgataacacctttggtgcaccgaaaaacttattattagccggtgccgtattgggggtgatcattctgcttaaccgccagcgtaacccgtatttacgtgttgcctctttggttatcgctatggccgtgggttatctgctcgcctgggcattggggatgttgcctgagagccgcccagttgtagataccgcgctgattactattccaacgccgttgtactatgggctgtccttcgactggaacttactgattcctctgatgctgatctttatggtgacctcactggaaaccataggcgatattaccgcaacatctgatgtatcagagcaaccggttcgcggcccgttatatatgaaacgcctaaaaggcggtgtactggccaatggtttgaactcgatgctgtccgctatattcaataccttccccaactcctgcttcggtcagaataatggcgtgatccaattgaccggcgttgccagccgttatgtcggttttgttgtggcaataatgctcatcattctgggcctgttccctgctgtcgctgggtttgtgcagcatattcctgagccggtactgggtggagcaactctcgtgatgttcgggactatcgcagcgtctggagtgcgtattgtgtcacgcgagaccctgaatcgccgggcgattatgataatggccttatcattagcggttggtatgggtgtcgcacagcagccattgattttgcaatttgcgcctgactggatcaaaacgctgttctcttctgggattgccgctggcggtattactgccatcgtacttaacttactcttcccacaagaaaaatag

SEQ ID NO: 2515 - protein, 472 aa, Yersinia pseudotuberculosis PB1/+
MPPLPIWKYHAMSTQSAELDTAQPSPARPSELIYHLEDRPPLPQTLFAACQHLLAMFVAVITPGLLICQALGLPAEDTQRIISMSLFASGLASLLQIKTWGPVGSGLLSIQGTSFNFVSPLIMGGLALKNGGADIPTMMAALFGTLMVASCTEILLSRVLHLARRIITPLVSGIVVMIIGLSLIQVGLTSIGGGYGAMSDNTFGAPKNLLLAGAVLGVIILLNRQRNPYLRVASLVIAMAVGYLLAWALGMLPESRPVVDTALITIPTPLYYGLSFDWNLLIPLMLIFMVTSLETIGDITATSDVSEQPVRGPLYMKRLKGGVLANGLNSMLSAIFNTFPNSCFGQNNGVIQLTGVASRYVGFVVAIMLIILGLFPAVAGFVQHIPEPVLGGATLVMFGTIAASGVRIVSRETLNRRAIMIMALSLAVGMGVAQQPLILQFAPDWIKTLFSSGIAAGGITAIVLNLLFPQEK

SEQ ID NO: 2516 - DNA, 1392 bp, Shigella boydii CDC 3083-94
  CDS (1)..(1392): transl_table=11
atgtctgtttccaccctcgagtcagaaaatgcgcaaccggttgcgcagactcaaaacagcgaactgatttaccgtcttgaagatcgtccgccgcttcctcaaaccctgtttgccgcctgtcagcatctgctggcgatgttcgttgcggtgatcacgccagcgctattaatctgccaggcgctgggtttaccggcacaagacacgcaacacattattagtatgtcgctgtttgcctccggtgtggcatcgattattcaaattaaggcctggggtccggttggctccgggctgttgtctattcagggcaccagcttcaactttgttgccccgctgattatgggcggtaccgcgctgaaaaccggtggtgctgatgttcctaccatgatggcggctttgttcggcacgttgatgctggcaagttgcaccgagatggtgatctcccgcgttctgcatctggcgcgccgcattattacgccgctggtttctggcgttgtggtgatgattatcggcctgtcgctaattcaggttgggttaacgtccattggcggcggttacgcagccatgagcgataacaccttcggcgcaccgaaaaatctgctgctggcaggcgtggtcttagccttaattatcctgcttaaccgtcaacgtaacccttacttacgcgtggcctcactggtgattgcgatggcggccggatatgcgctggcgtggtttatgggcatgttgccagaaagcaacgaaccgatgacgcaagaactgattatggtgccaacgccgctctattacggtcttggcattgaatggagtctgctgctgccgctgatgctggtctttatgatcacttcgctggaaaccattggcgatatcacgtcgacctctgacgtttccgaacagccagtgtccggtccgctgtacatgaaacgcctgaaaggcggcgtgctggcaaacggcctgaactcgtttgtttcggcggtgtttaacaccttcccgaactcctgcttcgggcaaaacaacggagtgatccagttgactggtgttgccagccgctatgtcggttttgtcgtcgcgctgatgttgatcgtgctgggtctgttcccggcagtgagcggttttgtacaacacattccagaaccggttctgggcggcgcaacgcttgtaatgtttggcaccatcgccgcctccggtgtgcgtatcgtttctcgtgagccgctgaaccgtcgggcgattctgattatcgcgctgtcgctggcggttggtctgggcgtgtctcagcagccgctgattttgcagtttgcccctgaatggctgaaaaacctgctctcctccgggatcgccgcgggcggtattactgccatcgtgctgaatctgattttcccaccagaaaaacagtaa

SEQ ID NO: 2517 - protein, 463 aa, Shigella boydii CDC 3083-94
MSVSTLESENAQPVAQTQNSELIYRLEDRPPLPQTLFAACQHLLAMFVAVITPALLICQALGLPAQDTQHIISMSLFASGVASIIQIKAWGPVGSGLLSIQGTSFNFVAPLIMGGTALKTGGADVPTMMAALFGTLMLASCTEMVISRVLHLARRIITPLVSGVVVMIIGLSLIQVGLTSIGGGYAAMSDNTFGAPKNLLLAGVVLALIILLNRQRNPYLRVASLVIAMAAGYALAWFMGMLPESNEPMTQELIMVPTPLYYGLGIEWSLLLPLMLVFMITSLETIGDITSTSDVSEQPVSGPLYMKRLKGGVLANGLNSFVSAVFNTFPNSCFGQNNGVIQLTGVASRYVGFVVALMLIVLGLFPAVSGFVQHIPEPVLGGATLVMFGTIAASGVRIVSREPLNRRAILIIALSLAVGLGVSQQPLILQFAPEWLKNLLSSGIAAGGITAIVLNLIFPPEKQ

SEQ ID NO: 2518 - DNA, 1389 bp, Erwinia tasmaniensis Et1/99
  CDS (1)..(1389): transl_table=11
atgtccgttgaaacccaagacgctgccacagcagcgcgcgctgttaatgctgataaaagcgaactgatttaccgccttgaagatcgcccgccgctgccacaaactctgtttgccgcctgtcagcatctgctggcgatgtttgttgccgtgatcacccccgcgctgctgatctgtcaggcgctcgggttacccgctaaggatacgcagcacatcatcagtatgtcgctgtttgcctctggcgtggcgtctatcctgcaaatcaaaacctgggggccggtgggttccgggctgctgtcgattcagggcaccagctttaactttgtcaccccgctgattatgggggggctggcgttgaaaaatggcggcgcggacgtacccaccatgatggccgcgctgtttggcaccctgatgctggcctcatgtaccgagatggcgctgtcccgcgtgctgcacctcgcccggcgcgttattacaccgctggtttccggtattgtggtgatgataatcggcctgtcgctaatccaggttgggctgacctctatcggcggcggttttgccgcgatgaacgatcataccttcggcgcgccgaaaaacctgctgctggccggtgcggtgctggcggtgattattgtgctcaaccgccagcgtaacccctggctgcgcgttgcctcgctggtgattgctatggcggtgggttatttactcgcctgggcgatgggaatgctgccggaaaacactgccccctccaacggcgcgcttatcactatcccaacgccgttttattacgggctgggcatcgactggaacctgttaattccgctgatgctggtgtttatggtgacctccctggaagccattggcgatattaccgccacgtccgacgtttccgagcagccggtcagcggcccgctctatatgaagcggctgaaaggcggcgtgctggctaacggcctgaactcctgtgtttcggcgctgttcaatactttccctaactcctgttttggtcagaataacggcgtgatccagcttaccggcgttgccagccgctacgtaggttttgtcgtggcgctgatgctgatggcgctgggtctgttcccggcggtgagtggatttgtgcagcatatccctgaaccggtactcggcggagcaaccattgtgatgttcggcaccatcgccgcttcaggcgtgcgcatcgtttcgcgtgagccgctgaaccgtcgggcgattatgattattgctctgtcactggcggtgggtctgggcgtgtcccagcagcctctgatcttgcagtttgcgccagactggctgaaaacgctgctctcctccggcattgccgccggagggatcaccgccatcgtgctgaacctggtttttccacaggaaaaatag

SEQ ID NO: 2519 - protein, 462 aa, Erwinia tasmaniensis Et1/99
MSVETQDAATAARAVNADKSELIYRLEDRPPLPQTLFAACQHLLAMFVAVITPALLICQALGLPAKDTQHIISMSLFASGVASILQIKTWGPVGSGLLSIQGTSFNFVTPLIMGGLALKNGGADVPTMMAALFGTLMLASCTEMALSRVLHLARRVITPLVSGIVVMIIGLSLIQVGLTSIGGGFAAMNDHTFGAPKNLLLAGAVLAVIIVLNRQRNPWLRVASLVIAMAVGYLLAWAMGMLPENTAPSNGALITIPTPFYYGLGIDWNLLIPLMLVFMVTSLEAIGDITATSDVSEQPVSGPLYMKRLKGGVLANGLNSCVSALFNTFPNSCFGQNNGVIQLTGVASRYVGFVVALMLMALGLFPAVSGFVQHIPEPVLGGATIVMFGTIAASGVRIVSREPLNRRAIMIIALSLAVGLGVSQQPLILQFAPDWLKTLLSSGIAAGGITAIVLNLVFPQEK

SEQ ID NO: 2520 - DNA, 1338 bp, Porphyromonas gingivalis ATCC 33277
  CDS (1)..(1338): transl_table=11
atggccatcgcaccgaatgaagctaccccacaggtagatctgatctacaaaatcgaagacaagccttctttcaaagatgctgtctttgctgctttccaacacctccttgccatctttgtggctatcattacgcccccacttatcattgcaggagcactcaatctggatctggagactacttctttcctcgtctccatggctcttttcgcttcgggggtatccacctttatccaatgtagaagagtagggcctttgggtgccgggctgctatgtgtgcagggcacaagtttttcttttatcggcccgattatcagcgcgggcctggccggcggcctgccgcttatattcggttgtacgatagcggcagctccggtagagatgatcgtcagccgtaccttccgttatctcaagcagatcattacgcctctcgtttcgggaatcgtggtcttgctgatcggtctgagtctgatcaaagtggggattatctcatgcggaggaggcaatgcggcgatgagcgacgggactttcggcaactggcagaatctcagcattgctgctctcgtcttggtaagcgtcctcttcttcaataagagcaaaaacaaatacattcgtatgagctccatcgtactcggtctgctcgtcggttatgttttggcttacatcctcggtcgagtggatctctccggtatggagacgacgaagatcgcactgctgaatatccctgttccattcaaatacggccttagcctgaatctgtcttcctttatcgccatagggttgatctatcttattacagccatcgaagcaacgggggatattacggccaattcgatgatttcgggcgaaccggtggagggtgataaatacatcaaacgtgtatcgggcggagtattggccgatggcttcaattcgctcctcgccggcgtgttcaattctttccccaattctatcttcgcccaaaacaacgggttgatccagctcacgggtgtggccagtcgtcgagtgggctactatattgcggctatgctcatcgtgcttggcttgttcccgggtatcggtcttatcttttctctgatgcccgatcccgtattaggaggagctacgctgctgatgttcggaactgtagccgcagccggtatacgcatcattgcagctcaggatatagaccggaaggctacgatgattttggccatcagtctgtcactgggcttgggtgtcgagttgatgccggacatcttgcgcaacatatctcttgacctgagaggcatcttctcttcgggaattacgaccggcggtcttgctgccataatctctaatatgcttatccgtggcaaatag

SEQ ID NO: 2521 - protein, 445 aa, Porphyromonas gingivalis ATCC 33277
MAIAPNEATPQVDLIYKIEDKPSFKDAVFAAFQHLLAIFVAIITPPLIIAGALNLDLETTSFLVSMALFASGVSTFIQCRRVGPLGAGLLCVQGTSFSFIGPIISAGLAGGLPLIFGCTIAAAPVEMIVSRTFRYLKQIITPLVSGIVVLLIGLSLIKVGIISCGGGNAAMSDGTFGNWQNLSIAALVLVSVLFFNKSKNKYIRMSSIVLGLLVGYVLAYILGRVDLSGMETTKIALLNIPVPFKYGLSLNLSSFIAIGLIYLITAIEATGDITANSMISGEPVEGDKYIKRVSGGVLADGFNSLLAGVFNSFPNSIFAQNNGLIQLTGVASRRVGYYIAAMLIVLGLFPGIGLIFSLMPDPVLGGATLLMFGTVAAAGIRIIAAQDIDRKATMILAISLSLGLGVELMPDILRNISLDLRGIFSSGITTGGLAAIISNMLIRGK

SEQ ID NO: 2522 - DNA, 1389 bp, Burkholderia pseudomallei 1655
  CDS (1)..(1389): transl_table=11
atgcaacccgcccccctcgcccgccccgcttcccacggcgccgacgccgccgaatccgcgcacgatctcgtctacggccccgacgagcgccccgcgccgatgatcgcctgcgtcgccgcgctccagcatctgctcgcgatcctcgtgccgatcgtcacgcccggcctgctgatctgccaggcgctcggcgtatcgagccgcgacacgacgctgatcgtgtcgatgtcgctcgtgatctccggcatcgcgaccttcgtccagtgcaggcgcttcggcccgctcggcgcgggcctgctgatcgtccagggcacgagcttcaacttcgtcgggccgctgatcgcgggcggcagcctgatggtcaagcagggcacgccggtcgaaaccgtgatggccgcgatcttcggcgtcgtcatcgccggctcgttcgtcgagatggccgtgtcgcgcatcctgcctttcgtgaagcgcctgatcaccccgctcgtcaccggcgtcgtggtgctgctgatcggcctcacgctcatcaaggtcggcctcgtcagcatgggcggcggctatggcgcgatcgccaagggcagcttcggcagcgcccagaacctgacgctgtcggggctcgtgctcggcgccatcatcgtgctcaatcgcgtgcccatcgtctgggtgcgcagcaccgcgctcgtcatcgcgctcgcgatcggctatctcgcggccgccgcgatgggccgtctcgatttcaccggcgcgcgcgaggccgcgctgttccagatcccgacgccgctgcacttcggcctgggcttctcgtgggcgctgttcgtgccgatgctgatcatctatctcgtcacgtcgctcgaggcgatcggcgatgtcacggccacgagcaagatctcgcggcaacccgtcgaggggccgctgtggatgcggcgcatcaagggcggcgtgctcgtcaacggcgcgaactcgctgctcgccggcgtcttcaatacgttccccagctcggtcttcgcgcagaacaacggcgtgatccagctcaccggcatcgcgagccgccatgtcggcatctggatcgcgggcatgctcgtgctgctcgggctcttccccgtcgtcgcgggcgtcctgcaagcggtacccgagcccgtgctcggcggcgcggcgctggtgatgttcggcgcggtggccgcgtccggcatcaatatcctcgccggcatccggctcgatcgccgcgcgctgctgatcatcgcggtgtcgctcgcgctcggcctgggcgtgtcgcaggtgccggagatcctgacgaacctgccgcacgcgctcgggaacgtgctcgaatcgggcgtcgcgacaggcggcatctgcgcgctcgtgatgaactggttcctgcccgagaagcaatga

SEQ ID NO: 2523 - protein, 462 aa, Burkholderia pseudomallei 1655
MQPAPLARPASHGADAAESAHDLVYGPDERPAPMIACVAALQHLLAILVPIVTPGLLICQALGVSSRDTTLIVSMSLVISGIATFVQCRRFGPLGAGLLIVQGTSFNFVGPLIAGGSLMVKQGTPVETVMAAIFGVVIAGSFVEMAVSRILPFVKRLITPLVTGVVVLLIGLTLIKVGLVSMGGGYGAIAKGSFGSAQNLTLSGLVLGAIIVLNRVPIVWVRSTALVIALAIGYLAAAAMGRLDFTGAREAALFQIPTPLHFGLGFSWALFVPMLIIYLVTSLEAIGDVTATSKISRQPVEGPLWMRRIKGGVLVNGANSLLAGVFNTFPSSVFAQNNGVIQLTGIASRHVGIWIAGMLVLLGLFPVVAGVLQAVPEPVLGGAALVMFGAVAASGINILAGIRLDRRALLIIAVSLALGLGVSQVPEILTNLPHALGNVLESGVATGGICALVMNWFLPEKQ

SEQ ID NO: 2524 - DNA, 1401 bp, Vibrio cholerae RC385
  CDS (1)..(1401): transl_table=11
atgatacaaccgacttcacgtaaggcagatctggtctatcaactcaatgatcgtccacctttgcctcaaactctcttcgcagccttgcaacatctgctggcgatgtttgtcgccgtgatcaccccatcgctgatcatttgccaatcccttggtgtacctgccgatcaaaccaacaccatcatcagcatgtcactgtttgcttcgggtttgtcatccttcattcaaatccgtacctttggcccaattggctcaggtttgctttccattcaaggcaccagctttaactttttaggccccattattggtgcaggactcgcgctcaaagcaggcggtgcagatatagagaccatgatggctgcgatttttggcacgattttggtcgcctcaagcgctgaaattttgctctcgcgcgtgctgcaatttgcccagcgcattatcactccattagtctctgggattgtggtgaccttaattggcctaacgctggtacaagtcggattgatttcgatgggtggcggttatgcggctatggctgacggcagctttggtagccttgataagcttgcgctagcaggcacggtattggcgatcattgtgctgcttaaccgagcgcacaacccttacgtgcgagtggcttcgattgtgattgcgatgctggtgggttatgtgatggcgtacctgatgggcatggtcaataccgacaacttggcggaaacccagctcatcgcgctacctattccgatgcaatatggtttagggtttgactggtcgctgtttattcctctggtgctgattttcctcatcacggcactagaagcgattggtgatatcacggcgacctccgaagtttcgggtgaacctgtgaaaggccctgtgtatatgaagcgcatcaaaggtggtgtattggccgatggtctcaactcagcccttgccgccgtgttcaacagcttcccgaattcgacatttagccaaaacaacggcgtgatcctattaactggcgttgccagccgttatgtgggttactttatcgcgggcatgttagtactgcttggcctcttccccggcgttgcgagctttgtacagttgattcctgaacctgtgcttggcggcgcaacgattgtgatgtttggtacgattgctgcggcaggcgtgcgcattatctctcgcgtcgatttggatcgccgcgcaattctgatcatggcgctctccttctcaatgggtttgggaattgcgcaaaagccagagattctgcagtttatgccggaatttattaagaatctgttctcttcaggtgtagccgcaggtggtattaccgctatcgtgcttaacttgctgctgccagaaatacgccgagatgaaaacgccgcttcggttaccgaaacggcgcaagagtcaaactaa

SEQ ID NO: 2525 - protein, 466 aa, Vibrio cholerae RC385
MIQPTSRKADLVYQLNDRPPLPQTLFAALQHLLAMFVAVITPSLIICQSLGVPADQTNTIISMSLFASGLSSFIQIRTFGPIGSGLLSIQGTSFNFLGPIIGAGLALKAGGADIETMMAAIFGTILVASSAEILLSRVLQFAQRIITPLVSGIVVTLIGLTLVQVGLISMGGGYAAMADGSFGSLDKLALAGTVLAIIVLLNRAHNPYVRVASIVIAMLVGYVMAYLMGMVNTDNLAETQLIALPIPMQYGLGFDWSLFIPLVLIFLITALEAIGDITATSEVSGEPVKGPVYMKRIKGGVLADGLNSALAAVFNSFPNSTFSQNNGVILLTGVASRYVGYFIAGMLVLLGLFPGVASFVQLIPEPVLGGATIVMFGTIAAAGVRIISRVDLDRRAILIMALSFSMGLGIAQKPEILQFMPEFIKNLFSSGVAAGGITAIVLNLLLPEIRRDENAASVTETAQESN

SEQ ID NO: 2526 - DNA, 1401 bp, Vibrio cholerae V51
  CDS (1)..(1401): transl_table=11
atgacacaaccgacttcacgtaaggcagatctggtctatcaactcaatgatcgtccccctttgcctcaaactctcttcgcagccttacaacatctgctggcgatgtttgtcgccgtgatcaccccatcgctgatcatttgccaatcccttggtgtacctgccgatcaaaccaacaccatcatcagcatgtcactgtttgcttcgggtttatcatcctttattcaaatccgcacctttggcccaattggctcaggtttgctttccattcaaggcaccagctttaacttcttaggcccgattatcggtgcaggacttgcgctcaaagcaggcggtgcagatatagagaccatgatggccgcgatttttggtacgattttggtcgcctcaagcgctgaaattttactgtcccgcgtgctgcaatttgcccagcgcattatcacgccattagtctctgggattgtggtgaccttgattggcctaacgctggtacaagtcggattgatttcgatgggtggtggttatgccgctatggctgacggcagctttggtagcctcgataagcttgcgctagctggcaccgtattggcgatcattgtgctgctgaaccgagcgcacaacccttacgtgcgagtggcttcgattgtgattgcgatgctggtaggttatgtgatggcgtacctgatgggcatggtcaataccgacaacttggcggaaacccagttcatcgctctgcctattccgatgcagtacggtttgggctttgactggtcgctgtttatacctctggttctgattttcctgatcaccgcactagaagcgattggtgatatcacggcgacctccgaagtctctggtgagccagtcaaaggccctgtgtacatgaagcgcattaaaggtggcgtattggctgatggcctcaactccgcattagccgcggtatttaacagctttccaaactccacctttagccaaaacaacggcgtgatcctgctgaccggtgttgccagccgttatgtgggttattttatcgcgggcatgttggtactacttggcttgttccctggcgtagcaagctttgtacagttgattcctgaacctgtgctcggcggtgcaacaatcgtgatgtttggtacgattgctgcggcaggcgtgcgcattatctctcgcgtcgatttggatcgccgcgcgattctaatcatggcgctctccttctcaatgggtttgggaattgcgcaaaagccagagattctgcagtttatgccggaatttattaagaatctgttctcttcaggtgtagccgcaggtggtattaccgctatcgtgcttaaccttctgctgccagaaatacgccgagatgaaaacgccgcttcggttaccgatacggcgcaagaatcaaactaa

SEQ ID NO: 2527 - protein, 466 aa, Vibrio cholerae V51
MTQPTSRKADLVYQLNDRPPLPQTLFAALQHLLAMFVAVITPSLIICQSLGVPADQTNTIISMSLFASGLSSFIQIRTFGPIGSGLLSIQGTSFNFLGPIIGAGLALKAGGADIETMMAAIFGTILVASSAEILLSRVLQFAQRIITPLVSGIVVTLIGLTLVQVGLISMGGGYAAMADGSFGSLDKLALAGTVLAIIVLLNRAHNPYVRVASIVIAMLVGYVMAYLMGMVNTDNLAETQFIALPIPMQYGLGFDWSLFIPLVLIFLITALEAIGDITATSEVSGEPVKGPVYMKRIKGGVLADGLNSALAAVFNSFPNSTFSQNNGVILLTGVASRYVGYFIAGMLVLLGLFPGVASFVQLIPEPVLGGATIVMFGTIAAAGVRIISRVDLDRRAILIMALSFSMGLGIAQKPEILQFMPEFIKNLFSSGVAAGGITAIVLNLLLPEIRRDENAASVTDTAQESN

SEQ ID NO: 2528 - DNA, 1389 bp, Burkholderia cenocepacia PC184
  CDS (1)..(1389): transl_table=11
atgcaacccgcctcctccgccccctccgcctcccatggcgccgacgccgcagaagcggcccgcgacctcgtctacggcccgaacgaccggccggcgccgatggtcgcgttcgtcgccgccctccagcacctgctcgcgatcatcgtgccgatcgtcacgcccggcctgttgatctgccaggcgctcggcgtgtccagccgcgatacgaccctgatcgtgtcgatgtcgctggtgatttccggcatcgccaccttcgtgcagtgcaagcgcttcggcccgctgggcgccggcctgctgatcgtccagggcaccagcttcaacttcgtcggcccgctgatcgccggcggcagcctgatggtcaagcaaggcacgccggtcgagaccgtgatggccgcgatcttcggcgtcgtgatcgccgggtcgttcgtggagatgggcgtgtcgcgcatcctgccgttcgtgaagcgcctgatcaccccgctcgtcaccggcatcgtcgtgctgctgatcggcctcacgctgatcaaggtcggcctcatcagcatgggcggcggctacggcgcgatggccaagggcacgttcgcgagcgcggagaacctgacactgtcgggcctcgtgctcggcacgatcatcctgctgaaccgcgtgccggtcgtctgggtgcgcagcaccgcactcgtcatcgcgctcgcgatcggctacctcgcggccgcgttcctcggccgcctcgatttcaccggcatgcaccaggccacgctgttccaggtgccgacgccgctgcacttcggcatcggcttctcgtgggcgctgttcgtgccgatgctgatcatctacctcgtcacgtcgctcgaagcgatcggcgacgtgacggccaccagcaagatctcgaacgagccggtcgaggggccggtgtggatgcagcgcatcaagggcggcgtgctcgtcaacggggcgaactcgctgctggccggcgtgttcaacacgttcccgagctcggtattcgcgcagaacaacggcgtgatccagattaccggcgtcgcgagccgtcacgtcggtatctggatcgcgggcatgctggtggtgctcggcctgttcccggtcgtcgccggcgtgctgcaggccgtgccggagcccgtgctcggcggtgcggcgatggtgatgttcggtgcggtggccgcgtcgggcatcaacattctcgcgggcgtccatctcgaccgtcgcgcgctgctgatcatcgcggtgtcgctggcgctcggcctcggcgtgtcgcaggtgccggacatcctgaacagcctgccccatgcactgaagaacgtgctggaatcgggcgtggcgacgggcggcatctgtgcgctcgtgatgaactggttcctgccggaaaagaagtaa

SEQ ID NO: 2529 - protein, 462 aa, Burkholderia cenocepacia PC184
MQPASSAPSASHGADAAEAARDLVYGPNDRPAPMVAFVAALQHLLAIIVPIVTPGLLICQALGVSSRDTTLIVSMSLVISGIATFVQCKRFGPLGAGLLIVQGTSFNFVGPLIAGGSLMVKQGTPVETVMAAIFGVVIAGSFVEMGVSRILPFVKRLITPLVTGIVVLLIGLTLIKVGLISMGGGYGAMAKGTFASAENLTLSGLVLGTIILLNRVPVVWVRSTALVIALAIGYLAAAFLGRLDFTGMHQATLFQVPTPLHFGIGFSWALFVPMLIIYLVTSLEAIGDVTATSKISNEPVEGPVWMQRIKGGVLVNGANSLLAGVFNTFPSSVFAQNNGVIQITGVASRHVGIWIAGMLVVLGLFPVVAGVLQAVPEPVLGGAAMVMFGAVAASGINILAGVHLDRRALLIIAVSLALGLGVSQVPDILNSLPHALKNVLESGVATGGICALVMNWFLPEKK

SEQ ID NO: 2530 - DNA, 1386 bp, Burkholderia dolosa AUO158
  CDS (1)..(1386): transl_table=11
atgcaacccgcctcttccgcccgctccgccgccagtgccgacgatgccgactcggcccgcgacctcgtctacggcccgaacgaccgccctgcgccgatggtcgcgttcgtcgccgcgctccagcacctgctcgcgatcatcgtgccgatcgtcacgcccggcctgctgatctgccaagcgctcggcgtatcgagccgcgataccacgctgatcgtgtcgatgtcgctggtgatttccggcatcgcgacgttcgtgcagtgcaggcggttcggtccgctcggcgcgggcttgctgatcgtgcagggcacgagcttcaacttcgtcggcccgctgatcgccggcggcagcgtgatggtcaagcaaggcacgccggtcgagaccgtgatggccgcgatcttcggtgtcgtgatcgccggctcgttcgtcgagatgagcgtgtcgcgcatcctgccgttcgtgaagcggctgatcacgccgctcgtcaccggcatcgtcgtgctgctgatcggcctcacgctgatcaaggtcggcctcgtcagcatgggcggcggctacggcgcgatagcgaacgggacgttcgcgagcgccgagaacctgacgctgtccgggctcgtgctcggcacgatcgtgctgctcaaccgcgtgccggtcgtctgggtgcgcagcaccgcgctcgtgatcgcgctcgcgatcggctatctcgcggccgcgctgcttggccgcctcgatttcaccggcgtgcatcaggccgcactgttccaggtgccgacgccgctgcacttcggcatcggcttctcgtggtcgctgttcgtgccgatgctgatcatctatctggtcacgtcgctcgaagcgatcggcgacgtcaccgcgaccagcaagatctcgaaggagccggtcgaaggaccggtgtggatgcaacgaatcaagggcggcgtgctcgtgaacggcgcgaactcgctgctcgccggcgtgttcaacacgtttccgagctcggtgttcgcgcagaacaacggcgtgatccagatcaccggcgtcgcgagccgccatgtcggcatctggatcgcggcgatgctcgtcgtgctcggcctgttcccgacggtggccggcgtgctgcaggccgtgcccgagccggtgctcggcggcgcggcgatggtgatgttcggcgcggtcgccgcatcgggcatcaacattctcgcgggcatccacctcgaccgtcgtgcgctgctgatcatcgcggtgtcgctggcgctcggcctcggcgtgtcgcaggtgccggacattctgaacagcctgccgcatgcgctgaagaacgtgctggaatcgggcgtcgcgaccggcggcatcagcgcgctcgtgatgaactggttcctgccggagaagaagtaa

SEQ ID NO: 2531 - protein, 461 aa, Burkholderia dolosa AUO158
MQPASSARSAASADDADSARDLVYGPNDRPAPMVAFVAALQHLLAIIVPIVTPGLLICQALGVSSRDTTLIVSMSLVISGIATFVQCRRFGPLGAGLLIVQGTSFNFVGPLIAGGSVMVKQGTPVETVMAAIFGVVIAGSFVEMSVSRILPFVKRLITPLVTGIVVLLIGLTLIKVGLVSMGGGYGAIANGTFASAENLTLSGLVLGTIVLLNRVPVVWVRSTALVIALAIGYLAAALLGRLDFTGVHQAALFQVPTPLHFGIGFSWSLFVPMLIIYLVTSLEAIGDVTATSKISKEPVEGPVWMQRIKGGVLVNGANSLLAGVFNTFPSSVFAQNNGVIQITGVASRHVGIWIAAMLVVLGLFPTVAGVLQAVPEPVLGGAAMVMFGAVAASGINILAGIHLDRRALLIIAVSLALGLGVSQVPDILNSLPHALKNVLESGVATGGISALVMNWFLPEKK

SEQ ID NO: 2532 - DNA, 1389 bp, Burkholderia pseudomallei 406e
  CDS (1)..(1389): transl_table=11
atgcaacccgcccccctcgcccgccccgcttcccacggcgccgacgccgccgaatccgcgcacgatctcgtctacggccccgacgagcgccccgcgccgatgatcgcctgcgtcgccgcgctccagcatctgctcgcgatcctcgtgccgatcgtcacgcccggcctgctgatctgccaggcgctcggcgtatcgagccgcgacacgacgctgatcgtgtcgatgtcgctcgtgatctccggcatcgcgaccttcgtccagtgcaggcgcttcggcccgctcggcgcgggcctgctgatcgtccagggcacgagcttcaacttcgtcgggccgctgatcgcgggcggcagcctgatggtcaagcagggcacgccggtcgaaaccgtgatggccgcgatcttcggcgtcgtcatcgccggctcgttcgtcgagatggccgtgtcgcgcatcctgcctttcgtgaagcgcctgatcaccccgctcgtcaccggcgtcgtggtgctgctgatcggcctcacgctcatcaaggtcggcctcgtcagcatgggcggcggctatggcgcgatcgccaagggcagcttcggcagcgcccagaacctgacgctgtcggggctcgtgctcggcgccatcatcgtgctcaatcgcgtgcccatcgtctgggtgcgcagcaccgcgctcgccatcgcgctcgcgatcggctatctcgcggccgccgcgatgggccgtctcgatttcaccggcgcgcgcgaggccgcgctgttccagatcccgacgccgctgcacttcggcctgggcttctcgtgggcgctgttcgtgccgatgctgatcatctatctcgtcacgtcgctcgaggcgatcggcgatgtcacggccacgagcaagatctcgcggcaacccgtcgaggggccgctgtggatgcggcgcatcaagggcggcgtgctcgtcaacggcgcgaactcgctgctcgccggcgtcttcaatacgttccccagctcggtcttcgcgcagaacaacggcgtgatccagctcaccggcatcgcgagccgccatgtcggcatctggatcgcgggcatgctcgtgctgctcgggctcttccccgtcgtcgcgggcgtcctgcaagcggtacccgagcccgtgctcggcggcgcggcgatggtgatgttcggcgcggtggccgcgtccggcatcaatatcctcgccggcatccggctcgatcgccgcgcgctgctgatcatcgcggtgtcgctcgcgctcggcctgggcgtgtcgcaggtgccggagatcctgacgaacctgccgcacgcgctcgggaacgtgctcgaatcgggcgtcgcgacgggcggcatctgcgcgctcgtgatgaactggttcctgcccgagaagcaatga

SEQ ID NO: 2533 - protein, 462 aa, Burkholderia pseudomallei 406e
MQPAPLARPASHGADAAESAHDLVYGPDERPAPMIACVAALQHLLAILVPIVTPGLLICQALGVSSRDTTLIVSMSLVISGIATFVQCRRFGPLGAGLLIVQGTSFNFVGPLIAGGSLMVKQGTPVETVMAAIFGVVIAGSFVEMAVSRILPFVKRLITPLVTGVVVLLIGLTLIKVGLVSMGGGYGAIAKGSFGSAQNLTLSGLVLGAIIVLNRVPIVWVRSTALAIALAIGYLAAAAMGRLDFTGAREAALFQIPTPLHFGLGFSWALFVPMLIIYLVTSLEAIGDVTATSKISRQPVEGPLWMRRIKGGVLVNGANSLLAGVFNTFPSSVFAQNNGVIQLTGIASRHVGIWIAGMLVLLGLFPVVAGVLQAVPEPVLGGAAMVMFGAVAASGINILAGIRLDRRALLIIAVSLALGLGVSQVPEILTNLPHALGNVLESGVATGGICALVMNWFLPEKQ

SEQ ID NO: 2534 - DNA, 1392 bp, Vibrio fischeri MJ11
  CDS (1)..(1392): transl_table=11
atgaccgttaaaaacagcaccacaaaaccatctgaattgatctatcaattggatgatcgtccaccgctaccgcacactttatttgctgcttttcagcacttattggcaatgtttgttgctattattacgccttctctgatcatctgtcagacacttggtgttccagcggctgaaaccaataccatcatcagcatgtctttatttgcttcgggcatttcttcttttattcaaattaaaacctttggccctatcggttctggcttactttccgttcaaggcaccagttttaatttcttaggcccaattattggtgcaggccttgcactaaaagctggtggtgctgatgttcctactatgatggcagccattttcggtaccattcttgttgcttcaaccgctgaaattttcctatctcgtgttcttgaatacgctcaaaaaatcattactccattagtatccggcattgttgttactctcatcggccttactcttattcaagtcggtttagtgtctatgggaggcggatattcagctatgggcgaaggcacatttggtagccttgataaactcgctcttgctggcacggtattattaattattgtggtactaaaccgtgcaactaacccttacctacgtatggcgtctatcgttatcgcaatgacagtaggtacgctagtggcgtgggcgatgggaatgcttaatacaaatatgtctcatgatgcggctctcattgccctaccaatccctatgcagtatggcttaggttttgactggtctctgtttattcctttggtgcttatcttcttaatcacggcactagaagccattggtgatattactgcgacatcagaagtatcaggtcaaccagtaaaaggtcctgtttatatgaagcgcattaaaggcggtgtattagctgatggtattaactcggcaatcgccgcagcatttaacagcttccctaactcaacgtttagccaaaacaatggcgtaattctattaacgggtgtagcaagccgttatgtgggttatttcatcgcaggtatgctagttcttcttggtttattcccaggggtagcaagcatggtgcagatcattcctgagcctgtacttggtggtgcgactattgtgatgttcggtacgattgcggctgctggtgtgcgtattatctctcgtgttgaactagatcgtcgcgcgatcctaatcatggctatgtctttctctatgggtcttggcttagctcaaaaacctgaaattcttcagttcatgccagaaatgattaaaaacattttctcatcaggtgtaactgcaggtggtgtaaccgcgattatcttaaatatcgtattgccgtatgcagaagtgaaagaagaagcaaaacaagatgtgattgcttaa

SEQ ID NO: 2535 - protein, 463 aa, Vibrio fischeri MJ11
MTVKNSTTKPSELIYQLDDRPPLPHTLFAAFQHLLAMFVAIITPSLIICQTLGVPAAETNTIISMSLFASGISSFIQIKTFGPIGSGLLSVQGTSFNFLGPIIGAGLALKAGGADVPTMMAAIFGTILVASTAEIFLSRVLEYAQKIITPLVSGIVVTLIGLTLIQVGLVSMGGGYSAMGEGTFGSLDKLALAGTVLLIIVVLNRATNPYLRMASIVIAMTVGTLVAWAMGMLNTNMSHDAALIALPIPMQYGLGFDWSLFIPLVLIFLITALEAIGDITATSEVSGQPVKGPVYMKRIKGGVLADGINSAIAAAFNSFPNSTFSQNNGVILLTGVASRYVGYFIAGMLVLLGLFPGVASMVQIIPEPVLGGATIVMFGTIAAAGVRIISRVELDRRAILIMAMSFSMGLGLAQKPEILQFMPEMIKNIFSSGVTAGGVTAIILNIVLPYAEVKEEAKQDVIA

SEQ ID NO: 2536 - DNA, 1437 bp, Unknown
  Unidentified
  CDS (1)..(1437)
atgcgcaaggtgttattgaccatcaggaaaatcgctatgacacaaccgacttcacgtaaggcagatctggtctatcaactcaatgatcgtccccctttgcctcaaactctcttcgcagccttacaacatctgctggcgatgtttgtcgccgtgatcaccccatcgctgatcatttgccaatcccttggtgtacctgccgatcaaaccaacaccatcatcagcatgtcactgtttgcttcgggtttgtcatccttcattcaaatccgcacctttggcccaattggctcaggtttgctttccattcaaggcaccagctttaactttttaggcccgattatcggtgctggacttgcgctcaaagcaggcggtgcagatatagagaccatgatggcggcgatttttggtacgattttggtcgcctcaagcgctgaaattttactgtcccgcgtgctgcaatttgcccagcgcattatcactccattagtctctgggattgtggtgaccttaattggcctaacgctggtacaagtcggattgatttctatgggtggcggttatgccgctatggctgacggcagctttggtagccttgataagcttgcgctagctggcaccgtattggcgatcattgtgctgctgaaccgagcgcacaacccttacgtgcgagtggcttcgattgtgattgcgatgctggtaggttatgtaatggcgtacctgatgggcatggtcaataccgacaacttggcacagacccaactcatcgcgctgcctatcccgatgcaatatggtttagggtttgactggtcgctgtttattcctctggtgctgattttccttatcacggcactagaagcgattggtgatatcacggcaacctccgaagtctctggtgagcccgtgaaaggccccatgtatatgaagcgtatcaaaggcggcgtattggcggatggcctcaattccgcattagccgcggtatttaacagctttccaaactccacctttagccaaaacaacggcgtgatcctattaaccggcgttgccagccgttatgtgggttactttatcgcgggcatgttggtgctgcttggtctcttccccggcgttgcaagctttgtacagttgattcctgaacctgtgcttggcggcgcaacgattgtgatgtttggtacgattgctgcggcaggcgtgcgcattatctctcgcgtcgatttggatcgccgcgcgattctgatcatggcgctctccttctcaatgggtttggggattgcgcaaaagccagaaattctgcagtttatgccggaatttattaagaatctgttctcttcaggtgtagccgcaggtggtattaccgccatcgtgcttaacctgctgctgccagaagtacgccgagatgaaaacgccgcttcggttaccgaaacggcgcaagaatcaaactaa

SEQ ID NO: 2537 - protein, 478 aa, Unknown
  Unidentified
MRKVLLTIRKIAMTQPTSRKADLVYQLNDRPPLPQTLFAALQHLLAMFVAVITPSLIICQSLGVPADQTNTIISMSLFASGLSSFIQIRTFGPIGSGLLSIQGTSFNFLGPIIGAGLALKAGGADIETMMAAIFGTILVASSAEILLSRVLQFAQRIITPLVSGIVVTLIGLTLVQVGLISMGGGYAAMADGSFGSLDKLALAGTVLAIIVLLNRAHNPYVRVASIVIAMLVGYVMAYLMGMVNTDNLAQTQLIALPIPMQYGLGFDWSLFIPLVLIFLITALEAIGDITATSEVSGEPVKGPMYMKRIKGGVLADGLNSALAAVFNSFPNSTFSQNNGVILLTGVASRYVGYFIAGMLVLLGLFPGVASFVQLIPEPVLGGATIVMFGTIAAAGVRIISRVDLDRRAILIMALSFSMGLGIAQKPEILQFMPEFIKNLFSSGVAAGGITAIVLNLLLPEVRRDENAASVTETAQESN

SEQ ID NO: 2538 - DNA, 1392 bp, Salmonella enterica subsp. enterica serovar Gallinarum str. 287/91
  CDS (1)..(1392): transl_table=11
atgtccgttaacgccatcgagtcggcagatgcgcaaccggttgcgcagacgcaaaacagcgaattaatttaccgtcttgaagatcgcccgccgctccctcaaaccctttttgccgcttgtcagcatctgctggccatgtttgtcgcggtaatcacgccagcgctgttaatctgccaggcgttgggtttaccggcgcaggatacgcagcacattatcagcatgtcgctgttcgcctccggcgtagcctctattattcaaatcaaagcgtgggggccggtaggatcggggctgttatccatccagggaaccagttttaactttgtcgccccgctgattatgggcggtaccgcgctgaaaaccggcggcgcggatgtcccgacgatgatggcggcgctgttcggcacgctgatgctggcaagctgcaccgagatggtgctttctcgcattctacatctggcgcgccggattatcacgccgttagtctccggcgtcgtggtgatgattattggcctgtcgctgattcaggtggggctaacctccatcggcggcggctatgccgccatgagcgacaacacctttggcgcaccgaaaaacctgctgctggccggcgtcgtcctggccattattatcctgctgaatcggcagcgtaatccctacctgcgcgtggcttctttggttattgccatggcggcaggctatcttttagcctggtttatgggcatgttgcctgagaataacgcgccggtctcgcaggacatcctgatggtgccgaccccgctgtattatggtctgggcattgactggaacctgttactgccgttgatgctggtctttatgattacgtcgctggagaccatcggagacatcaccgccacctctgatgtctccgagcagccggtatccggccccttgtacatgaaacggctaaagggcggcgtactggctaacggcctgaactcatttgtttcagcggtatttaatacgttcccgaattcctgtttcggtcagaacaacggcgtaattcagttgactggcgtcgccagtcgctatgtgggatttgttgtcgcgctgatgctgattgtactcggcctgttcccggcggtaagcggttttgtgcagcatatcccggaaccggtgctcggcggcgccacgttggtgatgttcggcaccattgccgcctccggggtgcgtattgtctcgcgtgagccgctgaaccgccgcgcgattctgattatcgccctgtcgctggccgtgggtcttggcgtctcgcaacagccgcagatcctgcagttcgcgccggaatgggtgaaaaatctgctctcatccggaattgccgctggcggcatcacggctatcgtgctgaacctgattctcccgccggaaaaaccgtaa

SEQ ID NO: 2539 - protein, 463 aa, Salmonella enterica subsp. enterica serovar Gallinarum str. 287/91
MSVNAIESADAQPVAQTQNSELIYRLEDRPPLPQTLFAACQHLLAMFVAVITPALLICQALGLPAQDTQHIISMSLFASGVASIIQIKAWGPVGSGLLSIQGTSFNFVAPLIMGGTALKTGGADVPTMMAALFGTLMLASCTEMVLSRILHLARRIITPLVSGVVVMIIGLSLIQVGLTSIGGGYAAMSDNTFGAPKNLLLAGVVLAIIILLNRQRNPYLRVASLVIAMAAGYLLAWFMGMLPENNAPVSQDILMVPTPLYYGLGIDWNLLLPLMLVFMITSLETIGDITATSDVSEQPVSGPLYMKRLKGGVLANGLNSFVSAVFNTFPNSCFGQNNGVIQLTGVASRYVGFVVALMLIVLGLFPAVSGFVQHIPEPVLGGATLVMFGTIAASGVRIVSREPLNRRAILIIALSLAVGLGVSQQPQILQFAPEWVKNLLSSGIAAGGITAIVLNLILPPEKP

SEQ ID NO: 2540 - DNA, 1392 bp, Klebsiella pneumoniae 342
  CDS (1)..(1392): transl_table=11
atgtccgttaacaccgcagagtcagaaaatgcgcaaccggttgcgcataaatcagctagcgaattaatctaccgcctcgaagatcgcccaccgctaccgcaaaccctgttcgccgccttccagcacctgctggcgatgtttgtcgcggtgatcactccagcgctgttaatctgccaggctctcggtctcccggcgcaagatacccaacatatcatcagcatgtcgctgttcgcttccggtgtcgcctctattattcagatcaaagcctggggcccggtcggctccggattgctctccatccagggcaccagctttaactttgtcgccccgctgatcatgggcggtaccgcattgaaaaccggcggcgccgacgtccccaccatgatggccgccctgttcggcaccctgatgctggccagctgcacggaaatggtgctctcccgcgtcctgcacctggcgcgccgcatcattaccccgctggtctccggcgtggtggtgatgattatcggcctgtcgctgattcaggtcggactgacttccatcggcggcggctacgcggcgatggccgaccacaccttcggcgcgccgaagaacctgctgttggcgggcatcgtgctggcgctgatcattattctcaaccgccagcgtaatccctatttgcgcattgcttcgctggtgattgccatggcggcgggctatctggcggcatggttcctcgatatgctgccagccaataccgccccgaccaacagcagcctcatcaccgtgccaacgccgctctactatggtctcggcatcgactggagcctgctgctgccgctgatgctggtgtttatgatcacctctctggaaaccatcggcgatatcaccgccacctcggacgtctccgaacagccggtttccggtccgctgtatatgaagcgcctgaaaggcggcgtgctggctaacggcctgaactcctttgtttccgcggtcttcaacactttcccgaactcctgcttcggccagaacaacggcgtgatccagctgaccggcgttgccagccgctacgtcggtttcgtggtcgccctgatgctgatcgtcctcggtctgttcccggcggtgagcggcttcgtgcagcacatccctgagccggtgctcggcggcgccacgctggtgatgttcggcaccattgccgcgtccggcgtgcgcatcgtctcccgtgagccgctgaaccgtcgggcgatcctgattatcgccctgtcgctggcagtgggcctcggcgtgtcgcagcagccgttaatcctgcagttcgccccagactggctgaaaaacctgctctcttcgggaattgccgccggtggtatcacagcgattgttctgaatttaattttcccgccagaaaaagcctga

SEQ ID NO: 2541 - protein, 463 aa, Klebsiella pneumoniae 342
MSVNTAESENAQPVAHKSASELIYRLEDRPPLPQTLFAAFQHLLAMFVAVITPALLICQALGLPAQDTQHIISMSLFASGVASIIQIKAWGPVGSGLLSIQGTSFNFVAPLIMGGTALKTGGADVPTMMAALFGTLMLASCTEMVLSRVLHLARRIITPLVSGVVVMIIGLSLIQVGLTSIGGGYAAMADHTFGAPKNLLLAGIVLALIIILNRQRNPYLRIASLVIAMAAGYLAAWFLDMLPANTAPTNSSLITVPTPLYYGLGIDWSLLLPLMLVFMITSLETIGDITATSDVSEQPVSGPLYMKRLKGGVLANGLNSFVSAVFNTFPNSCFGQNNGVIQLTGVASRYVGFVVALMLIVLGLFPAVSGFVQHIPEPVLGGATLVMFGTIAASGVRIVSREPLNRRAILIIALSLAVGLGVSQQPLILQFAPDWLKNLLSSGIAAGGITAIVLNLIFPPEKA

SEQ ID NO: 2542 - DNA, 1410 bp, Klebsiella pneumoniae 342
  CDS (1)..(1410): transl_table=11
atgcacttctctttgctatgggattacaccatgtctgacgaacatcacagtggcttgctttacggccttgaacagcggatcccaccgcttccggcctttttcagcgctctccagcatgtgctggcgggcctggtggggatcatcacgccgccgctgatcatcggcgctaccctcgggcttggcgactggctgccgtatctcatcagtatgtcgctactggcctcgggcattggcacctttctgcagtccaatcgggtatggggcgttggcgccgggatgatctgcatgcagggcaccagcttcgccttcctcggcgtgacggtggccggagggatgtgggtaaaagcgcagggcggcgggccgcaggatatgatggcgatgctgtttggcgttaactttgtcgccgctctggtgccggtgattgtcagccgttttattgagccgctgaaaaaaatctttacccccattatcaccggcagcgtgattgcgctgatcggcatcagtctgatcaaagtcagcgtcatcaactggtgcggtggggaaaaggccgaggatttcgccagcatgagcaatatcgcgctcggggcgggcaccctcggggttatcgtcctgctgagttgcgccaaaaaccgctggctgcgtctctcctcggtggtggtgggtattgccgtgggctgcgtcgcggcagggctgagcggtcagttccatcttcacagcctgggcgacactctgtttcgcctgccgacgctgtttccgttcggctttcagtttaacagcgcgatatttctgccggtcgccctggtgtcgctggtttgtattctggaggcggtgggcgatctgacagccaactcgctgatttcgcaacagtctattgatgatcacgcttttcgtaaccggctgaagggcggtatcctggcggacggcgtcagctgtatggtggccgccatgctctgtgcttttccgaacaccaccttcgcgcagaacaacggcgtgatccagatgaccggggtggccagccgctatgtcggacgctacattggcgtgattctgatcctgcttggactgtttcccccggtgggcgaactgctgcggcagatcccggcgccggtgctggggggcgccacgatggtgatgtttggctgtgtagtggcggccgggatccggattattacccagaccccgctgagccgtcgcgatgtgctgattgtggggctggcgtttggtgctggccttggcgtggagtcagtgccggcgtttctcagccattttccgccgatggtcggcgatctgttcggttcggcggccaccagcggtgggctggtagcgatagcgctgaaccttattctgccgcaggagcaggcggcgacgaaaacgataaggagtcaggatgatcgcgctgagtcagtttaa

SEQ ID NO: 2543 - protein, 469 aa, Klebsiella pneumoniae 342
MHFSLLWDYTMSDEHHSGLLYGLEQRIPPLPAFFSALQHVLAGLVGIITPPLIIGATLGLGDWLPYLISMSLLASGIGTFLQSNRVWGVGAGMICMQGTSFAFLGVTVAGGMWVKAQGGGPQDMMAMLFGVNFVAALVPVIVSRFIEPLKKIFTPIITGSVIALIGISLIKVSVINWCGGEKAEDFASMSNIALGAGTLGVIVLLSCAKNRWLRLSSVVVGIAVGCVAAGLSGQFHLHSLGDTLFRLPTLFPFGFQFNSAIFLPVALVSLVCILEAVGDLTANSLISQQSIDDHAFRNRLKGGILADGVSCMVAAMLCAFPNTTFAQNNGVIQMTGVASRYVGRYIGVILILLGLFPPVGELLRQIPAPVLGGATMVMFGCVVAAGIRIITQTPLSRRDVLIVGLAFGAGLGVESVPAFLSHFPPMVGDLFGSAATSGGLVAIALNLILPQEQAATKTIRSQDDRAESV

SEQ ID NO: 2544 - DNA, 1392 bp, Escherichia coli SE11
  CDS (1)..(1392): transl_table=11
atgtctgtttccaccctcgagtcagaaaatgcgcaaccggttgcgcagactcaaaacagcgaactgatttaccgtcttgaagatcgtccgccgcttcctcaaaccctgtttgccgcctgtcagcatttgctggcgatgttcgttgcggtgatcacgccagcgctattaatctgccaggcgctgggtttaccggcacaagacacgcaacacattattagtatgtcgctgtttgcctccggtgtggcatcgattattcaaattaaggcctggggtccggttggctccgggctgttgtctattcagggcaccagcttcaactttgttgccccgctgattatgggcggtaccgcgctgaaaaccggtggtgctgatgttcctaccatgatggcggctttgttcggcacgttgatgctggcaagttgcaccgagatggtgatctcccgcgttctgcatctggcgcgccgcattattacgccgctggtttctggcgttgtggtgatgattatcggcctgtcgctaattcaggtggggctgacctccattggcggcggttacgcagccatgagcgataacaccttcggcgcaccgaaaaatctgctgctggcaggcgtggttttaaccttaattatcctgcttaaccgtcaacgtaacccttacttacgcgtggcctcactggtaattgcgatggcggccggatatgcgctggcgtggtttatgggcatgttgccagaaagcaacgaaccgatgacgcaagaactgattatggtgccaacgccactctattacggtcttggcattgaatggagtctgctgctgccgctgatgctggtctttatgatcacttcgctggaaaccattggcgatatcacggcgacctctgacgtttccgaacagccagtgtccggtccgctgtacatgaaacgcctgaaaggcggcgtgctggcaaacggcctgaactcgtttgtttcggcggtgtttaacaccttcccgaactcctgcttcgggcagaacaacggagtgatccagttgaccggtgttgccagccgctatgtcggttttgtcgtcgcgctgatgttgatcgtgctgggtctgttcccggcagtgagcggttttgtacaacacattccagaaccggttctgggcggcgcaacgcttgtaatgtttggcaccatcgccgcctccggtgtgcgcattgtgtctcgtgagccgctgaaccgtcgggcgattctgattatcgcgctgtcgctggcggttggtctgggcgtgtctcagcagccgctgattttgcagtttgcccctgaatggctgaaaaacctgctctcctccgggatcgccgcgggcggtattactgccatcgtgctgaatctgattttcccaccagaaaaacagtaa

SEQ ID NO: 2545 - protein, 463 aa, Escherichia coli SE11
MSVSTLESENAQPVAQTQNSELIYRLEDRPPLPQTLFAACQHLLAMFVAVITPALLICQALGLPAQDTQHIISMSLFASGVASIIQIKAWGPVGSGLLSIQGTSFNFVAPLIMGGTALKTGGADVPTMMAALFGTLMLASCTEMVISRVLHLARRIITPLVSGVVVMIIGLSLIQVGLTSIGGGYAAMSDNTFGAPKNLLLAGVVLTLIILLNRQRNPYLRVASLVIAMAAGYALAWFMGMLPESNEPMTQELIMVPTPLYYGLGIEWSLLLPLMLVFMITSLETIGDITATSDVSEQPVSGPLYMKRLKGGVLANGLNSFVSAVFNTFPNSCFGQNNGVIQLTGVASRYVGFVVALMLIVLGLFPAVSGFVQHIPEPVLGGATLVMFGTIAASGVRIVSREPLNRRAILIIALSLAVGLGVSQQPLILQFAPEWLKNLLSSGIAAGGITAIVLNLIFPPEKQ

SEQ ID NO: 2546 - DNA, 1401 bp, Escherichia coli IAI1
  CDS (1)..(1401): transl_table=11
atgtctgatataaacaatgcaggttctgaccttatatttgaactggaggatcgccctccctttcatcaggctctcgttggtgccattacccatctgttggcaattttcgttccgatggtaacccccgcgttaatcgtgggggcggccttacagctttccgctgaaacaactgcctatcttgtttctatggcgatgatcgcctctggtattggtacctggttacaagtaaaccgctacggcatcgtcggttctggcctactctcaattcagtcagtcaatttttcatttgttacggtcatgattgcgctgggcagcagcatgaaaagcgacggttttcacgaagagttaatcatgtcgtcgcttctcggcgtctccttcgttggcgcatttctggttgtcggatcttcatttatcttgccctatttacgtcgggttattacgcctaccgtcagcggtattgtggtactgatgatcggcttaagcctgattaaagtcggcattatcgattttggtggaggatttgcagccaaaagcagcggtacattcggcaattacgaacatctcggcgttggtttattggttttaattgtggtgatcggctttaactgctgtcgcagtccgttgctacgcatgggagggatcgccattgggctatgtgtcggctatatcgcatcgttatgcctgggcatggtggatttcagcagtatgcgcaatttgccgttaatcaccatcccgcatccgttcaaatacggctttagttttagcttccatcagttcctggtggttggcacgatttatctgcttagcgtgctggaagctgtcggcgatatcaccgccacggcaatggtttcccgccgacccattcagggagaagagtatcagtcccgactgaaaggcggcgtgctggcagacggtctggtttctgttatcgcctccgctgtcgggtcattacccttaaccacgtttgcgcaaaataatggggttattcagatgactggcgtcgcttcacgttatgtcgggcgaaccatcgcggtaatgctggttatcctcggtttgtttccgatgattggcggcttcttcacgaccattccctcggcagttctgggaggcgcaatgacgttgatgttttccatgattgccatcgctgggattcgcataatcatcaccaacggtttaaagcgccgagaaacacttattgtcgccacttctttaggtttaggacttggcgtctcctacgatcccgaaatttttaaaatattgccagcctctatttatgtactagttgaaaaccctatttgtgctggcgggttaactgcgattttattaaatattatcctccctggtggctaccgacaggaaaacgttctgcctggtattacctcagcggaagagatggattaa

SEQ ID NO: 2547 - protein, 466 aa, Escherichia coli IAI1
MSDINNAGSDLIFELEDRPPFHQALVGAITHLLAIFVPMVTPALIVGAALQLSAETTAYLVSMAMIASGIGTWLQVNRYGIVGSGLLSIQSVNFSFVTVMIALGSSMKSDGFHEELIMSSLLGVSFVGAFLVVGSSFILPYLRRVITPTVSGIVVLMIGLSLIKVGIIDFGGGFAAKSSGTFGNYEHLGVGLLVLIVVIGFNCCRSPLLRMGGIAIGLCVGYIASLCLGMVDFSSMRNLPLITIPHPFKYGFSFSFHQFLVVGTIYLLSVLEAVGDITATAMVSRRPIQGEEYQSRLKGGVLADGLVSVIASAVGSLPLTTFAQNNGVIQMTGVASRYVGRTIAVMLVILGLFPMIGGFFTTIPSAVLGGAMTLMFSMIAIAGIRIIITNGLKRRETLIVATSLGLGLGVSYDPEIFKILPASIYVLVENPICAGGLTAILLNIILPGGYRQENVLPGITSAEEMD

SEQ ID NO: 2548 - DNA, 1392 bp, Escherichia coli ED1a
  CDS (1)..(1392): transl_table=11
atgtctgtttccaccctcgagtcagaaaatgcgcaaccggttgcgcagactcaaaacagcgaactgatttaccgtcttgaagatcgtccgccgcttcctcaaaccctgtttgccgcctgtcagcatttgctggcgatgttcgttgcggtgatcacgccagcgctattaatctgccaggcgctgggtttaccggcacaagacacgcaacacattattagtatgtcgctgtttgcctccggtgtggcatcgattattcaaattaaggcctggggtccggttggctccgggttgttgtctattcagggcaccagcttcaactttgttgctccgctgattatgggcggcacagcgctgaagaccggtggtgctgatgttcctaccatgatggcagctttgttcggcacgttgatgctggcaagttgtaccgagatggtgatctcccgcgttctgcatctggcgcgccgcattattacgccactggtttctggcgttgtggtgatgattatcggcctgtcgctaattcaggttggactgacctccattggcggcggttacgcagccatgagcgataacaccttcggcgcaccgaaaaatctgctgctggcaggcgtggtcttagccttaattatcctgcttaaccgtcaacgtaacccttacttacgcgtggcctcactggtcattgcgatggcggccggatatgcgctggcgtggtttatgggcatgttgccagaaagcaacgaaccgaggacacaagaactgattatggtgccaacgccgctctattacggtcttggcattgaatggagtctgctgctgccgctgatgctggtctttatgatcacttcgctggaaaccattggcgatatcacggcgacctctgacgtttccgaacagccggtttccggtccgctgtacatgaaacgcctgaaaggcggcgtgctggcaaacggcctgaactcgtttgtctcggcggtatttaataccttcccgaactcctgcttcgggcagaacaacggggtgatccagttaaccggtgttgccagccgctatgtcggttttgtcgtcgcgctgatgttgatcgtgctgggtctgttcccggcagtgagcggttttgtacaacacattccagaaccggttctgggcggcgcaacgcttgtaatgtttggcaccatcgccgcctccggtgtgcgtatcgtttctcgtgagccgctgaaccgccgggcaattctgattatcgcgctgtcgctggcggtcggtctgggcgtgtctcagcagccgctgattttgcagtttgcccctgaatggctgaaaaacctactctcctccgggattgccgcgggcggtattactgccatcgtgctgaatctgattttcccaccagaaaaacagtaa

SEQ ID NO: 2549 - protein, 463 aa, Escherichia coli ED1a
MSVSTLESENAQPVAQTQNSELIYRLEDRPPLPQTLFAACQHLLAMFVAVITPALLICQALGLPAQDTQHIISMSLFASGVASIIQIKAWGPVGSGLLSIQGTSFNFVAPLIMGGTALKTGGADVPTMMAALFGTLMLASCTEMVISRVLHLARRIITPLVSGVVVMIIGLSLIQVGLTSIGGGYAAMSDNTFGAPKNLLLAGVVLALIILLNRQRNPYLRVASLVIAMAAGYALAWFMGMLPESNEPRTQELIMVPTPLYYGLGIEWSLLLPLMLVFMITSLETIGDITATSDVSEQPVSGPLYMKRLKGGVLANGLNSFVSAVFNTFPNSCFGQNNGVIQLTGVASRYVGFVVALMLIVLGLFPAVSGFVQHIPEPVLGGATLVMFGTIAASGVRIVSREPLNRRAILIIALSLAVGLGVSQQPLILQFAPEWLKNLLSSGIAAGGITAIVLNLIFPPEKQ

SEQ ID NO: 2550 - DNA, 1407 bp, Pseudomonas aeruginosa LESB58
  CDS (1)..(1407): transl_table=11
atgcatagcgaagaccagcgccccaacgacctcatctacggcctcgacgaccggccgcgcccgcttcccgccttccttgccgcgctacagcacgtgctggccagcttcgtcggtatcgtcactccgccgctggtgatcggctcgctgctcggcctcggcgagcacctgccatacctgatcagcatggcgctgatggtttccggcgccggcaccctgatccaggcgcgccggccgttcggcatcggcgccgggatgatctgcctgcaaggcaccagcttcgccttcctcggcgccgtgctggccgccgggatgctggtgaagcagcgcggcggcggtcccgaggagatcctcgcgatgatcttcggcgtgtgcttcttcggcgccttcgtgcagatcgtcctcagtcgtttcctcggccatcttcgccgggtgatcacgccgctggtcaccggcatcgtcatcaccctgatcggcgtcagcctgatcaaggtcggcatcaccgacctcggcggcggagccggggccacggacttcggcgcaccggccaatctcgcgctgggcgcgctggtgctgctgagcatcgtcctgctgaaccgctcgcgcctgccctggctgcgcctggccgccatcgtcatcggcctggcgctgggtaccctggcggcctgggcgaccggcctgttcgttccgcgggcgttgcccgagctgccgctggtcagcctgccgcagccgttccgcttcggcttcgccttcgactggatggccttcctgccggtggcgctgatctacctgatcagcagcatcgagacagtcggcgatctgaccgccaactgcatgctctcgcggcagcccctggagggaccggcgtacctgcagcggttgcgcggcggggtgctcggcgacggcgtcagttgcctgctggcagccaccttcagcgccttcccgaacaccaccttcgcgcagaacaacggggtgatccagctcaccggggttgccagccggcacgtcgggatctatatcggcggcgtgttgctggcgctcggcctgttcccctgggtcggcgcgatcctccagcagatccccaagccggtgctcggtggcgccaccctggtgatgttcggcagcgtcgccgccgccggcatccgcattctcggccagaccccgatggaccgccgcagcgtgctgatcatcgccgcctcgttcggcgtcggcctcggcgtggccgcgcagccgaccctgctcgaccagatgccggcggtggtgaagaccctgttcgactcggcgatcaccagcggcggcatcaccgccatcctgctcaacctgctgctgcccgaggagcgcgttgccgaagcggcgcaggccagcgcgaagggcggcgccctggcgcgctggcgcaagccgctgggttga

SEQ ID NO: 2551 - protein, 468 aa, Pseudomonas aeruginosa LESB58
MHSEDQRPNDLIYGLDDRPRPLPAFLAALQHVLASFVGIVTPPLVIGSLLGLGEHLPYLISMALMVSGAGTLIQARRPFGIGAGMICLQGTSFAFLGAVLAAGMLVKQRGGGPEEILAMIFGVCFFGAFVQIVLSRFLGHLRRVITPLVTGIVITLIGVSLIKVGITDLGGGAGATDFGAPANLALGALVLLSIVLLNRSRLPWLRLAAIVIGLALGTLAAWATGLFVPRALPELPLVSLPQPFRFGFAFDWMAFLPVALIYLISSIETVGDLTANCMLSRQPLEGPAYLQRLRGGVLGDGVSCLLAATFSAFPNTTFAQNNGVIQLTGVASRHVGIYIGGVLLALGLFPWVGAILQQIPKPVLGGATLVMFGSVAAAGIRILGQTPMDRRSVLIIAASFGVGLGVAAQPTLLDQMPAVVKTLFDSAITSGGITAILLNLLLPEERVAEAAQASAKGGALARWRKPLG

SEQ ID NO: 2552 - DNA, 1386 bp, Pseudomonas aeruginosa LESB58
  CDS (1)..(1386): transl_table=11
atgagttccctgcaaagcccgtcggacgccagcgcccgcaacgacctggtctatggcctggacgaccgtcccagcgctcccatcgccctgctcgccgccctccagcacctgctggcgatcatcgtgccgatcgttacccctggcctgctgatctgccaggcgctgggcgtatcgccgcgcgacaccaatctgatcgtgtcgatgtcgctggtgatctccggcatcgccaccttcgtccagtgcaagcgcttcggcccgttcggcgccggactgttgatcgtccagggcaccagcttcaacttcgtcggcccgctgatcgccggcggggcgctgatggtcaagcagggcacgccggtggaaagcgtgatggcggcgatcttcggcgtggtcatcgccggctccttcgtcgagatgggcatctcgcgcatactgccgttcgtcaagcggctgatcaccccgctggtgaccggcatcgtcgtgctgatgatcggcctgaccctgatcaaggtcggcctgatcagcatgggcggcggcttctcggcgatgtccaacggcaccttcgccaacggcgagaacctgctgctgtccggtgtggtgctgggcatcatcgtggtgctcaaccgcatcccggtggtatggatgcgcagttgcgccatcgtcatcgccctggccgtcggctacgcgctggccggctacctcggtcgcctggacttcaccggcatgcaccaggccgagctgttccagataccgaccccgctgcacttcggcctggacttctcctggccgctgttcatcccgatgctggtgatctacctggtcacctccctggaagccatcggcgacgtcaccgccaccagcaaggtgtcgaagcaaccggtggaaggcccgctgtggatgcagcggatcaagggcggcgtgctggtcaacggcgccaactcgttcctcgccggtatcttcaataccttccccagctcagtgttcgcccagaacaacggggtgatccagctcaccggcgtggccagccgctacgtcggcctctggatcgccgccatgctggtcctgctcggcctgttcccgagcgtcgccggggtcatccaggcggtgccggaaccggtactgggcggcgcggcgatggtgatgttcggcgcggtggccgcttcgggcatcaacatcctcgccggcatccagctggaccgccgtgccctgctgatcatcgccgtatccctggccctcggcctgggcgtttcgcaggtgccggagttcctcgcgcacatgcccgcggcgctgcgcaacgtgctggagtccggggtcgccaccggcggcatctgcgccctgctgctgaactggttcctgccggaaagcccggtccagaaggccggacactga

SEQ ID NO: 2553 - protein, 461 aa, Pseudomonas aeruginosa LESB58
MSSLQSPSDASARNDLVYGLDDRPSAPIALLAALQHLLAIIVPIVTPGLLICQALGVSPRDTNLIVSMSLVISGIATFVQCKRFGPFGAGLLIVQGTSFNFVGPLIAGGALMVKQGTPVESVMAAIFGVVIAGSFVEMGISRILPFVKRLITPLVTGIVVLMIGLTLIKVGLISMGGGFSAMSNGTFANGENLLLSGVVLGIIVVLNRIPVVWMRSCAIVIALAVGYALAGYLGRLDFTGMHQAELFQIPTPLHFGLDFSWPLFIPMLVIYLVTSLEAIGDVTATSKVSKQPVEGPLWMQRIKGGVLVNGANSFLAGIFNTFPSSVFAQNNGVIQLTGVASRYVGLWIAAMLVLLGLFPSVAGVIQAVPEPVLGGAAMVMFGAVAASGINILAGIQLDRRALLIIAVSLALGLGVSQVPEFLAHMPAALRNVLESGVATGGICALLLNWFLPESPVQKAGH

SEQ ID NO: 2554 - DNA, 1386 bp, Yersinia pseudotuberculosis IP 32953
  CDS (1)..(1386): transl_table=11
atgtctacgcaatctgccgaacttgatactgcacagccatcaccggctcgccccagcgaattgatctaccacctagaagaccgaccgccactcccacaaacactgtttgccgcttgccagcatctcttggcgatgtttgttgcggtaatcacccccggtttattgatttgtcaggctttggggttacccgcagaagatactcaacgcattattagtatgtcgttatttgcttcgggcctagcgtctttactgcagattaaaacttggggccccgtgggttcaggcctgttatccattcaaggcaccagttttaactttgtttctccgttgattatgggggggctggcgctaaaaaacggtggggcggatatcccaacgatgatggcggcgctgttcggtacgttaatggttgcgtcctgcaccgagatcttactctcacgtgtgctgcatctggcacgccgtattatcaccccgctggtatccggtattgtggtgatgattatcggcctgtcattgattcaagttgggctgacatctattggtggtggttatggtgcgatgagcgataacacctttggtgcaccgaaaaacttattattagccggtgccgtattgggggtgatcattctgcttaaccgccagcgtaacccgtatttacgtgttgcctctttggttatcgctatggccgtgggttatctgctcgcctgggcattggggatgttgcctgagagccgcccagttgtagataccgcgctgattactattccaacgccgttgtactatgggctgtccttcgactggaacttactgattcctctgatgctgatctttatggtgacctcactggaaaccataggcgatattaccgcaacatctgatgtatcagagcaaccggttcgcggcccgttatatatgaaacgcctaaaaggcggtgtactggccaatggtttgaactcgatgctgtccgctatattcaataccttccccaactcctgcttcggtcagaataatggcgtgatccaattgaccggcgttgccagccgttatgtcggttttgttgtggcaataatgctcatcattctgggcctgttccctgctgtcgctgggtttgtgcagcatattcctgagccggtactgggtggagcaactctcgtgatgttcgggactatcgcagcgtctggagtgcgtattgtgtcacgcgagaccctgaatcgccgggcgattatgataatggccttatcattagcggttggtatgggtgtcgcacagcagccattgattttgcaatttgcgcctgactggatcaaaacgctgttctcttctgggattgccgctggcggtattactgccatcgtacttaacttactcttcccacaagaaaaatag

SEQ ID NO: 2555 - protein, 461 aa, Yersinia pseudotuberculosis IP 32953
MSTQSAELDTAQPSPARPSELIYHLEDRPPLPQTLFAACQHLLAMFVAVITPGLLICQALGLPAEDTQRIISMSLFASGLASLLQIKTWGPVGSGLLSIQGTSFNFVSPLIMGGLALKNGGADIPTMMAALFGTLMVASCTEILLSRVLHLARRIITPLVSGIVVMIIGLSLIQVGLTSIGGGYGAMSDNTFGAPKNLLLAGAVLGVIILLNRQRNPYLRVASLVIAMAVGYLLAWALGMLPESRPVVDTALITIPTPLYYGLSFDWNLLIPLMLIFMVTSLETIGDITATSDVSEQPVRGPLYMKRLKGGVLANGLNSMLSAIFNTFPNSCFGQNNGVIQLTGVASRYVGFVVAIMLIILGLFPAVAGFVQHIPEPVLGGATLVMFGTIAASGVRIVSRETLNRRAIMIMALSLAVGMGVAQQPLILQFAPDWIKTLFSSGIAAGGITAIVLNLLFPQEK

SEQ ID NO: 2556 - DNA, 1326 bp, Bacteroides fragilis YCH46
  CDS (1)..(1326): transl_table=11
atgaaaacagacttgatatacggtattgaagaccgtccgccttttaaagatgcattatttgcggcattgcagcatctgcttgctatttttgtagctattattactccgccgttgattatcgccagtgccttgaaactggatgtggagaaaaccggtttcttggtttcgatgtctctctttgcttcgggggtatctacttttatccagtgtcgccgttttggacctataggggcaaagttgctttgtattcagggaacaagtttttcgtttatcggtcctatcattgctacgggacttgtcggtggacttcctcttatttttggtgtctgtatggcggctgctcccattgaaatgatcatcagccgcactttcaaatatatgcgtaatattattactccgttggtttcgggtatcgtggtgttgcttatcgggttaagtctgataaaagtaggtattatctcttgtggaggtggttatactgcgatggataatggtacgtttgcttcttgggagaatctttcgattgcaggtgcggttttgctcagcgtgctgttttttaaccgttgcaagaataagtatttgcgcatgagttccattgtgttgggactctgtttgggatacggccttgcttttgttttgggaaaagtagatatgagtgctttgaatgtagagatgctgatgagtttcaatattccccagccttttaaatacggactcgattttaatgtgtcttctttcattgccatcgggctcgtatatatgattacagctatcgaagcgaccggagacgtaacggccaattcgatgatttctggtttgaagatcgagggtgacgactatctcaaacgagtttcgggaggtgtgatggccgatggttttaactcttttctggcaggtatatttaactctttccctaattctatttttgctcagaacaatggaatcattcaattgacaggagtggccagtcggtatgtgggttactatatagctgcaatgttgattcttttggggctatttccgattgtgggagctgttttctcactgatgccggaccctgtgttaggcggagctactttgttaatgttcggaactgtcgcagcagccggaatccgcattgttgcatcacaaaatatcggacggaaggaaacattggtattggctgtcagtctttcattgggacttggagtagaattgatgcccgatgtgttaagccaggctccggaagctattcgtagtatcttttcgtctggcatcacgaccggtggtttgactgctatcatagcgaatatcgtaattcgggtgaaagaggaaaacgaggaataa

SEQ ID NO: 2557 - protein, 441 aa, Bacteroides fragilis YCH46
MKTDLIYGIEDRPPFKDALFAALQHLLAIFVAIITPPLIIASALKLDVEKTGFLVSMSLFASGVSTFIQCRRFGPIGAKLLCIQGTSFSFIGPIIATGLVGGLPLIFGVCMAAAPIEMIISRTFKYMRNIITPLVSGIVVLLIGLSLIKVGIISCGGGYTAMDNGTFASWENLSIAGAVLLSVLFFNRCKNKYLRMSSIVLGLCLGYGLAFVLGKVDMSALNVEMLMSFNIPQPFKYGLDFNVSSFIAIGLVYMITAIEATGDVTANSMISGLKIEGDDYLKRVSGGVMADGFNSFLAGIFNSFPNSIFAQNNGIIQLTGVASRYVGYYIAAMLILLGLFPIVGAVFSLMPDPVLGGATLLMFGTVAAAGIRIVASQNIGRKETLVLAVSLSLGLGVELMPDVLSQAPEAIRSIFSSGITTGGLTAIIANIVIRVKEENEE

SEQ ID NO: 2558 - DNA, 1389 bp, Burkholderia mallei ATCC 23344
  CDS (1)..(1389): transl_table=11
atgcaacccgcccccctcgcccgccccgcttcccacggcgccgacgccgccgaatccgcgcacgatctcgtctacggccccgacgagcgccccgcgccgatgatcgcctgcgtcgccgcgctccagcatctgctcgcgatcctcgtgccgatcgtcacgcccggcctgctgatctgccaggcgctcggcgtatcgagccgcgacacgacgctgatcgtgtcgatgtcgctcgtgatctccggcatcgcgaccttcgtccagtgcaggcgcttcggcccgctcggcgcgggcctgctgatcgtccagggcacgagcttcaacttcgtcgggccgctgatcgcgggcggcagcctgatggtcaagcagggcacgccggtcgaaaccgtgatggccgcgatcttcggcgtcgtcatcgccggctcgttcgtcgagatggccgtgtcgcgcatcctgcctttcgtgaagcgcctgatcaccccgctcgtcaccggcgtcgtggtgctgctgatcggcctcacgctcatcaaggtcggcctcgtcagcatgggcggcggctatggcgcgatcgccaagggcagcttcggcagcgcccagaacctgacgctgtcggggctcgtgctcggcgccatcatcgtgctcaatcgcgtgcccatcgtctgggtgcgcagcaccgcgctcgtcatcgcgctcgcgatcggctatctcgcggccgccgcgatgggccgtctcgatttcaccggcgcgcgcgaggccgcgctgttccagatcccgacgccgctgcacttcggcctgggcttctcgtgggcgctgttcgtgccgatgctgatcatctatctcgtcacgtcgctcgaggcgatcggcgatgtcacggccacgagcaagatctcgcggcaacccgtcgaggggccgctgtggatgcggcgcatcaagggcggcgtgctcgtcaacggcgcgaactcgctgctcgccggcgtcttcaatacgttccccagctcggtcttcgcgcagaacaacggcgtgatccagctcaccggcatcgcgagccgccatgtcggcatctggatcgcgggcatgctcgtgctgctcgggctcttccccgtcgtcgcgggcgtcctgcaagcggtacccgagcccgtgctcggcggcgcggcgatggtgatgttcggcgcggtggccgcgtccggcatcaatatcctcgccggcatccggctcgatcgccgcgcgctgctgatcatcgcggtgtcgctcgcgctcggcctgggcgtgtcgcaggcgccggagatcctgacgaacctgccgcacgcgctcgggaacgtgctcgaatcgggcgtcgcgacgggcggcatctgcgcgctcgtgatgaactggttcctgcccgagaagcaatga

SEQ ID NO: 2559 - protein, 462 aa, Burkholderia mallei ATCC 23344
MQPAPLARPASHGADAAESAHDLVYGPDERPAPMIACVAALQHLLAILVPIVTPGLLICQALGVSSRDTTLIVSMSLVISGIATFVQCRRFGPLGAGLLIVQGTSFNFVGPLIAGGSLMVKQGTPVETVMAAIFGVVIAGSFVEMAVSRILPFVKRLITPLVTGVVVLLIGLTLIKVGLVSMGGGYGAIAKGSFGSAQNLTLSGLVLGAIIVLNRVPIVWVRSTALVIALAIGYLAAAAMGRLDFTGAREAALFQIPTPLHFGLGFSWALFVPMLIIYLVTSLEAIGDVTATSKISRQPVEGPLWMRRIKGGVLVNGANSLLAGVFNTFPSSVFAQNNGVIQLTGIASRHVGIWIAGMLVLLGLFPVVAGVLQAVPEPVLGGAAMVMFGAVAASGINILAGIRLDRRALLIIAVSLALGLGVSQAPEILTNLPHALGNVLESGVATGGICALVMNWFLPEKQ

SEQ ID NO: 2560 - DNA, 1380 bp, Photobacterium profundum SS9
  CDS (1)..(1380): transl_table=11
atgacccgccagcatagcgacattgaaataccgcgtaattcagatctcatttaccgtttagaagatcgaccgccgctaccacaaacattatttgcggccactcagcacttactggctatgtttgtcgcagtgatcacaccgtcgttgattatctgtcaagctctgggtttacctgcaagcgataccaacaccatcgttagcatgtctttattcgcttctggtattgcttcatttatccaaattcgtacatttggcccgattggctcggggttactgtctattcaaggaaccagtttcaacttcttaggccctatcattggggcaggcttagccctaaaggctggtggcgctgatgttccgacgatgatggcagctatctttggtaccattctggtggcttcattaaccgaagtgttcatctctcgcgtactgcaacatgcgcagcgtgttatcacaccgctagtatcaggtattgttgtcaccctgatcggtctaaccctgatccaaattggtctaacatcagtgggcggtggctatgctgcaattaacgacggtagctttggtagccttgaaaacttaatgcttgcaggtacggtattaggtttcattgttttattaaaccgcttcaaaaatccttacctacgcgtttcatcgattgtgctcgccatggcagcaggaacggtattggcttggttcacaggtatgcttaatgcccctcaagaaacgcaacatgccttcatggcgattccaatgccgatgcaatatggtctgggctttgattgggggctgcttattccgctagtgatcgtttttgcgattacatcgcttgaggcaattggggatattactgcaacatcagaaacctctgaacaacctgttgctggtcctctttatttaaagcgtattaaaggcggcgtattagccgatggcattaactcagccatggcatccgtattaaatagcttccctaattcaaccttcagccaaaataatggcatcatccagttaacaggtgtagcgagtcgttatatcggatatttcgttgccggcatgctggtactgttaggtttattcccaggtgtcgcaaaccttgttcagttaattccagaaccggtgctaggcggtgcaacgattgtgatgtttggcacaatcgccgcttcaggtattcgtattatctcgcgctgcgatctagaccgtcgtgccattcttatcatggcgctgtctttctctatggggctgggcattgctcaaaaacctgaaattctgcaatttatgccagattgggtgaaaggtattttatcgtcaggcatggcggcgggtggcatcactgcaattattctgaaccttgtacttcccgaagagaagaaaaacacagactaa

SEQ ID NO: 2561 - protein, 459 aa, Photobacterium profundum SS9
MTRQHSDIEIPRNSDLIYRLEDRPPLPQTLFAATQHLLAMFVAVITPSLIICQALGLPASDTNTIVSMSLFASGIASFIQIRTFGPIGSGLLSIQGTSFNFLGPIIGAGLALKAGGADVPTMMAAIFGTILVASLTEVFISRVLQHAQRVITPLVSGIVVTLIGLTLIQIGLTSVGGGYAAINDGSFGSLENLMLAGTVLGFIVLLNRFKNPYLRVSSIVLAMAAGTVLAWFTGMLNAPQETQHAFMAIPMPMQYGLGFDWGLLIPLVIVFAITSLEAIGDITATSETSEQPVAGPLYLKRIKGGVLADGINSAMASVLNSFPNSTFSQNNGIIQLTGVASRYIGYFVAGMLVLLGLFPGVANLVQLIPEPVLGGATIVMFGTIAASGIRIISRCDLDRRAILIMALSFSMGLGIAQKPEILQFMPDWVKGILSSGMAAGGITAIILNLVLPEEKKNTD

SEQ ID NO: 2562 - DNA, 1392 bp, Salmonella enterica subsp. enterica serovar Choleraesuis str. SC-B67
  CDS (1)..(1392): transl_table=11
atgtccgttaacgccatcgagccggcagatgcgcaaccggttgcgcagacgcaaaacagcgaattaatttaccgtcttgaagatcgcccgccgctccctcaaaccctttttgccgcttgtcagcatctgctggccatgtttgtcgcggtaatcacgccagcgctgttaatctgccaggcgttgggtttaccggcgcaggatacgcagcacattatcagcatgtcgctgttcgcctccggcgtagcctctattattcaaatcaaagcgtgggggccggtaggatcggggctgttatccatccagggaaccagttttaactttgtcgccccgctgattatgggcggtaccgcgctgaaaaccggcggcgcggacgtcccgacgatgatggcggcgctgttcggcacgctgatgctggcaagctgcaccgagatggtgctttctcgcattctacatctggcgcgccggattatcacgccgttagtctccggcgtcgtggtgatgattattggcctgtcgctgattcaggtggggctaacttccatcggcggcggctatgccgccatgagcggcaacacctttggcgcaccgaaaaacctgttactggccggcgtcgtcctggccattatcatcctgctgaatcggcaacgtaatccctacctgcgcgtggcttctttggttattgccatggcggcaggctatcttttggcctggtttatgggcatgttgcctgagaataacgcgccggtctcgcaggacatcctgatggtgccgaccccgctgtattatggtctgggcattgactggaacctgttactgccgttgatgctggtctttatgattacgtcgctggagaccatcggagatatcaccgccacctctgatgtctccgagcagccggtatccggccccttgtacatgaaacggctaaagggcggcgtactggctaacggcctgaactcatttgtttcagcggtatttaatacgttcccgaattcctgtttcggtcagaacaacggcgtaattcagttgactggcgtcgccagtcgctatgtgggatttgttgtcgcgctgatgctgattgtactcggcctattcccggcggtaagcggttttgtgcagcatatcccggaaccggtgctcggcggcgccacgttggtgatgttcggcaccattgccgcctccggggtgcgtattgtctcgcgtgagccgctgaaccgccgcgcgattctgattatcgccctgtcgctggccgtgggtcttggcgtctcgcaacagccgcagatcctgcagttcgcgccggaatgggtgaaaaatctgctctcatccggaattgccgctggcggcatcacggctatcgtgctgaacctgattctcccgccggaaaaaccgtaa

SEQ ID NO: 2563 - protein, 463 aa, Salmonella enterica subsp. enterica serovar Choleraesuis str. SC-B67
MSVNAIEPADAQPVAQTQNSELIYRLEDRPPLPQTLFAACQHLLAMFVAVITPALLICQALGLPAQDTQHIISMSLFASGVASIIQIKAWGPVGSGLLSIQGTSFNFVAPLIMGGTALKTGGADVPTMMAALFGTLMLASCTEMVLSRILHLARRIITPLVSGVVVMIIGLSLIQVGLTSIGGGYAAMSGNTFGAPKNLLLAGVVLAIIILLNRQRNPYLRVASLVIAMAAGYLLAWFMGMLPENNAPVSQDILMVPTPLYYGLGIDWNLLLPLMLVFMITSLETIGDITATSDVSEQPVSGPLYMKRLKGGVLANGLNSFVSAVFNTFPNSCFGQNNGVIQLTGVASRYVGFVVALMLIVLGLFPAVSGFVQHIPEPVLGGATLVMFGTIAASGVRIVSREPLNRRAILIIALSLAVGLGVSQQPQILQFAPEWVKNLLSSGIAAGGITAIVLNLILPPEKP

SEQ ID NO: 2564 - DNA, 1440 bp, Pseudomonas fluorescens Pf-5
  CDS (1)..(1440): transl_table=11
ttgcaaagacctcggcaccttgaaccccagcccgagctccacgccatgcagccagatgcttcccgccccagcgaactgatctacggcctcgacgaccgcccgcaacccctgcccgcgctgctggcggccctgcagcatgtgctggccagctttgtcggcatcatcaccccaccactggtgattggttcggccctgggcctttcgacgcacctgccgtacctgatcagcatggcgctgatggtctccggggtcggcacctttatccaggcccggcgcccctggggcatcggggccggcatgatctgcctgcaaggcaccagcttcgccttcctcggtgccgtactgtcggcggggttcctggtcaagcaacggggtggcagcccggaagacatcctggcgatgatcttcggcgtgtgtttcttcggcgcgctggtgcagatcgtcctcagccgctttatcgggcgactgcgccgggtgatcaccccgttggtgaccggcatcgtcattaccctgatcggcatcagcctgatcaaggtcggcatcaccgacctgggcggcggcttcaatgccgcggacttcggcgccccgggcaatctcggcctgggcctgctggtgctgctgaccatcattctgctcaaccgcagcaacaccccgtgggtgcgcctcagcgccatcatcatcggcctggccctgggcagcctggcggcctggttcagcggcaagctggtgccccagccgctgccggacctgccgttgatcagcctgcccctgcccttcaggtacggcttcagtttcgactggagcgcctttattcccgtagccctgatctacctgatcagcaccctggaaaccgtgggagatctgaccgccaactgcatgctggcgcgccagcccattagcggcccttcctatataagccggctcaagggcggggtcctgggggacggcgtcagttgcatgatcgccgccaccttcagcgccttccccaacaccaccttcgcccagaacaacggggtgattcagttgaccggtgtggccagccgcttcgtcggcctgtacatcggcctgatcctgttctgcctgggcctgttcccgctgatcggcgcgctgctgcaacagatccccaagccggtactcggcggtgccaccctggtgatgtttggcagcgtcgccgcagccggggtacggatcctcgcccaggccccgctggaccggcgcagcatgctgatcatcgccacttcgttcggcgtcggcctgggcatcgccgcgcaaccgaacctgctgcacctgctgcccaaggtggtgcagaacctgttcgattcggcgatcaccagcggcggcctcaccgccttgctgatgagcctgctgttgccggaaagcaagggcgcggcgaatgacgcaaatccgattccggaaaacgacaccctgaaggcccactga

SEQ ID NO: 2565 - protein, 479 aa, Pseudomonas fluorescens Pf-5
MQRPRHLEPQPELHAMQPDASRPSELIYGLDDRPQPLPALLAALQHVLASFVGIITPPLVIGSALGLSTHLPYLISMALMVSGVGTFIQARRPWGIGAGMICLQGTSFAFLGAVLSAGFLVKQRGGSPEDILAMIFGVCFFGALVQIVLSRFIGRLRRVITPLVTGIVITLIGISLIKVGITDLGGGFNAADFGAPGNLGLGLLVLLTIILLNRSNTPWVRLSAIIIGLALGSLAAWFSGKLVPQPLPDLPLISLPLPFRYGFSFDWSAFIPVALIYLISTLETVGDLTANCMLARQPISGPSYISRLKGGVLGDGVSCMIAATFSAFPNTTFAQNNGVIQLTGVASRFVGLYIGLILFCLGLFPLIGALLQQIPKPVLGGATLVMFGSVAAAGVRILAQAPLDRRSMLIIATSFGVGLGIAAQPNLLHLLPKVVQNLFDSAITSGGLTALLMSLLLPESKGAANDANPIPENDTLKAH

SEQ ID NO: 2566 - DNA, 1440 bp, Pseudomonas fluorescens Pf-5
  CDS (1)..(1440): transl_table=11
atgaccgcacccgaccgctcccctccccgctacaagtcagacctgatctacggcctcaacgaccgtccgcatttcagcgcggcgatcttcgccgccctgcagcatgtgctggccagtttcgtcggcatcatcagcccgaccctgatcttcggcggggtcctggggctggaaagcgagctgccgtacctgatcagcatggcgctgttcgtctccggcctgggcaccttcgtccaggcccggcgcctggggcccatcggttccggcctgctgtgcgtgcaaggcaccagcttttcctttatcagcgtgctgctcagtgccggcttcatggtcaagggccggggcggcgacaccaacgaaatcctctccaccatcttcggcatctgctttgtcgcagcctttatcgagatgttcctcagccagttcatcggcaagttgcgcaagctgatcaccccggtggtgaccggcaccatcatcaccctgatgggcctgtcgctgatcaaggtggcggtcaccgacatggccggcggctacggtgccagtgacctgggcgcggcgagcaacctggggctggcggcgctggtgctgctgaccatcgtggtgctcaaccgcttcaaccacccgatgctgcgcctgggctccatcgtcatcggcctgaccctgggcttcgtggtggcctggatgctcggccgggtggacatggcggccatgcccgaggtgcccctggtgagcgtgccggtgccgttcaagtacggcttctccttcgacctgatcgccttcattcccctggcggtgatcttcctgatttcccccctggaagcagccggcgacctgacggccaactcgatgatttcccagcagccggtcaagggcccgctgtacatcaagcgcatcaagtccgggctgctggcggacggtttcaactcggcggtggcagcggtgttcaacagcctgccgatggtcacctttgcccagaacaacggggtcatccaactgaccggcgtggccagccgctacgtggcctacttcattgccgggctgctggtgctgctgggcctgttcccggtgatcggcgcggtgctgcaactgatgcccaagccggtactgggcggcgccaccctgatcatgttcggtaccgtggccgtggccgggatcaagatcctcgccgaggccgggctgcaccggcgcaacgtgctgatcgtggccatctccctgggcatgggcctgggcgtggcggcggtgccggaagtgctgcgcgagctgcccaaggcgctgcacaacatcttcgagtcgccgattaccgtgggcgccttctgcgcgatcttcctgaacatcttcctgccggaggaattccttgagctggaagaagacgagttcgatccggaagcggcgaccctcaaggtcatgcaagacccggacatgagcggcaaagcgaactcctga

SEQ ID NO: 2567 - protein, 479 aa, Pseudomonas fluorescens Pf-5
MTAPDRSPPRYKSDLIYGLNDRPHFSAAIFAALQHVLASFVGIISPTLIFGGVLGLESELPYLISMALFVSGLGTFVQARRLGPIGSGLLCVQGTSFSFISVLLSAGFMVKGRGGDTNEILSTIFGICFVAAFIEMFLSQFIGKLRKLITPVVTGTIITLMGLSLIKVAVTDMAGGYGASDLGAASNLGLAALVLLTIVVLNRFNHPMLRLGSIVIGLTLGFVVAWMLGRVDMAAMPEVPLVSVPVPFKYGFSFDLIAFIPLAVIFLISPLEAAGDLTANSMISQQPVKGPLYIKRIKSGLLADGFNSAVAAVFNSLPMVTFAQNNGVIQLTGVASRYVAYFIAGLLVLLGLFPVIGAVLQLMPKPVLGGATLIMFGTVAVAGIKILAEAGLHRRNVLIVAISLGMGLGVAAVPEVLRELPKALHNIFESPITVGAFCAIFLNIFLPEEFLELEEDEFDPEAATLKVMQDPDMSGKANS

SEQ ID NO: 2568 - DNA, 1398 bp, Pseudomonas syringae pv. phaseolicola 1448A
  CDS (1)..(1398): transl_table=11
atgcagcctgaaacactcgacaacgatgacctgatttacggcctgaatgatcgcccaagacctttaacggccatattggcagcgttccagcatgtcctcgctagcttcgtcgggatcatcaccccgccgttgatcatcggatcgacgctcggcctgactcaatacctgccgtatctgatcagcatggccctgatggtgtcgggcacaggtactttcattcaggcgcgccgcccgtttggtatcggcgcaggcatgatctgcctgcaaggcaccagcttcgctttcttgggcgcggtgttgtccgcgggttttctggtcaagcaacgcggcggcagcccggaggacatcatggcgatgatcttcggcgtgtgctttttcggcgcgcttgtgcaaatcgtgctcagtcgctgtattggccagttgcgacgtgtcatcacgccgctggtgaccggcattgtcatcacgctgattggtgtaagcctgatcaaggtaggtgtgacggacctggtcggcggcttcaacgcaactgacttcggcgcgccgttgaacctggcgctgggtgccttcgttctggcagtgatcatcgtacttaatcgttcgaatacgccctgggtgcgcttgtcggcgatcatcatcggcctggcggtcggcagtctcgccgcctggttcagcggcaagctgattccacagccgatccacgacctgcccttgatcagcgtgccggtgccgttccgttttggtttcagctttgactggaccgctttcctgccggtcgcgctgatttatctgatcagcagtatcgaaacggtcggcgacctgacggccaattgcatgctagcccgccagccgatcagtggcccgagctacgtggcgcgcctcaagggtggcgtgctgggcgacggtgtgagctgcatgattgccgcaacgttcagtgcattccccaacaccacctttgcgcagaacaacggcgtgatccagctgaccggcgttgccagtcgctatgtcggactgtacatcggcgcggtgctgttcgtgctcgggctgttcccgcacatcggtgccatcgtccagcagattcccaaaccggtactcggcggcgcaaggctggtgatgttcggcagcgtcgcggcagccggtgtgcgcattctggcccagtctccgctggaccgacgcagcatgctgatcatcgccacgtcactgggtgtcggtctgggtatcgccgcgcagcctgcgctgctgcatcagatgcccaaactggtacagaacctgttcgattcggccatcaccagcggcggcatcacagccatcgtaatgtgcctgctgattccggaaggaaaggtcgccgtgacccggaatgattcagcgacggaacccaatccccttgaacaaccacgatag

SEQ ID NO: 2569 - protein, 465 aa, Pseudomonas syringae pv. phaseolicola 1448A
MQPETLDNDDLIYGLNDRPRPLTAILAAFQHVLASFVGIITPPLIIGSTLGLTQYLPYLISMALMVSGTGTFIQARRPFGIGAGMICLQGTSFAFLGAVLSAGFLVKQRGGSPEDIMAMIFGVCFFGALVQIVLSRCIGQLRRVITPLVTGIVITLIGVSLIKVGVTDLVGGFNATDFGAPLNLALGAFVLAVIIVLNRSNTPWVRLSAIIIGLAVGSLAAWFSGKLIPQPIHDLPLISVPVPFRFGFSFDWTAFLPVALIYLISSIETVGDLTANCMLARQPISGPSYVARLKGGVLGDGVSCMIAATFSAFPNTTFAQNNGVIQLTGVASRYVGLYIGAVLFVLGLFPHIGAIVQQIPKPVLGGARLVMFGSVAAAGVRILAQSPLDRRSMLIIATSLGVGLGIAAQPALLHQMPKLVQNLFDSAITSGGITAIVMCLLIPEGKVAVTRNDSATEPNPLEQPR

SEQ ID NO: 2570 - DNA, 1530 bp, Burkholderia pseudomallei 1710b
  CDS (1)..(1530): transl_table=11
atgcgccctcgcggcacgcgcctcctcgagccgccggctttcgtcgaacacgcgcgcggccaatccgctcacccgcgacggcaggccgcccccgccgcttccgttaaaatcccgcctttccaccgcaccggccctttcgcgatgcaacccgcccccctcgcccgccccgcttcccacggcgccgacgccgccgaatccgcgcacgatctcgtctacggccccgacgagcgccccgcgccgatgatcgcctgcgtcaccgcgctccagcatctgctcgcgatcctcgtgccgatcgtcacgcccggcctgctgatctgccaggcgctcggcgtatcgagccgcgacacgacgctgatcgtgtcgatgtcgctcgtgatctccggcatcgcgaccttcgtccagtgcaggcgcttcggcccgctcggcgcgggcctgctgatcgtccagggcacgagcttcaacttcgtcgggccgctgatcgcgggcggcagcctgatggtcaagcagggcacgccggtcgaaaccgtgatggccgcgatcttcggcgtcgtcatcgccggctcgttcgtcgagatggccgtgtcgcgcatcctgcctttcgtgaagcgcctgatcaccccgctcgtcaccggcgtcgtggtgctgctgatcggcctcacgctcatcaaggtcggcctcgtcagcatgggcggcggctatggcgcgatcgccaagggcagcttcggcagcgcccagaacctgacgctgtcggggctcgtgctcggcgccatcatcgtgctcaatcgcgtgcccatcgtctgggtgcgcagcaccgcgctcgtcatcgcgctcgcgatcggctatctcgcggccgccgcgatgggccgtctcgatttcaccggcgcgcgcgaggccgcgctgttccagatcccgacgccgctgcacttcggcctgggcttctcgtgggcgctgttcgtgccgatgctgatcatctatctcgtcacgtcgctcgaggcgatcggcgatgtcacggccacgagcaagatctcgcggcaacccgtcgaggggccgctgtggatgcggcgcatcaagggcggcgtgctcgtcaacggcgcgaactcgctgctcgccggcgtcttcaatacgttccccagctcggtcttcgcgcagaacaacggcgtgatccagctcaccggcatcgcgagccgccatgtcggcatctggatcgcgggcatgctcgtgctgctcgggctcttccccgtcgtcgcgggcgtcctgcaagcggtacccgagcccgtgctcggcggcgcggcgatggtgatgttcggcgcggtggccgcgtccggcatcaatatcctcgccggcatccggctcgatcgccgcgcgctgctgatcatcgcggtgtcgctcgcgctcggcctgggcgtgtcgcaggtgccggagatcctgacgaacctgccgcacgcgctcgggaacgtgctcgaatcgggcgtcgcgacgggcggcatctgcgcgctcgtgatgaactggttcctgcccgagaagcaatga

SEQ ID NO: 2571 - protein, 509 aa, Burkholderia pseudomallei 1710b
MRPRGTRLLEPPAFVEHARGQSAHPRRQAAPAASVKIPPFHRTGPFAMQPAPLARPASHGADAAESAHDLVYGPDERPAPMIACVTALQHLLAILVPIVTPGLLICQALGVSSRDTTLIVSMSLVISGIATFVQCRRFGPLGAGLLIVQGTSFNFVGPLIAGGSLMVKQGTPVETVMAAIFGVVIAGSFVEMAVSRILPFVKRLITPLVTGVVVLLIGLTLIKVGLVSMGGGYGAIAKGSFGSAQNLTLSGLVLGAIIVLNRVPIVWVRSTALVIALAIGYLAAAAMGRLDFTGAREAALFQIPTPLHFGLGFSWALFVPMLIIYLVTSLEAIGDVTATSKISRQPVEGPLWMRRIKGGVLVNGANSLLAGVFNTFPSSVFAQNNGVIQLTGIASRHVGIWIAGMLVLLGLFPVVAGVLQAVPEPVLGGAAMVMFGAVAASGINILAGIRLDRRALLIIAVSLALGLGVSQVPEILTNLPHALGNVLESGVATGGICALVMNWFLPEKQ

SEQ ID NO: 2572 - DNA, 1389 bp, Burkholderia thailandensis E264
  CDS (1)..(1389): transl_table=11
atgcaacccgccccccttgccccacccgcttcccacggcgccgaccacgccgaatcggcccacgatctcgtctacggccccgacgatcgccccgcgccgacggtcgccttcgtcgccgcgctgcaacatctgctcgccatcctcgtgccgatcgtcacgcccggcctgctgatctgccaggcgctcggcgtggcgagccgcgacacgacgctgatcgtgtcgatgtcgctcgtgatctccggcatcgcgaccttcgtccagtgcaagcgcttcggcccgctcggcgccggcctgctgatcgtccagggcacgagcttcaacttcgtcggcccgctcatcgcaggcggcagcctgatggtcaagcaaggcacgcccgtcgaaaccgtgatggccgcgatcttcggcgtcgtcatcgccggctcgttcgtcgagatggccgtgtcgcgcatcctgcccttcgtcaagcgcctgatcaccccgctcgtcaccggcatcgtcgtgctgctgatcggcctcacgctgatcaaggtcggcctcgtcagcatgggcggcggctacggcgcgatcgccaagggcagcttcggcagcgccgaaaacctgacgctgtcggggctcgtgctcggcaccatcatcgtgctcaaccgcgtgcccgtcgtctgggtgcgcagcaccgcgctcgtcatcgcgctcgcgatcggctatctcgcggccgccgcgatgggccgcctcgacttcaccggcgcgcgcgaagccgcgctgttccagatcccgacgccgctgcacttcggcctcggcttctcatggtcactcttcgtgccgatgctgatcatctatctcgtcacgtcgctcgaggcgatcggcgacgtcacggccacgagcaagatctcgcggcagcccgtcgaggggccgctgtggatgcgccgcatcaagggcggcgtgctcgtgaacggcgcgaactcgctgctcgccggcgtcttcaacacgttcccgagctccgtcttcgcgcagaacaacggcgtgatccagctcaccggcatcgcgagccgccatgtcggcatctggatcgcgggcatgctcgtgctgctcggcctgtttcccgtcgtcgcgggcgtcctgcaagcggtgcccgagcccgtgctgggcggcgccgcgatggtgatgttcggcgcggtggccgcgtccggcatcaacatcctcgccggcatccggctagaccgccgcgcgctgctgatcatcgccgtctcgctcgccctcgggctcggcgtgtcgcaggtgccggagattctcgcgaacctgccgcacgcgctcaagaacgtgctcgaatcgggcgtcgcgacaggcggcatctgcgcgctcgtgatgaactggttcctgcccgagaagaaatga

SEQ ID NO: 2573 - protein, 462 aa, Burkholderia thailandensis E264
MQPAPLAPPASHGADHAESAHDLVYGPDDRPAPTVAFVAALQHLLAILVPIVTPGLLICQALGVASRDTTLIVSMSLVISGIATFVQCKRFGPLGAGLLIVQGTSFNFVGPLIAGGSLMVKQGTPVETVMAAIFGVVIAGSFVEMAVSRILPFVKRLITPLVTGIVVLLIGLTLIKVGLVSMGGGYGAIAKGSFGSAENLTLSGLVLGTIIVLNRVPVVWVRSTALVIALAIGYLAAAAMGRLDFTGAREAALFQIPTPLHFGLGFSWSLFVPMLIIYLVTSLEAIGDVTATSKISRQPVEGPLWMRRIKGGVLVNGANSLLAGVFNTFPSSVFAQNNGVIQLTGIASRHVGIWIAGMLVLLGLFPVVAGVLQAVPEPVLGGAAMVMFGAVAASGINILAGIRLDRRALLIIAVSLALGLGVSQVPEILANLPHALKNVLESGVATGGICALVMNWFLPEKK

SEQ ID NO: 2574 - DNA, 1455 bp, Chromohalobacter salexigens DSM 3043
  CDS (1)..(1455): transl_table=11
atgtcagccgatagcccggtttaccacctcgaggatcgccccggcccgctggcctcgctgctggccgccttccagcatgtcctggccagcttcgtgggaatcatcgcccccagtctgatcgtgggcggcgcgctgggactggagcagtacctgccctacctgctcagcatggcgctgttcgtctccggcgtggccacctggatccagtcgcagcgtctcggcccgctgggctcgggcctgttgagcattcaaggcaccagcttttcattcgtcgcggcactcatcgccgccggccaggcagcgcgcaccgacggcgccagcgacgaggccgtgatcgccacgttgatcggcgtctgcgcgatgggcagcttcatcgagatcgccctcggcggcatgctgcatcgtctcaagcgcatcatcacgcccaccgtcaccggcgtggtggtgacgctgatcggactatcgctggtcaaggtcggcgtcaccgacatggcgggaggcgtgggcgccgaggatttcggcagcctcgccaacctgggcctggcggccctggtcatcgtggtggtactggcctgccagatgtcccgccatccctggctgcgcatcggctcggtcttctacggcctggtcatcgtggtggtactggcctgccagatgtcccgccatccctggctgcgcatcggctcggtcttctacggcctggtcatcggttgcgtggccgccgtgttcacggggcacttcaacgccgaactcgagtcgctgcgctggttcgcgctgccgcaaccgctgcgcttcggcatcggcttcgactgggcagccttcgtgcccgtggccttcatctttctggtgaccgccatcgaaaccgtcggcgacctgaccggcaccgcacgcgcctcgggcgaacccatcagcggccccgtgcaccaacgtcggctgcgcggcggcgtgctcgccgacggcgtcaactcgctgcttgccgcccttttcaacacctttcccaataccaccttcagccagaacaccggcgtggtacagctcaccggcgtggccagccgccatgtcggccgctacgtggcggcgatcctgttgatgctgggcctcgtgccggcgctgggcagcgtgctgcagtacatcccgcgtcccgtgctcggcgctgccacgaccttgatgttcggcctgatcgcggtgtcgggcatccgtatcctcagcgaccaggcgatgacccgcaagacgatcatgaccatcgccgtctcgctgggcatggggctcggcgtgcagctggtgcccgaggcgctgtcggggctgccggacacggctcggcagatcttcgcctcgccgatcaccacgggcgggctgagcgccatcctgtgtacgctgctgctgcccggcggtgccccggcacccgaagaagcgcatcaaccgcaggcaggtgtcactccgcgccgatcctcgtga

SEQ ID NO: 2575 - protein, 484 aa, Chromohalobacter salexigens DSM 3043
MSADSPVYHLEDRPGPLASLLAAFQHVLASFVGIIAPSLIVGGALGLEQYLPYLLSMALFVSGVATWIQSQRLGPLGSGLLSIQGTSFSFVAALIAAGQAARTDGASDEAVIATLIGVCAMGSFIEIALGGMLHRLKRIITPTVTGVVVTLIGLSLVKVGVTDMAGGVGAEDFGSLANLGLAALVIVVVLACQMSRHPWLRIGSVFYGLVIVVVLACQMSRHPWLRIGSVFYGLVIGCVAAVFTGHFNAELESLRWFALPQPLRFGIGFDWAAFVPVAFIFLVTAIETVGDLTGTARASGEPISGPVHQRRLRGGVLADGVNSLLAALFNTFPNTTFSQNTGVVQLTGVASRHVGRYVAAILLMLGLVPALGSVLQYIPRPVLGAATTLMFGLIAVSGIRILSDQAMTRKTIMTIAVSLGMGLGVQLVPEALSGLPDTARQIFASPITTGGLSAILCTLLLPGGAPAPEEAHQPQAGVTPRRSS

SEQ ID NO: 2576 - DNA, 1380 bp, Pseudomonas entomophila L48
  CDS (1)..(1380): transl_table=11
atgagttcactcgaacagggcccgggcgccacggcgcctgccaatgaactggttctaggcctcgaagacaagccacgcctgatgatcggcctgctggccgcactgcagcacttgctggcgatcatcgtgccgatcgtcacacccggcttgctgatctgccaggcgttgggtgtatccgcccgcgacaccaacctgatcgtgtcgatgtccctggtgatctccgggatcgccacctttgtccagtgcaagcgcttcgggccattcggtgccgggctgctgatcgtccagggcaccagcttcaacttcgtcgggccgctgatcgccggtggcgcgttgatggtcaagcaagggacgccggtggaaagcgtgatggcggcgatcttcggcgtggtcatcgccggttcgttcgtggaaatgggcgtctcgcgcatcctgcccttcgtcaaacgcctgatcaccccgctggtgaccggcatcgtcgtgctgatgatcggcctgaccctgatcaaggtcggcctgatcagcatgggcggcggcttcggcgccatggccgatggcaccttcgccaacggcgagaacctgctgttgtcgggcgtggtgctggccatcatcgtcatcctcaaccgtatcccggtggtgtggatgcgcagctgcgccatcgtcatcgccctggccgtgggctatgccctggccggttacctgggccgcctggacttcaccggcatgcaccaggccgcactgttccaggtgcccaccccgctgcacttcggcttgggcttctcctgggcgttgttcatcccgatgctggtgatctacctggtcacctcgctggaagccattggcgatgtgacggccaccagcaaggtctcgcgccagccggtcgaaggcccggtgtggatgcagcggatcaagggcggcgtgctggtcaacggtgccaactcgctgctggccggcctgttcaacaccttccccagctcgatcttcgcccagaacaacggcgtgattcagctgaccggcatcgccagccgccatatcggtatttggatcgcggccatgctggtcctgctggggctgttccctagcgttgccggtgtgatccaggccgtgccggagcccgtactcggcggcgcggccatggtgatgttcggcgcggtggccgcctcgggcatcaacatcctcgccagcacccgcctcgaccgccgcgccctgctgatcatcgccgtctcgctggccttgggcctgggcgtggcgcaggtacctgagttcctgtcgcacatgccgtcggcactgcgccatgtactggagtcgggtgtcgccaccggcggcatctgcgccctggtgctcaactggttcctgccggagagcaaggaagcggcctga

SEQ ID NO: 2577 - protein, 459 aa, Pseudomonas entomophila L48
MSSLEQGPGATAPANELVLGLEDKPRLMIGLLAALQHLLAIIVPIVTPGLLICQALGVSARDTNLIVSMSLVISGIATFVQCKRFGPFGAGLLIVQGTSFNFVGPLIAGGALMVKQGTPVESVMAAIFGVVIAGSFVEMGVSRILPFVKRLITPLVTGIVVLMIGLTLIKVGLISMGGGFGAMADGTFANGENLLLSGVVLAIIVILNRIPVVWMRSCAIVIALAVGYALAGYLGRLDFTGMHQAALFQVPTPLHFGLGFSWALFIPMLVIYLVTSLEAIGDVTATSKVSRQPVEGPVWMQRIKGGVLVNGANSLLAGLFNTFPSSIFAQNNGVIQLTGIASRHIGIWIAAMLVLLGLFPSVAGVIQAVPEPVLGGAAMVMFGAVAASGINILASTRLDRRALLIIAVSLALGLGVAQVPEFLSHMPSALRHVLESGVATGGICALVLNWFLPESKEAA

SEQ ID NO: 2578 - DNA, 1389 bp, Burkholderia cenocepacia AU 1054
  CDS (1)..(1389): transl_table=11
atgcaacccgcctcctccgccccctccgcctcccatggcgccgacgccgcagaagcggcccgcgacctcgtctacggcccgaacgaccggccggcgccgatggtcgcgttcgtcgccgccctccagcacctgctggcgatcatcgtgccgatcgtcacgcccggcctgctgatctgccaggcgctcggcgtgtccagccgcgatacgaccctgatcgtgtcgatgtcgctggtgatttccggcatcgccaccttcgtgcagtgcaagcgcttcggcccgctgggcgccggcctgctgatcgtccagggcaccagcttcaacttcgtcggcccgctgatcgccggcggcagcctgatggtcaagcaaggcacgccggtcgagaccgtgatggccgcgatcttcggcgtcgtgatcggcgggtcgttcgtggagatgggcgtgtcgcgcatcctgccgttcgtgaagcgcctgatcaccccgctcgtcaccggcatcgtcgtgctgctgatcggcctcacgctgatcaaggtcggcctcatcagcatgggcggcggctacggcgcgatggccaagggcacgttcgcgagcgcggagaacctgacactgtcgggcctcgtgctcggcacgatcatcctgctgaaccgcgtgccggtcgtctgggtgcgcagcaccgcgctcgtcatcgcgctcgcgatcggctacctcgcggccgcgttcctcggccgcctcgatttcaccggcatgcaccaggccgcgctgttccaggtgccgacgccgctgcacttcggcatcggcttctcgtgggcgctgttcgtgccgatgctgatcatctacctcgtcacgtcgctcgaagcgatcggcgacgtgaccgccacgagcaagatctcgaacgagccggtcgaagggccggtgtggatgcagcgcatcaagggcggcgtgctcgtcaacggggcgaactcgttgctggccggcgtgttcaacacgttcccgagctcggtattcgcgcagaacaacggcgtgatccagattaccggcgtcgcgagccgtcacgtcggtatctggatcgcgggcatgctggtggtgctcgggctgttcccggtcgtcgccggcgtgctgcaggccgtgccggagcccgtgctcggcggtgcggcgatggtgatgttcggtgcggtggccgcgtcgggcatcaacattctcgcgggcgtccacctcgaccgtcgcgcgctgctgatcatcgcggtgtcgctggcgctcggcctcggcgtgtcgcaggtgccggacatcctgaacagcctgccgcatgcactgaagaacgtgctggaatcgggcgtggcgacgggcggcatctgtgcgctcgtgatgaactggttcctgccggaaaagaagtaa

SEQ ID NO: 2579 - protein, 462 aa, Burkholderia cenocepacia AU 1054
MQPASSAPSASHGADAAEAARDLVYGPNDRPAPMVAFVAALQHLLAIIVPIVTPGLLICQALGVSSRDTTLIVSMSLVISGIATFVQCKRFGPLGAGLLIVQGTSFNFVGPLIAGGSLMVKQGTPVETVMAAIFGVVIGGSFVEMGVSRILPFVKRLITPLVTGIVVLLIGLTLIKVGLISMGGGYGAMAKGTFASAENLTLSGLVLGTIILLNRVPVVWVRSTALVIALAIGYLAAAFLGRLDFTGMHQAALFQVPTPLHFGIGFSWALFVPMLIIYLVTSLEAIGDVTATSKISNEPVEGPVWMQRIKGGVLVNGANSLLAGVFNTFPSSVFAQNNGVIQITGVASRHVGIWIAGMLVVLGLFPVVAGVLQAVPEPVLGGAAMVMFGAVAASGINILAGVHLDRRALLIIAVSLALGLGVSQVPDILNSLPHALKNVLESGVATGGICALVMNWFLPEKK

SEQ ID NO: 2580 - DNA, 1419 bp, Yersinia pestis Antiqua
  CDS (1)..(1419): transl_table=11
atgccccctttgccgatctggaaataccacgccatgtctacgcaatctgccgaacttgatactgcaccgccatcaccggctcaccccagcgaattgatctaccacctagaagaccgaccgccactcccacaaacactgtttgccgcttgccagcatctcttggcgatgtttgttgcggtaatcacccccggtttattgatttgtcaggctttggggttacccgcagaagatactcaacgcattattagtatgtcgttatttgcttcgggcctagcgtctttactgcagattaaaacttggggccccgtgggttcaggcctgttatccattcaaggcaccagttttaactttgtttctccgttgattatgggggggctggcgctaaaaaacggtggggcagatatcccaacgatgatggcggcgctgttcggtacgttaatggttgcgtcctgcaccgagatcttactctcacatgtgctgcatctggcacgccgtattatcaccccgctggtatccggtattgtggtgatgattatcggcctgtcattgattcaagttgggctgacatctattggtggtggttatggtgcgatgagcgataacacctttggtgcaccgaaaaacttattattagccggtgccgtattgggggtgatcattctgcttaaccgccagcgtaacccgtatttacgtgttgcctctttggtgatcgctatggccgtgggttatctgctcgcctgggcattggggatgttgcctgagagccgcccagttgtagataccgcgctgattactattccaacgccgttgtactatgggctgtccttcgactggaacttactgattcctctgatgctgatctttatggtgacctcactggaaaccataggcgatattaccgcaacatctgatgtatcagagcaaccggttcgcggcccgttatatatgaaacgcctaaaaggcggtgtactggccaatggtttgaactcgatgctgtccgctatattcaataccttccccaactcctgcttcggtcagaataatggcgtgatccaattgactggcgttgccagccgttatgtcggttttgttgtggcaataatgctcatcattttgggcctgttccctgctgtcgctgggtttgtgcagcatattcctgagccggtactgggtggagcaactctcgtgatgttcgggactatcgcagcgtctggtgtgcgtattgtgtcacgcgagaccctgaatcgccgggcgattatgataatggccttatcattagcggttggtatgggtgtcgcacagcagccattgattttgcaatttgcgcctgactggatcaaaacgctgttctcttctgggattgccgctggcggtattactgccatcgtacttaacttactcttcccacaagaaaaatag

SEQ ID NO: 2581 - protein, 472 aa, Yersinia pestis Antiqua
MPPLPIWKYHAMSTQSAELDTAPPSPAHPSELIYHLEDRPPLPQTLFAACQHLLAMFVAVITPGLLICQALGLPAEDTQRIISMSLFASGLASLLQIKTWGPVGSGLLSIQGTSFNFVSPLIMGGLALKNGGADIPTMMAALFGTLMVASCTEILLSHVLHLARRIITPLVSGIVVMIIGLSLIQVGLTSIGGGYGAMSDNTFGAPKNLLLAGAVLGVIILLNRQRNPYLRVASLVIAMAVGYLLAWALGMLPESRPVVDTALITIPTPLYYGLSFDWNLLIPLMLIFMVTSLETIGDITATSDVSEQPVRGPLYMKRLKGGVLANGLNSMLSAIFNTFPNSCFGQNNGVIQLTGVASRYVGFVVAIMLIILGLFPAVAGFVQHIPEPVLGGATLVMFGTIAASGVRIVSRETLNRRAIMIMALSLAVGMGVAQQPLILQFAPDWIKTLFSSGIAAGGITAIVLNLLFPQEK

SEQ ID NO: 2582 - DNA, 1461 bp, Pseudoalteromonas atlantica T6c
  CDS (1)..(1461): transl_table=11
atgcagactactcgccccaaaaacggtgaaatattatattctttaacagatgtcccttctgttggtcatagcaccactgctgcgcttcagcatattatggcgtgctttattggcatcattacccccacattgatcatcggctctgtgcttggcttacaggctgaaataccctatctgatcagtatggcgctgatgacatccggcgtatccacctttattcaagctaaaaaatttgggcctgtcggctgcgggcttatcgctgtgcagggaacgagttttactttcatcagcgcgctgttagtcgccggaaccgcaataaaaagtcgtggtgggtcgaatgaagaaatcatggctctgatgtttggtttatgtttctttggtgcctttgttgaaattgtattaagtcaatttattcagtatttaaaagcagtgatcaccccgctcactacagggatcgtgatcaccactatcggtatcaccttaattaaagttggcatgaccgatttatccggcgggttcaatgcaacggattttggcgcgccgcataatctcatcttaggcctgagcgtacttattaccgtgattgcccttaatgcatctaaatatccactgttgcgcttaagcgctatattcattggcatgttagtaggctgtatcattgcttggtatcaggggatcctgtcatttaataatatgctgtcatcccctttaatcagcatacctgagccgtttaaatacggtgtcgcctttgactgggaattgtttattccgatcgcactggtgtacttcctaagtgcaattgaaacctcaggagacttaaccgccaacagccttttttgtaaggagccaattaaagggccgatttacctcaaacgcataaaagggggaattttagcggacggggttaattctatgttggcagccatgtttaatagctttcccaataccacattcgggcaaaacaatgcggtaatacaaatgaccggtgtcgccagtcgccatgttggattttacatcgccggctttctggtgttacttggcttatttccagttgttggcagtgtcttgcagcttatgcctaaacctgtgcttggcggcgcaacgcttgttatgtttgccactattgcggttgcgggcgtaaaaatactgaccagcgagcctatagatagacgaaaaagccttattatcgcaacgtctctaggattaggtttaggtgtcatgatggtacctgagacacttgcccaattaccgcaattagccaacaacatactttcatcttcggtgaccactgccggtttctgcgcgattatcatgagcattgctatacccgagccaaaagctggtgagctggaagaagataatgttgagtcacaagacccgtcactagcgcctcgattcaatcacccagcagccacagtgttagctgatgaatcgccaatcaacgagtctgaacggcaatga

SEQ ID NO: 2583 - protein, 486 aa, Pseudoalteromonas atlantica T6c
MQTTRPKNGEILYSLTDVPSVGHSTTAALQHIMACFIGIITPTLIIGSVLGLQAEIPYLISMALMTSGVSTFIQAKKFGPVGCGLIAVQGTSFTFISALLVAGTAIKSRGGSNEEIMALMFGLCFFGAFVEIVLSQFIQYLKAVITPLTTGIVITTIGITLIKVGMTDLSGGFNATDFGAPHNLILGLSVLITVIALNASKYPLLRLSAIFIGMLVGCIIAWYQGILSFNNMLSSPLISIPEPFKYGVAFDWELFIPIALVYFLSAIETSGDLTANSLFCKEPIKGPIYLKRIKGGILADGVNSMLAAMFNSFPNTTFGQNNAVIQMTGVASRHVGFYIAGFLVLLGLFPVVGSVLQLMPKPVLGGATLVMFATIAVAGVKILTSEPIDRRKSLIIATSLGLGLGVMMVPETLAQLPQLANNILSSSVTTAGFCAIIMSIAIPEPKAGELEEDNVESQDPSLAPRFNHPAATVLADESPINESERQ

SEQ ID NO: 2584 - DNA, 1389 bp, Burkholderia ambifaria AMMD
  CDS (1)..(1389): transl_table=11
atgcaacccgcttcccccgcccgatccgccgcccacggcgccgccgacaccgatccgtcgcacgacctcgtctatggccccaatgaccggcccgcgccgatggtcgccttcgtcgccgcgctgcagcacctgctggcgatcatcgtgccgatcgtcacgcccggcctgctgatctgccaggcgctcggcgtatcgagccgggacaccacgctcatcgtgtcgatgtcgctcgtgatttccggcatcgccaccttcgtgcagtgcaagcgcttcggcccgctgggcgccggcctgctgatcgtgcagggcaccagtttcaacttcgtcggcccgctgatcgccggcggcagcgtgatggtcaagcagggcacgccggtcgagaccgtgatggccgcgatcttcggcgtcgtgatcgccggttcgttcgtcgagatggccgtgtcgcgcatcctgccgttcgtgaagcgcctgatcacgccgctcgtcaccggcatcgtcgtgctgctgatcggcctcacgctgatcaaggtcggcctcatcagcatgggcggcggctacggcgcgatggccaacggcacgttcgcgagcgcgcagaacctgacgctgtcgtgcgtcgtgctcggcacgatcatcctgctgaaccgcgtgccgatcgtgtgggtgcgcagcaccgcgctcgtgatcgcactcgtgatcggctatgccgcggccgccgtgctcggccgcctcgacttcaccggcgtgcatcaggctgcgctgttccaggtcccgacgccgctgcacttcggcatcggcttctcgtggtcgctgttcgtgccgatgctgatcatctacctcgtcacgtcgctcgaagcgatcggggacgtcaccgccaccagcaagatttcgaaggagccagtcgaagggccggtgtggatgcgccggatcaagggcggcgtgctcgtgaacggcgcgaactcgctgctggccggcgtgttcaacacgttcccgagctccgtgttcgcgcagaacaacggcgtgatccagatcaccggcgtcgcgagccgccacgtcggcatctggatcgccggcatgctcgtggtgctcggcctgttcccggtcgtcgcgggcgcgctgcaggccgtgccggagcccgtgctcggcggtgcggcgatggtgatgttcggcgcggtggccgcgtcgggcatcaacatcctgtccggcatccacctcgatcgccgcgcgctgctgatcatcgcggtgtcgctcgcgctcggcctcggcgtatctcaagtgccggacattctgaacagcctgccgcatgcactgaagaacgtgctggaatcgggcgtcgccacgggcggcatctgtgcgctcgtgatgaactggttcctgccggaacagaagtaa

SEQ ID NO: 2585 - protein, 462 aa, Burkholderia ambifaria AMMD
MQPASPARSAAHGAADTDPSHDLVYGPNDRPAPMVAFVAALQHLLAIIVPIVTPGLLICQALGVSSRDTTLIVSMSLVISGIATFVQCKRFGPLGAGLLIVQGTSFNFVGPLIAGGSVMVKQGTPVETVMAAIFGVVIAGSFVEMAVSRILPFVKRLITPLVTGIVVLLIGLTLIKVGLISMGGGYGAMANGTFASAQNLTLSCVVLGTIILLNRVPIVWVRSTALVIALVIGYAAAAVLGRLDFTGVHQAALFQVPTPLHFGIGFSWSLFVPMLIIYLVTSLEAIGDVTATSKISKEPVEGPVWMRRIKGGVLVNGANSLLAGVFNTFPSSVFAQNNGVIQITGVASRHVGIWIAGMLVVLGLFPVVAGALQAVPEPVLGGAAMVMFGAVAASGINILSGIHLDRRALLIIAVSLALGLGVSQVPDILNSLPHALKNVLESGVATGGICALVMNWFLPEQK

SEQ ID NO: 2586 - DNA, 1404 bp, Bordetella avium 197N
  CDS (1)..(1404): transl_table=11
atgagctccgctcctcaaacccaaacccacccccccccggcccacggccaagtcacgcccgacctcatttatggccccgatgaccgccccgccaccccggtcgccttcatcgccgccctgcaacacctgctggccatcctcgttcccatcgtcacccccggactgctgatctgccaggcgcttggcgtctccagccgcgacaccaccctcattgtctcgatgtcgctggtcatctccggcatcgccacctacgtgcaatgccgccgcttcggccccttcggcgccggactgctcatcgtgcaaggcaccagcttcaactttgtcggcccgctcatcgccggcggcagcatgatggtcgcgcaaggcacccccgtcgaagccgtcatggccgccatcttcggcgtcgtcattgccggctccttcgtcgaaatgggtatctcccgcatcctgcccttcgtcaaacgcctcatcaccccgctggtcactggcattgtcgtgctcctgatcggcctgaccctcatcaaagtcggcctgatcagcatgggcggcggcttctccgccatgcagaacggcaccttcgccaacagcgaaaacctgctgctctccggcctcgtgctcggcaccatcatcgtgctcaaccgcctgcccatcgtctgggtgcgcagcgccgccctcgtcatcgccctgatcgtcggctacctcgccgccgcctccctcggccgcctcgacctctccagcgcccgcgacgccgccctgtttcaagtgcccctgcccctgcacttcggcctgtccttctcctggcccctcttcgtgcccatgctgatcatctacctggtcacctcgctcgaagccatcggcgacatcaccgccaccagccaggtctcgcgccagcccgtccacggcccgctctggatgcagcgcatcaagggtggcgtgctcgtcaacggcaccaactccctgctggccggggtgttcaacaccttccccagctcggtcttcgctcaaaacaacggcgtcatccagctcaccggcatcgccagccgccgcgtcggcatctggatcgcgggcatgctcgtcgtgctcggcctcttccccgccgtcgccggcctgctccaggccgtgcccgaacccgtgctgggcggcgccgccatggtcatgttcggcgccgttgcggcctcgggcatcaacatcctcgctggcgtgcgcctggaccgccgcgccctgctcatcatcgccgtctccctggccctcggcctgggcgtgtcgcaagtgcccgaattcctggcccacatgccccacgccctcaagagcatcctcgaatccggcgtcgccacgggcggcatctgcgccctgctgatgaactggttcctcccggaaagccccgcccaggccaaagccgcctga

SEQ ID NO: 2587 - protein, 467 aa, Bordetella avium 197N
MSSAPQTQTHPPPAHGQVTPDLIYGPDDRPATPVAFIAALQHLLAILVPIVTPGLLICQALGVSSRDTTLIVSMSLVISGIATYVQCRRFGPFGAGLLIVQGTSFNFVGPLIAGGSMMVAQGTPVEAVMAAIFGVVIAGSFVEMGISRILPFVKRLITPLVTGIVVLLIGLTLIKVGLISMGGGFSAMQNGTFANSENLLLSGLVLGTIIVLNRLPIVWVRSAALVIALIVGYLAAASLGRLDLSSARDAALFQVPLPLHFGLSFSWPLFVPMLIIYLVTSLEAIGDITATSQVSRQPVHGPLWMQRIKGGVLVNGTNSLLAGVFNTFPSSVFAQNNGVIQLTGIASRRVGIWIAGMLVVLGLFPAVAGLLQAVPEPVLGGAAMVMFGAVAASGINILAGVRLDRRALLIIAVSLALGLGVSQVPEFLAHMPHALKSILESGVATGGICALLMNWFLPESPAQAKAA

SEQ ID NO: 2588 - DNA, 1398 bp, Aeromonas hydrophila subsp. hydrophila ATCC 7966
  CDS (1)..(1398): transl_table=11
atggaacaggctgccgccgtacgcgcaacccgagaggcccatccccccaggcgagcccacagcgaactggtctatggcatagaggatgtcccgcccctgccccagaccctgttcgccgccctgcagcatatgctcgccatgtttgtcgccatcatcaccccgcccctcatcatcgccaacgccctcggcctccctgccgccgacacccgctatatcgtctccatgtcgctggtcatgtccggcatcgcctccttcatccagacccgccgcttcggccccctcggttccggcctgctctcggtacagggcaccagcttcaacttcctcggccccatcatcgcctccggcctcgccctcaagcaggcggccatgcccaccgaggatctgctgggcaccctgttcggcaccatgctggcggccgccctcaccatcgtcgtgatgagccgcttcctgcacctggtcaaacggatcatcaccccgctggtgaccggcatcgtcgtgctgctgatcggcctgaccctcatcaaggtgggcctcatcagcatggggggcggctacggcgccctggcggacggcagcttcgccagccacaccaacctcttcctctccctgctggtgctcggcctcatcgtgctgctgcagcgcagccgcaacccctggctgcgcctctccgccatcatgctcgccatgctggtgggctatgcagtagcgctgctgctgggcaaggtcaacgcccccaccttcgacggcccgctgctgatggtgcctattccgctccactacgggctcggctttgactggcagctgttcgtgccgctcgccatcatcttcgtggtgacggcgctcgaggccatcggcgacatgaccgccacctccgacatctccggcgagccgctggaagggccggtctacatggaacggatcaagggcggcgtgctggccgatggcgccaactccatgctggcggcggtcttctccaccttccccatgtccaccttcgcccagaacaacggcgtcatccagctgaccggggtggccagccgccacgtcggcctgttcatcgccgccatgctggcgctgctcggcctgttcccggctgtcgccagtctggtacagcagatccccgaacccgtgctggggggcgccaccatcgtcatgttcggcaccatcgccgccgccggcgtgcgcatcatctcccgcgaggagctcgatcgccgcgccctgatgatcctggcggtgtcgctggcaatgggcctcggggtggcgcaggtgccggaagtgctgcagcacctgccggatctggccaagagcgtgctctcctacggcgtcgccaccggcggcctcaccgccatcatcatgaacctgctgctgcccaagcgcgccgccgcacaagtctga

SEQ ID NO: 2589 - protein, 465 aa, Aeromonas hydrophila subsp. hydrophila ATCC 7966
MEQAAAVRATREAHPPRRAHSELVYGIEDVPPLPQTLFAALQHMLAMFVAIITPPLIIANALGLPAADTRYIVSMSLVMSGIASFIQTRRFGPLGSGLLSVQGTSFNFLGPIIASGLALKQAAMPTEDLLGTLFGTMLAAALTIVVMSRFLHLVKRIITPLVTGIVVLLIGLTLIKVGLISMGGGYGALADGSFASHTNLFLSLLVLGLIVLLQRSRNPWLRLSAIMLAMLVGYAVALLLGKVNAPTFDGPLLMVPIPLHYGLGFDWQLFVPLAIIFVVTALEAIGDMTATSDISGEPLEGPVYMERIKGGVLADGANSMLAAVFSTFPMSTFAQNNGVIQLTGVASRHVGLFIAAMLALLGLFPAVASLVQQIPEPVLGGATIVMFGTIAAAGVRIISREELDRRALMILAVSLAMGLGVAQVPEVLQHLPDLAKSVLSYGVATGGLTAIIMNLLLPKRAAAQV

SEQ ID NO: 2590 - DNA, 1518 bp, Aeromonas hydrophila subsp. hydrophila ATCC 7966
  CDS (1)..(1518): transl_table=11
atgtctaaaacaacacgcaagcactcggacctgatttacgcgctcgaagacaaaccacccttttaccaaaccctgatgggggccgtgacccacctgctggccatcttcgtgcccatggtgacgccggccctgatcgtgggcggggccctcggcctctccaccgagaccaccgcctacctggtctccatggcgatgatcgcctccggcatcggcacctggctgcaggtgaatcgctacggccccatcggctcggggctgctctccatccagtcggtcaacttctccttcgtcaccgtgatgattgcgcttggcagcgccatgaaaaaagatggcctgcacgaggagctgatcgtctcgaccctgctcggggtctccttcgtcggcgccttcctggtgatgggatcctccttcgtgctgccctatctcaagcgggtgatcacccccaccgtgagcggggtggtggtgctgatgattggcctgagcctcatcaaggtggggatcatcgactttggcggcggcttctccgccatgagcagcggcaccttcggcaaatacgagaacatcggcctggggctgctggtgctctgcgtcatcgtcgccttcaactgcagcaagagccccttgcttcgcatgagcggcatcgccatcggcctgctggtgggttatgcggtggccctgatgctcggcatggtggatttctccgcccttgagaacctgccgctcatcacagtgcctgttccgttcaagtacggtttttccttcgatctgcacgcctttgtgctggccggcaccatctatctgttgagcgtgctggaggcggtgggggacatcaccgccaccgccatggtctcccaccggcagatccagggccccgagtttcaaaaacggctctccggcggcgtgctggcggacggcctggtatcggtgatcgcctcggcgctcggctccctgccgctcaccaccttcgcccagaacaacggcgtcatccagatgaccggggtggcctcgcgccacgtgggcaagttcatcgccgtcatcctggtgctgctcggcctcttcccggtggtggggcgcttcttcaccaccataccgtcaccggtgatggggggggccatggtcatcatgttctccatgatcgccatcgccggcgggcgcatcatcatcagtcacggcttcgatcggcgcgagaccctgatcgtcgccacctcgctcgggctggggctcggggtctcctacgacccgaacgtgttcaaggtgctgccggcggggatctacatgctggtggagaaccccatctgcgccggcggcatcaccgccatcatcatgaacctggtgctgccgcaaagccgcagacgccaggcggccgccaatgccaccgaggcggtggagctgatccagctgagcgacaagcccgacacccgttttgccacccggcccgctccgtcggccaccgcccgccaacaggggctggcgacggacgaggcccagatacgcgccccgcaagtggatcgcggctaa

SEQ ID NO: 2591 - protein, 505 aa, Aeromonas hydrophila subsp. hydrophila ATCC 7966
MSKTTRKHSDLIYALEDKPPFYQTLMGAVTHLLAIFVPMVTPALIVGGALGLSTETTAYLVSMAMIASGIGTWLQVNRYGPIGSGLLSIQSVNFSFVTVMIALGSAMKKDGLHEELIVSTLLGVSFVGAFLVMGSSFVLPYLKRVITPTVSGVVVLMIGLSLIKVGIIDFGGGFSAMSSGTFGKYENIGLGLLVLCVIVAFNCSKSPLLRMSGIAIGLLVGYAVALMLGMVDFSALENLPLITVPVPFKYGFSFDLHAFVLAGTIYLLSVLEAVGDITATAMVSHRQIQGPEFQKRLSGGVLADGLVSVIASALGSLPLTTFAQNNGVIQMTGVASRHVGKFIAVILVLLGLFPVVGRFFTTIPSPVMGGAMVIMFSMIAIAGGRIIISHGFDRRETLIVATSLGLGLGVSYDPNVFKVLPAGIYMLVENPICAGGITAIIMNLVLPQSRRRQAAANATEAVELIQLSDKPDTRFATRPAPSATARQQGLATDEAQIRAPQVDRG

SEQ ID NO: 2592 - DNA, 1410 bp, Neisseria meningitidis FAM18
  CDS (1)..(1410): transl_table=11
ttgaagcaaggaaacattatgagcggtcatatgggaaaaggggcggatgcgcctgatttggtgtacggtttggaggataggccgccgttcggtaatgcgctgttgagcgcggttacccatcttttggcgattttcgtgccgatgattacgcccgcgctgattgtgggcggcgcgctggaactgccggtggagatgacggcgtatctcgtgtcgatggcgatggttgcgtcgggtgtcggcacttatttgcaggtcaaccgcttcgggccggtcggttcggggatgctgtctatccagtcggtgaatttctcgttcgttaccgtcatgattgcgctgggcgcggggatgaaagagggcggtttgactaaggatgcgatgatttcgacgctcttgggcgtatcgtttgtcggcgcgtttttggtgtgtttctcggcgtggcttctgccgtatttgaaaaaagtgattacgccgacggtcagcggtgtggtggtgatgctgatcggcttgagtttggtacacgtcggtattaccgatttcggcggcggcttcggcgcaaaggcggacggcacgttcggctcgatggaaaacttggggctggcatcgccggtgctgctgattgtgctggtgttcaactgcatgaaaaacccgctgctgcggatgagcggcattgcggtcggtctgattgccggctatatcgtcgcgctgtttttgggcaaggtggatttttcggcactgcaaaacctgccgctggttacgctgcccgtaccgtttaaatatggttttgcttttgactggcacgcatttattgtggcgggtgcgattttcctgttgagcgtgtttgaggcggtcggcgatttgaccgcaacggcaatggtgtccgatcagccgattgaaggcgaggaatacaccaaacgcctgcgcggcggcgtgttggcagacggcttggtgtcggtgattgcgacggctttgggttcgctgccgctgacaacgtttgcgcaaaacaacggcgtgattcagatgaccggcgtggcttcgcgccatgtgggcaaatatattgccgtgattttggtgctgttgggtctgttccccgttgtcggacgcgcgtttacgacgattccgagtccggttttaggcggcgcgatggttttgatgttcggcttgattgcgattgcgggtgtgcggattttggtcagccacggcatccgcaggcgcgaggcggtgattgcggcgacttcggtcggcttgggcttgggcgtggcgtttgagccggaagtgtttaaaaacctgcctgtcttgttccaaaactctatttccgccggcggcattacggcagtcttgctgaatttggtcttgcccgaagataaaaccgaggcggcggtcaagtttgataccgaccacttggaacactga

SEQ ID NO: 2593 - protein, 469 aa, Neisseria meningitidis FAM18
MKQGNIMSGHMGKGADAPDLVYGLEDRPPFGNALLSAVTHLLAIFVPMITPALIVGGALELPVEMTAYLVSMAMVASGVGTYLQVNRFGPVGSGMLSIQSVNFSFVTVMIALGAGMKEGGLTKDAMISTLLGVSFVGAFLVCFSAWLLPYLKKVITPTVSGVVVMLIGLSLVHVGITDFGGGFGAKADGTFGSMENLGLASPVLLIVLVFNCMKNPLLRMSGIAVGLIAGYIVALFLGKVDFSALQNLPLVTLPVPFKYGFAFDWHAFIVAGAIFLLSVFEAVGDLTATAMVSDQPIEGEEYTKRLRGGVLADGLVSVIATALGSLPLTTFAQNNGVIQMTGVASRHVGKYIAVILVLLGLFPVVGRAFTTIPSPVLGGAMVLMFGLIAIAGVRILVSHGIRRREAVIAATSVGLGLGVAFEPEVFKNLPVLFQNSISAGGITAVLLNLVLPEDKTEAAVKFDTDHLEH

SEQ ID NO: 2594 - DNA, 1398 bp, Unknown
  Unidentified
  CDS (1)..(1398)
atgcagcctgaaacactcgacaacgatgacctgatctacggcctgaacgatcgccccaaaccctggacggccattttggcagcgttccagcacgttctcgccagcttcgtcgggatcatcaccccgcccctgatcatcggctcgaccctcggcctgaccccatacatgccgtacctgatcagcatggccttgatggtctcgggcaccggtacgttcatccaggcgcgccgcccgttcggcatcggcgcgggcatgatctgtctgcaaggcaccagcttcgcgttcctgggcgccgtgttgtccgcaggctttctggtcaaacagcgcggcggcagcccggaggacatcatggcgatgatcttcggcgtgtgctttttcggtgcgctggtgcagatcgcgctgagtcgctgcattagccagctgcgaagggtcatcacgccgctggtgaccggtattgtcatcacgttgattggtgtgagcctgatcaaggtgggcgtgacagacctgggcggcggtttcaatgcgccggacttcggcgccccggtgaacctggcgctgggcgcgttcgttctggccgtgatcattgtgctcaatcgctcgaatacgccctgggtacgtttgtcagccatcatcatcggcctggcggtcggcagtctggccgcctggttcagcggcaagctggtgccgcaagcccttcacgacctgccgttgatcagcgtaccggtgcccttccgcttcggcttcaatttcgactggagcgctttcctgccagtcgcgctgatttatctgatcagcagcatcgaaacagtcggcgacctgaccgccaattgcatgctcgcgcgccagcccatcagcggcccgagctacctggcacgcctcaagggcggcgtgctcggcgatggcgtgagctgcatgatcgccgcgaccttcagcgcatttcccaataccacctttgcgcaaaacaacggcgtgatccagttgaccggcgttgccagtcgctacgtcgggctgtacatcggcgcggtgctgttcgtactcgggctgtttccgcacatcggcgccatcgtccagcagatccccaagccggtgctcggcggcgcaacgctggtcatgttcggcagcgtcgccgccgccggggtgcgcattctggcccagtcgccgctggaccgacgcagcatgctgatcattgcgacgtccttgggtgtcggtctgggcattgcggcgcagcctgcgctgctgcaccaattgccgaaactggtgcagaacctgttcgattcggcgatcaccagcggcggcatcacggccattgtcatgtgcctgctgattccggaaggcaaagtcaccgccgctacgaccgacgccgtaacggaacccgaacctgtggagcaaccacgataa

SEQ ID NO: 2595 - protein, 465 aa, Unknown
  Unidentified
MQPETLDNDDLIYGLNDRPKPWTAILAAFQHVLASFVGIITPPLIIGSTLGLTPYMPYLISMALMVSGTGTFIQARRPFGIGAGMICLQGTSFAFLGAVLSAGFLVKQRGGSPEDIMAMIFGVCFFGALVQIALSRCISQLRRVITPLVTGIVITLIGVSLIKVGVTDLGGGFNAPDFGAPVNLALGAFVLAVIIVLNRSNTPWVRLSAIIIGLAVGSLAAWFSGKLVPQALHDLPLISVPVPFRFGFNFDWSAFLPVALIYLISSIETVGDLTANCMLARQPISGPSYLARLKGGVLGDGVSCMIAATFSAFPNTTFAQNNGVIQLTGVASRYVGLYIGAVLFVLGLFPHIGAIVQQIPKPVLGGATLVMFGSVAAAGVRILAQSPLDRRSMLIIATSLGVGLGIAAQPALLHQLPKLVQNLFDSAITSGGITAIVMCLLIPEGKVTAATTDAVTEPEPVEQPR

SEQ ID NO: 2596 - DNA, 1407 bp, Pseudomonas aeruginosa UCBPP-PA14
  CDS (1)..(1407): transl_table=11
atgcatagcgaagaccaacgccccaacgacctcatctacggcctcgacgaccggccgcgcccgcttcccgccttccttgccgcgctacagcacgtgctggccagcttcgtcggcatcgtcactccgccgctggtgatcggctcgctgctcggcctcggcgagcacctgccgtacctgatcagcatggcgctgatggtttccggcgccggcaccctgatccaggcgcgccggccgttcggcatcggcgccgggatgatctgcctgcaaggcaccagcttcgccttcctcggcgccgtgctggccgccgggatgctggtgaagcagcgcggcggcggtcccgaggagatcctcgcgatgatcttcggcgtgtgcttcttcggcgccttcgtgcagatcgtcctcagtcggttcctcggccatcttcgccgggtgatcacgccgctggtcaccggcatcgtcatcaccctgatcggcgtcagcctgatcaaggtcggcatcaccgacctcggcggcggagccggggccacggacttcggcgcaccggccaatctcgcgctgggcgcgctggtgctgctgagcatcgtcctgctgaaccgctcgcgcctgccctggctgcgcctggccgccatcgtcatcggcctggcgctgggtaccctggcggcctgggcgaccggcctgttcgttccgcgggcgttgcccgagctgccgctggtcagcctgccgcagccgttccgcttcggcttcgccttcgactggatggccttcctgccggtggcgctgatctacctgatcagcagcatcgagacggtcggcgacctgaccgccaactgcatgctctcgcggcagcccctggaggggccggcgtatctgcagcggttgcgcggcggagtgctcggcgacggcgtcagttgcctgctggcagccaccttcagcgccttcccgaacaccaccttcgcgcagaacaacggggtgatccagctcaccggggtggccagccggcacgtcgggatctatatcggcggcgtgttgctggcgctcggcctgttcccctggatcggcgcgatcctccagcagatccccaagccggtgctcggcggcgccaccctggtgatgttcggcagcgtcgccgccgccggcatccgcattctcggccagaccgcgatggaccgccgcagcgtgctgatcatcgccgcctcgttcggcgtcggcctcggcgtggccgcgcagccgaccctgctcgaccagatgccggcggtggtgaagaccctgttcgactcggcgatcaccagcggcggcatcaccgccatcctgctcaacctgctgctgcccgaggagcgcgttgccgaagcggcgcaggccagcgcgaagggcggcgccctggcgcgctggcgcaagccgctgggttga

SEQ ID NO: 2597 - protein, 468 aa, Pseudomonas aeruginosa UCBPP-PA14
MHSEDQRPNDLIYGLDDRPRPLPAFLAALQHVLASFVGIVTPPLVIGSLLGLGEHLPYLISMALMVSGAGTLIQARRPFGIGAGMICLQGTSFAFLGAVLAAGMLVKQRGGGPEEILAMIFGVCFFGAFVQIVLSRFLGHLRRVITPLVTGIVITLIGVSLIKVGITDLGGGAGATDFGAPANLALGALVLLSIVLLNRSRLPWLRLAAIVIGLALGTLAAWATGLFVPRALPELPLVSLPQPFRFGFAFDWMAFLPVALIYLISSIETVGDLTANCMLSRQPLEGPAYLQRLRGGVLGDGVSCLLAATFSAFPNTTFAQNNGVIQLTGVASRHVGIYIGGVLLALGLFPWIGAILQQIPKPVLGGATLVMFGSVAAAGIRILGQTAMDRRSVLIIAASFGVGLGVAAQPTLLDQMPAVVKTLFDSAITSGGITAILLNLLLPEERVAEAAQASAKGGALARWRKPLG

SEQ ID NO: 2598 - DNA, 1389 bp, Burkholderia cepacia R18194
  CDS (1)..(1389): transl_table=11
atgcaacccgcctcccccgcccaacccgccgcccacggcgccgacgccgcagattcggcccgcgacctcgtctacggcccgaacgaccggccggcgccgatggtcgccttcgtcgccgcgctgcagcacctgttggcgatcatcgtgccgatcgtcacgcccggcctgctgatctgccaggcactcggcgtctccagtcgcgatacgacccttatcgtgtcgatgtcgctggtgatttccggcatcgccaccttcgtccagtgcaagcgctttggcccgctgggcgccggcctgctgatcgtccagggcacgagcttcaacttcgtcggcccgctgatcgccggcggcagcctgatggtcaagcaaggcacgccggtcgagaccgtgatggccgcgatcttcggcgtcgtgatggccgggtcgttcgtcgagatgggcgtatcgcgcatcctgccgttcgtgaagcgcctgatcacgccgctcgtcaccggcatcgtcgtgctgctgatcggcctcacgctgatcaaggtcggcctcatcagcatgggcggcggctttggcgcgatggcgaaaggcaccttcgcgagcgcggagaacctgacactgtccggcctcgtgctcggcacgatcatcctgctgaaccgcgtgccgatcgtgtgggtgcgcagcaccgcgctcgtcatcgcgctcgtcatcggctatctcgcggccgcgttcctcggccgcctcgacttcaccggcatgcaccaggccgcgctgttccaggtgccgacgccgctgcacttcggcatcggcttctcgtggtcgctgttcgtgccgatgctgatcatctacctcgtcacctcgctcgaagcgatcggcgacgtcacggccaccagcaagatttcgagcgagccggtcgaaggcccggtgtggatgcaacggatcaagggcggcgtgctcgtcaacggcgcgaactcgctgctggccggcgtgttcaacacgttcccgagctcggtgttcgcgcagaacaacggcgtgatccagatcaccggcgtcgccagccgccacgtcggcatctggatcgcggggatgctcgtggtgctcggcctgttcccggtcgtcgccggcgtgctgcaggccgtgccggagcctgtgctcggcggcgcggcgatggtgatgttcggcgcggtggccgcatcgggcatcaacatcctctcaggcgtccatctcgatcgtcgcgcgctgctgatcatcgcggtgtcgctcgcgctcggcctcggcgtgtcgcaggtgccggacatcctcaacagcctgccgcacgcactgaagaacgtgctggaatcgggcgtggcaacgggcggcatctgcgcgctcgtgatgaactggttcctgccggaaaagaagtaa

SEQ ID NO: 2599 - protein, 462 aa, Burkholderia cepacia R18194
MQPASPAQPAAHGADAADSARDLVYGPNDRPAPMVAFVAALQHLLAIIVPIVTPGLLICQALGVSSRDTTLIVSMSLVISGIATFVQCKRFGPLGAGLLIVQGTSFNFVGPLIAGGSLMVKQGTPVETVMAAIFGVVMAGSFVEMGVSRILPFVKRLITPLVTGIVVLLIGLTLIKVGLISMGGGFGAMAKGTFASAENLTLSGLVLGTIILLNRVPIVWVRSTALVIALVIGYLAAAFLGRLDFTGMHQAALFQVPTPLHFGIGFSWSLFVPMLIIYLVTSLEAIGDVTATSKISSEPVEGPVWMQRIKGGVLVNGANSLLAGVFNTFPSSVFAQNNGVIQITGVASRHVGIWIAGMLVVLGLFPVVAGVLQAVPEPVLGGAAMVMFGAVAASGINILSGVHLDRRALLIIAVSLALGLGVSQVPDILNSLPHALKNVLESGVATGGICALVMNWFLPEKK

SEQ ID NO: 2600 - DNA, 1389 bp, Burkholderia cepacia R1808
  CDS (1)..(1389): transl_table=11
atgcaacccgcctcctctgcccgatccgccgctcacggcgccgacgacgcatcttccgcgcgcgacctcgtctacggccccaacgaccgcccggcgccgacgatcgcgttcgtcgccgccctgcagcacctgctggcgatcatcgtgccgatcgtcacgccggggctgctgatctgccaggcgctcggcgtcgcgagccgcgacacgacgctgatcgtgtcgatgtcgctggtgatctcgggcatcgccacgttcgtgcagtgcaagcgcttcggcccgctcggcgcggggctgctgatcgtgcagggcacgagcttcaacttcgtcggcccgctgatcgcgggcggcagcgtgatggtcaagcaaggcacgccggtcgaaacggtgatggccgcgatcttcggcgtcgtgatcgccggctcgttcgtcgagatggccgtgtcgcgcatcctgccgttcgtgaagcggctgatcacgccgctcgtgaccggcatcgtcgtgctgctgatcgggctcacgctgatcaaggtcggcctcgtcagcatgggcggcggctacggcgcgatggccaacggcacgttcgcgagcgcgcagaacctgacgctgtcgtgcgtcgtgctcggcaccatcatcgtgctgaaccgcgtgccgatcgtatgggtgcgcagcacggcgctggtgatcgcgctcgcgatcggctatgcagtcgcggcggcgctcgggcgcctcgacttcaccggcatgcaccaggccgcgctgtttcaggtgccgacgccgctgcacttcggcatcggcttctcgtggtcgctgttcgtgccgatgctgatcatctatctcgtcacgtcgctcgaagcgatcggcgacgtcaccgccacgagcaagatctcgaacgagccggtcgaagggccggtatggatgcgccggatcaagggcggcgtgctcgtgaacggggcgaactcgctgctggccggcgtgttcaacacgtttccgagctcggtgttcgcgcagaacaacggcgtgatccagatcacgggcgtcgcgagccgctacgtcggcatctggatcgcggcgatgctggtcgtgctcgggctgttcccggtggtggccggcgcgctgcaggcggtgcccgagccggtgctcggcggcgcggcgatggtgatgttcggcgcggtggccgcatcgggcatcaacatcctgtccggcgtccacctcgaccgccgcgcgctgctgatcatcgcggtgtcgctcgcgctcggcctcggcgtgtcgcaggtgcccgacatcctgaacagcctgccgcatgcgctgaagaacgtgctggcctcgggtgtcgcgacgggcggcatctgcgcgctggtgatgaactggtttctgccggaacggcagtaa

SEQ ID NO: 2601 - protein, 462 aa, Burkholderia cepacia R1808
MQPASSARSAAHGADDASSARDLVYGPNDRPAPTIAFVAALQHLLAIIVPIVTPGLLICQALGVASRDTTLIVSMSLVISGIATFVQCKRFGPLGAGLLIVQGTSFNFVGPLIAGGSVMVKQGTPVETVMAAIFGVVIAGSFVEMAVSRILPFVKRLITPLVTGIVVLLIGLTLIKVGLVSMGGGYGAMANGTFASAQNLTLSCVVLGTIIVLNRVPIVWVRSTALVIALAIGYAVAAALGRLDFTGMHQAALFQVPTPLHFGIGFSWSLFVPMLIIYLVTSLEAIGDVTATSKISNEPVEGPVWMRRIKGGVLVNGANSLLAGVFNTFPSSVFAQNNGVIQITGVASRYVGIWIAAMLVVLGLFPVVAGALQAVPEPVLGGAAMVMFGAVAASGINILSGVHLDRRALLIIAVSLALGLGVSQVPDILNSLPHALKNVLASGVATGGICALVMNWFLPERQ

SEQ ID NO: 2602 - DNA, 1467 bp, Pseudomonas fluorescens PfO-1
  CDS (1)..(1467): transl_table=11
atgaccgtctctgaaaaagccccgcgcaacaacgatctgatctacggcctcaacgaccgtccgcacttcaccgcaacggtgtttgccgccctgcaacatgtgctggccagcttcgtcggcatcatcaccccgaccctgatcatgggcggtgccctcggcctgcaaagtgaaatcccgtacctgatcagcatggcgctgttcgtctcgggcctcggcaccttcgttcaggccaagcgcttcggcccggtcggttcggggctgctgtgcctgcaaggcaccagtttttcctttatcagcgtgattctcagcgccggtttcatggtcaaggcccggggcggcggcaccgatgagattctgtcgacgatcttcggcgtatgcttctttgccgccttcatcgaagtggtgctgagccagttcatcggcaaattgcgcatgctgatcaccccggtggtgaccggcaccatcattactctgatgggcctgtcgctgatcaaggtggcgatgaccgacattgccggcggcttcggcgcggcggatctgggcgcggccagccatgtgttcctggcggcgctggtgctgggcaccattgtggtgttgaaccgggttgacgtgccgttcctgcgcctgggggcgattgtcatcggcctgaccctcggctacgtggtggcgtggctgatgggcaccgttgatttcgccaacctgcccgaagtgccggtggtcagcgtgccggtgccgttcaaatacggtttcaactttgattgggtggcgttcgtgccggtagcggtgattttcctggtgtcgccgctggaggctgccggtgacctgaccgccaactcgatgatttcccggcaaccggtgaaaggcccgctgtacatccgccggatcaagtccgggctgctcgccgatggtctcaactcggccatggccgccgtgttcaacagcatgccgatggtgactttcgcccagaacaacggggtgatacagctcaccggcgtggccagccgctacgtggcgttcttcatcgccggcctgctggtgctgctggggctgttcccgatgatcggcgcggtgctgcaactgatgccgaaaccggtactcggcggcgcagagctggtgatgttcggcaccgtggccgtcgccgggatcaagatcctcgccgaggccggcctgcatcggcgcaacatgctcatcgtggcgatttccgtgggcatgggcctgggcatcgccgccgtgccggaagtgctgcgtgaactgccgcaggcgctgcgcaacatcttcgaatcgccgatcaccgtcggtgcgctgtgcgccatcgtgctgaatatcttcctgccggaagaattcatcgaactggaagaagatgacttcgacccggaagcctctatccttcaggtcatggaaaaccccgacctgccggccaaagctgaacccgcaaccaaggccgctgtcgcacagttgaaccgttga

SEQ ID NO: 2603 - protein, 488 aa, Pseudomonas fluorescens PfO-1
MTVSEKAPRNNDLIYGLNDRPHFTATVFAALQHVLASFVGIITPTLIMGGALGLQSEIPYLISMALFVSGLGTFVQAKRFGPVGSGLLCLQGTSFSFISVILSAGFMVKARGGGTDEILSTIFGVCFFAAFIEVVLSQFIGKLRMLITPVVTGTIITLMGLSLIKVAMTDIAGGFGAADLGAASHVFLAALVLGTIVVLNRVDVPFLRLGAIVIGLTLGYVVAWLMGTVDFANLPEVPVVSVPVPFKYGFNFDWVAFVPVAVIFLVSPLEAAGDLTANSMISRQPVKGPLYIRRIKSGLLADGLNSAMAAVFNSMPMVTFAQNNGVIQLTGVASRYVAFFIAGLLVLLGLFPMIGAVLQLMPKPVLGGAELVMFGTVAVAGIKILAEAGLHRRNMLIVAISVGMGLGIAAVPEVLRELPQALRNIFESPITVGALCAIVLNIFLPEEFIELEEDDFDPEASILQVMENPDLPAKAEPATKAAVAQLNR

SEQ ID NO: 2604 - DNA, 1443 bp, Vibrio cholerae 1587
  CDS (1)..(1443): transl_table=11
atgcgcaaggtgttattgaccatcaggaaaatcgctatgacacaaccgacttcacgtaaggcagatctggtctatcaactcaatgatcgtcctcctttgcctcaaactctcttcgcagccttgcaacatctgctggcgatgtttgtcgccgtgatcaccccatcgctgatcatttgccaatcccttggtgtacctgccgatcaaaccaacaccatcatcagcatgtcactgtttgcttcgggtttgtcatctttcattcaaatccgcacctttggcccaattggctcaggtttgctttccattcaaggcaccagctttaactttttaggccccattattggtgctggacttgcgctcaaagcaggcggtgcagatatagagaccatgatggccgcgatttttggtacgattttggtcgcctcaagcgctgaaattttactgtcccgcgtgctgcaatttgcccagcgcattatcacgccattagtctctgggattgtggtgaccttgattggcctaacgctggtacaagtcggattgatttcgatgggtggcggttatgcctctatggctgacggcagctttggtagccttgataagcttgcgctagctggcaccgtattggcgatcattgtgctgctgaaccgagcgcacaacccttacgtgcgagtggcttcgattgtgattgcgatgctggtaggttatgtaatggcgtacctgatgggcatggtcaataccgataacttggcacagactcaactcatcgcactgcctatcccgatgcaatatggcttagggtttgactggtcgctgtttattcctctggtgctgattttccttatcacggcactagaagcgattggtgatatcacggcgacctccgaagtctctggtgagcccgtgaaaggccctgtgtatatgaagcgcatcaaaggcggcgtattggccgatggcctcaactctgcccttgccgcggtatttaacagctttccaaactccacctttagccaaaacaacggcgtgatcctattaaccggcgttgccagccgttatgtgggttactttatcgcgggcatgttggtgctacttggcctcttccccggcgttgcaagctttgtacagttgattccggagcctgtgcttggcggcgcaacgattgtgatgtttggtacgattgctgcggcaggcgtgcgcattatctctcgcgtcgatttggatcgccgcgcgattctgatcatggcgctctccttctcgatgggtttgggaattgcgcaaaagccagagattctgcagtttatgcctgaatttattaagaatctgttctcttcaggtgtagccgcaggtggtattactgcaatcgtgcttaacctgctgctacctgaggtgcgccgagatgaagacgccgcttcagtagcgaaaacggaagcggcgcaagaatcaaactaa

SEQ ID NO: 2605 - protein, 480 aa, Vibrio cholerae 1587
MRKVLLTIRKIAMTQPTSRKADLVYQLNDRPPLPQTLFAALQHLLAMFVAVITPSLIICQSLGVPADQTNTIISMSLFASGLSSFIQIRTFGPIGSGLLSIQGTSFNFLGPIIGAGLALKAGGADIETMMAAIFGTILVASSAEILLSRVLQFAQRIITPLVSGIVVTLIGLTLVQVGLISMGGGYASMADGSFGSLDKLALAGTVLAIIVLLNRAHNPYVRVASIVIAMLVGYVMAYLMGMVNTDNLAQTQLIALPIPMQYGLGFDWSLFIPLVLIFLITALEAIGDITATSEVSGEPVKGPVYMKRIKGGVLADGLNSALAAVFNSFPNSTFSQNNGVILLTGVASRYVGYFIAGMLVLLGLFPGVASFVQLIPEPVLGGATIVMFGTIAAAGVRIISRVDLDRRAILIMALSFSMGLGIAQKPEILQFMPEFIKNLFSSGVAAGGITAIVLNLLLPEVRRDEDAASVAKTEAAQESN

SEQ ID NO: 2606 - DNA, 1407 bp, Vibrio cholerae MZO-3
  CDS (1)..(1407): transl_table=11
atgacacaaccgacttcacgtaaggcagatctgatctatcaactcaatgatcgtccccctttgcctcaaactctcttcgcagccttgcaacatctgctggcgatgtttgtcgccgtgatcaccccatcgctgatcatttgccaatcccttggtgtacctgccgatcaaaccaacaccatcatcagcatgtcactgtttgcttcgggtttgtcatctttcattcaaatccgcacctttggcccaattggctcaggtttgctttccattcaaggcaccagctttaactttttaggccccattattggtgctggacttgcgctcaaagcaggcggtgcagatatagagaccatgatggccgcgatttttggtacgattttggtcgcctcaagcgctgaaattttactgtcccgcgtgctgcaatttgcccagcgcattatcacgccattagtctctgggattgtggtgaccttgattggcctaacgctggtacaagtcggattgatttcgatgggtggcggttatgccgctatggctgacggcagctttggtagccttgataagcttgcgctagctggcaccgtattggcgatcattgtgctgctgaaccgagcgcacaacccttacgtgcgagtggcttcgattgtgattgcgatgctggtaggttatgtaatggcgtacctgatgggcatggtcaataccgataacttggcacagactcaactcatcgcactgcctatcccgatgcaatatggcttagggtttgactggtcgctgtttattcctctggtgctgattttcctcatcacggcactagaagcgattggtgatatcacggcgacctccgaagtctctggtgagcccgtgaaaggccctgtgtatatgaagcgcatcaaaggcggcgtattggccgatggcctcaactcagcccttgccgcggtatttaacagctttccaaactccacctttagccaaaacaacggcgtgatcctattaaccggcgttgccagccgttatgtgggttattttatcgcgggcatgttggtactacttggcttgttccctggcgtagcaagctttgtacagttgattcctgaacctgtgctcggcggtgcaacaatcgtgatgtttggtacgattgccgcagcaggtgtgcggattatttcccgcgtagatttggatcgccgtgccatcctgatcatggcactctccttctctatgggattgggtatcgcacaaaaaccagaaattctgcagtttatgccggaatttattaagaatttgttctcttctggtgtggccgcaggcggtattaccgcaatcgtgcttaacctgctgctacctgaggtgcaccgagatgaaaacgccgcttcagtatcaaaaacggaagcggcgcaagaatcaaactaa

SEQ ID NO: 2607 - protein, 468 aa, Vibrio cholerae MZO-3
MTQPTSRKADLIYQLNDRPPLPQTLFAALQHLLAMFVAVITPSLIICQSLGVPADQTNTIISMSLFASGLSSFIQIRTFGPIGSGLLSIQGTSFNFLGPIIGAGLALKAGGADIETMMAAIFGTILVASSAEILLSRVLQFAQRIITPLVSGIVVTLIGLTLVQVGLISMGGGYAAMADGSFGSLDKLALAGTVLAIIVLLNRAHNPYVRVASIVIAMLVGYVMAYLMGMVNTDNLAQTQLIALPIPMQYGLGFDWSLFIPLVLIFLITALEAIGDITATSEVSGEPVKGPVYMKRIKGGVLADGLNSALAAVFNSFPNSTFSQNNGVILLTGVASRYVGYFIAGMLVLLGLFPGVASFVQLIPEPVLGGATIVMFGTIAAAGVRIISRVDLDRRAILIMALSFSMGLGIAQKPEILQFMPEFIKNLFSSGVAAGGITAIVLNLLLPEVHRDENAASVSKTEAAQESN

SEQ ID NO: 2608 - DNA, 1773 bp, Pichia stipitis; identical to SEQ ID NO: 2418
  CDS (1)..(1773): transl_table=12

SEQ ID NO: 2609 - protein, 590 aa, Pichia stipitis
MLKAETFKSYTKRVVRKWTTKEGFFGDYDYAYLFIPDIPFITKEPKTQPFFGLNSDMPLLLGFILGFQHALAMLAGVVTPPIIIASAANLDASLQEYLVSASLIASGILSAIQITRFHIFGTPYYLGTGLLSVVGTSFATISIVVNALPMMYSNGECPVAEDGTQLPCPNGYGHILASGIVCALLEMLLSFMPAKILQKIFPPLVTGPVVLLIGAHLVESGFQDWLGGSGCVGEVCAVGSKNITWGSGEFIGLGFLVFVSIIIAEKFGSPIMKSCAVIFGLLIGCIVAAACGYFSHESIDAAPAATFIWVHTFKLKVYGPIILPFLAVYLTLMMEAIGDITATCDVSRLEVEGEQYESRIQGGILADGFNGMLAGLMTITPMSTFAQNNGVISITKCANRRVGYWCCFFMIIMGIFSKFAAAIVSIPKAVLGGMTSFLFCSVAVSGIRIICSTEFTRRDRFVLTAALLPGLGSILVPNWFSNVFTYSGSNNSLQGFYNAIILVMETGFAVTGFLGVILNLLLPQVSDNIEEINELVLETVGSADQRGMEKFAEKEGIPLEAITSNPGVPLDVIRSQLRAPGKSSSDSDTK

SEQ ID NO: 2610 - DNA, 1449 bp, Marinomonas sp. MED121
  CDS (1)..(1449): transl_table=11
atgagtaataacaatcagcaagaaaagcaatctaacaatgataaaaatgaattaatctatggtcttaatgacaggccagaaccccttaaggccttatttgctgcgtttcagcatatcttggccagttttgtcggcattaccacaccagccttgatcatagggggagtgttagggctcggtgaacatcttccctatttaatcagtatggccctaatcgtttctggggttggtacctttattcaagcgaaacgtgtcggccctattggttctggattgttatgtgtacaaggcaccagttttgcctttttaagcgccgtattggctgctggttttttagtgaaaaaccgcggcggtagttccgaagatattctcgccatgatctttggtgtgtgtctgtgttctgctttcatcgaaattgtattaagtcgtttcatgcataagcttggccgtatcattacaccagtggtgacaggtatcgtgattaccactattgggctgtccttaatcaaagtgggtatgacagatttagcgggtggctttaatgcgcaagataagggcgcgctgcattatcttgcgattggcggcatcacattaagtaccattattctgttaaaccgttttagtaatcaaacactgcgtctttcagccatcatgataggtatgcttgttggctatattagtgcggctttcatggggatggttaattatgatattgccgaagtggcgcttattactatcccaacgccatttaaatacggtttagattttgatattgccgctttcattcctgttgccattatttcagtcgtgactgcaatagaaacgactggtgacttaactgctaactccatggtctctaatgagccagtaaaaggccctgtttacatgcgccgtattaaagccggtgtactgggtgatggtactaactcgactatagcggcgattatggggagttttcctatgtcgacctttagtcagaataacggtgtgattcagcttaccggtgtcgccagtcgttatgtagctttctatatagcaggcttatttgtgctgttaggtatgttccccattatcggtgctttcttacaaactatgcctaagccagtactcggtggtgcaacacttgtgatgtttggaaccgttgccgcggcagggattcgaattcttgctactgctgaacttggccgtcgtgaccttttaattatggctgtctcttttggcttaggtttaggtgtgacagcggtacctgaagtgaatagtgcaatgccaccgttgcttaaaagcttaatgggctcatctgtaactgttgcgggtttatctgctatcttcatgagtttgttattgcctatgagtaagcgtgaacttaaaaagattgacgcggctgagaaacaggcagaaaaagaagcggaagcattagcgaaaacagataaaggtttagatgcggtttaa

SEQ ID NO: 2611 - protein, 482 aa, Marinomonas sp. MED121
MSNNNQQEKQSNNDKNELIYGLNDRPEPLKALFAAFQHILASFVGITTPALIIGGVLGLGEHLPYLISMALIVSGVGTFIQAKRVGPIGSGLLCVQGTSFAFLSAVLAAGFLVKNRGGSSEDILAMIFGVCLCSAFIEIVLSRFMHKLGRIITPVVTGIVITTIGLSLIKVGMTDLAGGFNAQDKGALHYLAIGGITLSTIILLNRFSNQTLRLSAIMIGMLVGYISAAFMGMVNYDIAEVALITIPTPFKYGLDFDIAAFIPVAIISVVTAIETTGDLTANSMVSNEPVKGPVYMRRIKAGVLGDGTNSTIAAIMGSFPMSTFSQNNGVIQLTGVASRYVAFYIAGLFVLLGMFPIIGAFLQTMPKPVLGGATLVMFGTVAAAGIRILATAELGRRDLLIMAVSFGLGLGVTAVPEVNSAMPPLLKSLMGSSVTVAGLSAIFMSLLLPMSKRELKKIDAAEKQAEKEAEALAKTDKGLDAV

SEQ ID NO: 2612 - DNA, 1317 bp, Bacteroides caccae ATCC 43185
  CDS (1)..(1317): transl_table=11
atgaaaacagatttaatttacggtgtagaagaccgtcctccttttaaggaagccttgtttgcagccttgcaacatttactggccatttttgtagccataataacacctcctcttatcatagcaagtgccttgaaactggatgtagaaaagacgggctttcttgtttccatgtccttgttcgcttcgggagtttccactttcgtacaatgccgtcgtttcggtccggtgggggcgggactgctctgtattcagggaacaagtttttcctttatcggtcctatcatagccacgggattagtaggtggattaccgttgattttcggttcctgtatggctgccgctccgattgaaatgattgtcagccgtacattcaaatatcttcgcaacatcatcactccgttggtgtccggcattgtcgtactgcttatcggattgagcctgataaaggtcggcatcgtatcttgtagcggcggatattcggcaatggataacggtactttcggttcgtgggaaaacctgtctatcgcagcattggtattattgagcgtattgtttttcaatcgttgcagaaacaaatacctgcgcatgagctctatcgtgctcggtctttgtttgggttatggattggcttttgctttgggaaaagtagatatgagttcgctgaatgttgaaatgctgatgagctttaatatccctcaaccttttaaatatggtgttgaattcaatgtttcgtcttttattgccattggtttagtttatttgataactgccattgaagcaacaggcgacgtgactgccaactccatgatttccggtcttccgatcgagggtgattcatatctaaaacgtgtttccggcggtgtcatggcagacgggttcaattcctttcttgccggagtcttcaattcctttccgaactcaatctttgcccaaaataatggtattatccaactgaccggagtggccagccgctatgtgggttattacattgccgcaatgcttgtcttgttggggttattccccattgtaggagccgtattctctttaatgcccgatcccgtattgggtggtgcaaccttactgatgttcggtaccgtagcagctgcaggaatccgtattatttcgtcccaggaaatagggcgtaaagagacattggtattggcagtcagcctctccttaggactgggtgtagaattaatgccggatgtcttgaaacaggctccggaagcgatacgaagcatattttcttcaggaatcaccaccggaggccttactgcaattattgcgaatgtcgtaatacgcgtaaaagagaactaa

SEQ ID NO: 2613 - protein, 438 aa, Bacteroides caccae ATCC 43185
MKTDLIYGVEDRPPFKEALFAALQHLLAIFVAIITPPLIIASALKLDVEKTGFLVSMSLFASGVSTFVQCRRFGPVGAGLLCIQGTSFSFIGPIIATGLVGGLPLIFGSCMAAAPIEMIVSRTFKYLRNIITPLVSGIVVLLIGLSLIKVGIVSCSGGYSAMDNGTFGSWENLSIAALVLLSVLFFNRCRNKYLRMSSIVLGLCLGYGLAFALGKVDMSSLNVEMLMSFNIPQPFKYGVEFNVSSFIAIGLVYLITAIEATGDVTANSMISGLPIEGDSYLKRVSGGVMADGFNSFLAGVFNSFPNSIFAQNNGIIQLTGVASRYVGYYIAAMLVLLGLFPIVGAVFSLMPDPVLGGATLLMFGTVAAAGIRIISSQEIGRKETLVLAVSLSLGLGVELMPDVLKQAPEAIRSIFSSGITTGGLTAIIANVVIRVKEN

SEQ ID NO: 2614 - DNA, 1437 bp, Vibrio cholerae MZO-2
  CDS (1)..(1437): transl_table=11
atgtgtaaggtgttattgaccatcaggaaaatcgctatgacacaaccgacttcgcgtaaagcagatctggtctatcaactaaatgatcgtccacctttgcctcaaactatcttcgcagccctgcaacatctgctggcgatgtttgtcgccgtgatcaccccatcgctgatcatttgccaatcccttggtgtacctgccgatcaaaccaacaccatcatcagcatgtcactgtttgcttcgggtttatcatcctttattcaaatccgcacctttggtccaattggctcaggtttgctttccattcaaggcaccagctttaacttcttaggcccgattatcggtgcaggacttgcgctcaaagcaggcggtgcagatatagagaccatgatggccgcgatttttggtacgattttggtcgcctcaagcgctgaaattttactgtcccgcgtgctgcaatttgcccagcgcattatcacgccattagtctctgggattgtggtgaccttgattggcctaacgctggtacaagtcggattgatttcgatgggtggtggttatgccgctatggctgacggcagctttggtagccttgataagcttgcgctagctggcaccgtattggcgatcattgtgctgctgaaccgagcgcacaacccttacgtgcgagtggcttcgattgtgattgcgatgctggtaggttatgtaatggcgtacctgatgggcatggtcaataccgataacttggcacagactcaactcatcgcactgcctatcccgatgcaatatggcttagggtttgactggtcgctgtttattcctctggtgctgattttcctcatcacggcactagaagcgattggtgatatcacggcgacctccgaagtctctggtgagccagtgaaaggccctgtgtatatgaagcgcatcaaaggtggcgtactagcggatggcatcaattccgcattagccgcggtgtttaacagcttcccgaactcaacgttcagccaaaacaacggcgtgatcctattaaccggcgttgccagccgttatgtgggttactttatcgcgggcatgttggtgctgcttggcctcttccccggcgttgcaagctttgtacagttgattcctgaacctgtgcttggcggcgcaacgattgtgatgtttggtacgattgctgcggcaggcgtgcgcattatctctcgcgtcgatttggatcgccgtgcgattctgatcatggcgctctccttctcaatgggtttgggaattgcgcaaaagccagagattctgcagtttatgccggaatttattaagaatctgttctcttcaggtgtagctgcaggtggtattaccgccatcgtgcttaacctgctgctgccagaagtacgccgagatgaaaacgccgcttcggttaccgaaacggcgcaagagtcaaactaa

SEQ ID NO: 2615 - protein, 478 aa, Vibrio cholerae MZO-2
MCKVLLTIRKIAMTQPTSRKADLVYQLNDRPPLPQTIFAALQHLLAMFVAVITPSLIICQSLGVPADQTNTIISMSLFASGLSSFIQIRTFGPIGSGLLSIQGTSFNFLGPIIGAGLALKAGGADIETMMAAIFGTILVASSAEILLSRVLQFAQRIITPLVSGIVVTLIGLTLVQVGLISMGGGYAAMADGSFGSLDKLALAGTVLAIIVLLNRAHNPYVRVASIVIAMLVGYVMAYLMGMVNTDNLAQTQLIALPIPMQYGLGFDWSLFIPLVLIFLITALEAIGDITATSEVSGEPVKGPVYMKRIKGGVLADGINSALAAVFNSFPNSTFSQNNGVILLTGVASRYVGYFIAGMLVLLGLFPGVASFVQLIPEPVLGGATIVMFGTIAAAGVRIISRVDLDRRAILIMALSFSMGLGIAQKPEILQFMPEFIKNLFSSGVAAGGITAIVLNLLLPEVRRDENAASVTETAQESN

SEQ ID NO: 2616 - DNA, 1437 bp, Vibrio cholerae 623-39
  CDS (1)..(1437): transl_table=11
atgcgcaaggtgttattgaccatcaggaaaatcgctatgacacaacctacttcgcgtaaggcagatctggtctatcaactcaatgatcgtccacctctaccgcaaaccttatttgccgccttgcaacatttgctggccatgtttgtcgccgtgatcaccccatcgctgatcatttgccaatcccttggtgtacctgccgatcaaaccaacacaatcatcagcatgtcactgtttgcttcgggtttgtcatctttcattcaaatccgcacctttggcccaattggctcaggtttgctttccattcaaggcaccagctttaactttttaggccccattattggtgctggacttgcgctcaaagcaggcggtgcagatatagagaccatgatggccgcgatttttggtacgattttggtcgcctcaagcgctgaaattttactgtcccgcgtgctgcaatttgcccagcgcattatcacgccattagtctctgggattgtggtgaccttgattggcctaacgctggtacaagtcggattgatttctatgggtggcggttatgccgctatggctgacggcagctttggtagccttgataagcttgcgctagctggcaccgtattggcgatcattgtgctgctgaaccgagcgcacaacccttacgtgcgagtggcttcgattgtgattgcgatgctggtaggttatgtaatggcgtacctgatgggcatggtcaataccgataacttggcaccgactcaactcatcgcactgcctatcccgatgcaatatggcttagggtttgactggtcgctgtttattcctctggtgctgattttcctcatcacggcactagaagcgattggtgatatcacggcgacctccgaagtctctggtgagcccgtgaaaggccctgtgtatatgaagcgcatcaaaggcggcgtattggccgatggcctcaactctgcccttgccgcggtatttaacagcttcccgaactcaacgttcagccaaaacaacggcgtgatcctattaaccggcgttgccagccgttatgtgggttactttatcgcgggcatgttggtgctacttggcctcttccccggcgttgcaagctttgtacagttgattcctgaacctgtgctcggcggtgcaacgattgtgatgtttggtacgattgctgcggcaggcgtgcgcatcatctctcgcgtcgatttggatcgtcgcgcgattctgatcatggcgctctccttctcaatgggtttaggaattgcgcaaaagccagagattctgcagtttatgccggaatttattaagaatctgttctcttcaggtgtagccgcaggtggtattaccgctatcgtgcttaatctgctgctgccagaagtacgccgagatgaaaacgccgcttcggttaccgatacggcgcaagaatcaaactaa

SEQ ID NO: 2617 - protein, 478 aa, Vibrio cholerae 623-39
MRKVLLTIRKIAMTQPTSRKADLVYQLNDRPPLPQTLFAALQHLLAMFVAVITPSLIICQSLGVPADQTNTIISMSLFASGLSSFIQIRTFGPIGSGLLSIQGTSFNFLGPIIGAGLALKAGGADIETMMAAIFGTILVASSAEILLSRVLQFAQRIITPLVSGIVVTLIGLTLVQVGLISMGGGYAAMADGSFGSLDKLALAGTVLAIIVLLNRAHNPYVRVASIVIAMLVGYVMAYLMGMVNTDNLAPTQLIALPIPMQYGLGFDWSLFIPLVLIFLITALEAIGDITATSEVSGEPVKGPVYMKRIKGGVLADGLNSALAAVFNSFPNSTFSQNNGVILLTGVASRYVGYFIAGMLVLLGLFPGVASFVQLIPEPVLGGATIVMFGTIAAAGVRIISRVDLDRRAILIMALSFSMGLGIAQKPEILQFMPEFIKNLFSSGVAAGGITAIVLNLLLPEVRRDENAASVTDTAQESN

SEQ ID NO: 2618 - DNA, 1392 bp, Vibrio harveyi HY01
  CDS (1)..(1392): transl_table=11
atgacaacttcaaaccgaacttcggaactggtctatcagttaaacgatcgtccaccactacctcagaccatttttgctgcacttcagcacttattggcgatgttcgtagccgttatcaccccttctctgatcatttgtcagtctttgggtgtgcctgctgaccaaaccaacaccatcatcagcatgtcgctgtttgcatctggcgtgtcttcctttattcaaattcgtacctttggacctatcggctctggcttgctttcagtgcaaggcaccagcttcaacttccttggtccaatcattggtgcgggtctttctcttaaagccggcggcgcggacatcagcaccatgatggcagcgattttcggtactatcttggtggcgtcttttgctgaaatcctgctatctcgcgtcctagaacacgcacgccgcatcattacaccattggtatctggcattgtcgtgacgcttattggcctgaccctaattcaagtgggtttggtatcaatgggtggtggctacgcggcaatgggcgatggatctttcggtagcctagacaagttagctctcgctggtacagtacttggcttgatcgtaatccttaaccgttcaaagaacccatacctgcgtgttgcatcaattgttattgcaatgctggttggctacgtcatggcgtacttcatgggcatggtcgacacatcaacactaggcgaaactgacctcatcgcactgccaatcccaatgcaatacggcttaagcttcgactggtcgctgtttatcccactggttctgattttcttcatcacggcactagaagcaatcggtgacatcaccgcgacgtctgaagtttccggtgagccagtgaaaggtccggtttacatgaagcgcatcaaaggcggcgtattggctgacggtctgaactcagcgattgcagcagtattcaacagcttcccaaactctaccttcagccaaaacaacggcatcattatgctcacaggcgtagctagccgttacgtaggttacttcatctcaggcatgctagtaattttgggtcttttcccgggtgtggcaagctttgttcagctgattcctgagccagtgctgggcggcgcgactatcgtgatgttcggtaccattgccgctgcgggtgtacgcatcatctcccgtgtcgacctcgatcgccgcgcaatcctaattatggcgctgtcgttctcgatgggtttaggcattgcacaaaaaccagaaattctgcaattcatgcctgagtttattaagagcattttctccaccggcgtagcagcaggcggtatcaccgctatcgtattgaacctattgcttccagagaaattggaagaggaagatgagccggttgctcaagaggtaaaagaatcctaa

SEQ ID NO: 2619 - protein, 463 aa, Vibrio harveyi HY01
MTTSNRTSELVYQLNDRPPLPQTIFAALQHLLAMFVAVITPSLIICQSLGVPADQTNTIISMSLFASGVSSFIQIRTFGPIGSGLLSVQGTSFNFLGPIIGAGLSLKAGGADISTMMAAIFGTILVASFAEILLSRVLEHARRIITPLVSGIVVTLIGLTLIQVGLVSMGGGYAAMGDGSFGSLDKLALAGTVLGLIVILNRSKNPYLRVASIVIAMLVGYVMAYFMGMVDTSTLGETDLIALPIPMQYGLSFDWSLFIPLVLIFFITALEAIGDITATSEVSGEPVKGPVYMKRIKGGVLADGLNSAIAAVFNSFPNSTFSQNNGIIMLTGVASRYVGYFISGMLVILGLFPGVASFVQLIPEPVLGGATIVMFGTIAAAGVRIISRVDLDRRAILIMALSFSMGLGIAQKPEILQFMPEFIKSIFSTGVAAGGITAIVLNLLLPEKLEEEDEPVAQEVKES

SEQ ID NO: 2620 - DNA, 1413 bp, Vibrio parahaemolyticus AQ3810; identical to SEQ ID NO: 2400
  CDS (22)..(1413): transl_table=11

SEQ ID NO: 2621 - protein, 463 aa, Vibrio parahaemolyticus AQ3810
MTTSNRSSELVYQLNDRPPLPQTIFAALQHLLAMFVAVITPSLIICQSLGVPADQTNTIISMSLFASGVSSFIQIRTFGPVGSGLLSVQGTSFNFLGPIIGAGLSLKAGGADISTMMAAIFGTILVASFAEILLSRVLEHARRIITPLVSGIVVTLIGLTLIQVGLVSMGGGYAAMGDGTFGSLDKLALAGTVLGLIVILNRSKNPYIRVASIVIAMLVGYVMAYFMGMVDTSKLGETNLVALPIPMQYGLSFDWSLFIPLVLIFFITALEAIGDITATSEVSGEPVKGPIYMKRIKGGVLADGLNSAIAAVFNSFPNSTFSQNNGIIMLTGVASRYVGYFISGMLVILGLFPGVASFVQLIPEPVLGGATIVMFGTIAAAGVRIISRVDLDRRAILIMALSFSMGLGIAQKPEILQFMPEFIKSIFSTGVAAGGITAILLNLLLPEKLTEEDELVAQEVKES

SEQ ID NO: 2622 - DNA, 1371 bp, Parabacteroides merdae ATCC 43184
  CDS (1)..(1371): transl_table=11
atgaaactaaacctggaagagcaggaagaaacgattgaaccggtcgaaaagaccgatctgatttatggtatagacgaccgtcccccttttaaggaagccctgtttgccgctttacaacatttgctggcgatctttgtggcgatcattacgcccccgttgattattgccggagccttgaagctggatctcgaaacaaccggttttctggtttcgatggcactctttgcatctggcgtctcgacattcatacagtgtcgccggattggtccggtaggggcgaagttgctttgtatccagggaacgagtttttctttcatcggtccgatcataacggccggactggcaggaggattgccccttatattcggggcgtgtattgcggcagccccgatcgagatggtaatcagccggacattcaagtatatgcgttctatcataactccactggtatcgggcatcgtggtgctgctgatcggacttagcttgatcaaggttggagtcgtttcatgtggcggcggctatggtgcgatggataacgggacgttcgggagcatccggaatataggggtggcggcgacagtgttgctgagtgtcctgttctttaaccgttgcaagaacaagtatcttcgtatgagttcgatcgtattggggttgtgcatcggttatgcgctggcctactttctcggtatggtcgatatggcggcggcttcttcgcaaagcctgatgggattcaatatcccgatgcctttcaaatatgggttggacctgaatttctccgcctttgtcgctattggcctggtgtatctgattacggcgatcgaagctaccggcgatgtgacggccaactcgatgatctcaggaaagtcaatagaaggagaggactacctgaagcgtgtttcgggcggcgtgctggcagatggagtgaactcctttattgccgggattttcaattctttccccaattcgatctttgcgcagaataacggtattatccagctgacgggagttgccagccggtatgtcggatattatatcgccggtatgttggtgctgttagggttgttccctgttgtcggtgttgtcttttccttgatgcctgacccggtgttgggtggggcgaccttattgatgttcggtacggttgcggctgccggcatacggattatcgcatcgcaggaaatcaatcggaaggcgactttggttttggcggtcagcctctcgcttggcttgggagtggagctgatgccggatatcctgaatacggcgccggaagctgtaaagggtattttttcgtccgggatcacaaccggtggacttgccgctattattgcaaatgtattgatacgagtcaaagaagataaaacagaataa

SEQ ID NO: 2623 - protein, 456 aa, Parabacteroides merdae ATCC 43184
MKLNLEEQEETIEPVEKTDLIYGIDDRPPFKEALFAALQHLLAIFVAIITPPLIIAGALKLDLETTGFLVSMALFASGVSTFIQCRRIGPVGAKLLCIQGTSFSFIGPIITAGLAGGLPLIFGACIAAAPIEMVISRTFKYMRSIITPLVSGIVVLLIGLSLIKVGVVSCGGGYGAMDNGTFGSIRNIGVAATVLLSVLFFNRCKNKYLRMSSIVLGLCIGYALAYFLGMVDMAAASSQSLMGFNIPMPFKYGLDLNFSAFVAIGLVYLITAIEATGDVTANSMISGKSIEGEDYLKRVSGGVLADGVNSFIAGIFNSFPNSIFAQNNGIIQLTGVASRYVGYYIAGMLVLLGLFPVVGVVFSLMPDPVLGGATLLMFGTVAAAGIRIIASQEINRKATLVLAVSLSLGLGVELMPDILNTAPEAVKGIFSSGITTGGLAAIIANVLIRVKEDKTE

SEQ ID NO: 2624 - DNA, 1314 bp, Bacteroides ovatus ATCC 8483
  CDS (1)..(1314): transl_table=11
atgaaaactgatttaatctacggcgtagaagaccgtcccccctttaaagacgccctgtttgcggctttacaacatctcctggctattttcgtagcaattattacacctccgctaatcatcgcgagtgccttgaaactggatgtggaaaagacaagctttctggtttccatgtctctttttgcttcgggagtatcaactttcatacaatgccgtcgttttggtgcgataggagcaaagttactctgcattcagggtaccagtttttcttttatcggccctatcatcgccaccggattagtgggtggtttgcctttgatattcggttcctgtatggctgccgcacctatcgagatgattgtgagccgcacattcaagtatctgcgcaatattattactccgttggtatccggtattgttgtactgctgatcggattaagcctgataaaggtcggtattgtatcttgcggaggcggatatgcggctatggataacggtacatttgccacttgggaaaatctgtccattgcaggattggtgcttcttagcgtcttgttttttaatcgttgccggaataaatacctgcgtatgagttccattgtgctcggactttgtcttggttatgctttggcatttgctttgggaaaagtggatatgagttcgttgaatgtggaaatgctgatgagctttaatattccccaacctttcaaatacggtgttgatttcaatgtatcttctttcatagccattggcttggtttatctaatcacagcaatcgaagcaacaggcgatgtgactgccaactctatgatttccggacttcccattgaaggagattcctatttgaaacgggtttccggtggagtaatggcggatggattcaactcctttctcgccggtgtattcaactcttttccaaactccatctttgcacaaaacaacggtattattcaactgactggagtagccagccgttatgtcggctattatattgcagcaatgctcgtccttttaggtttattccccatcgtcggtgccgtattctctttaatgcctgatcctgtattaggcggtgccactttattgatgttcggtacggtagccgctgcaggaatccgtattgtctcctcacaagaaattggacgtaaagaaactctggtattagcggtcagcctttctttaggcttgggcgtagaattaatgccggatgtattacaacaaactccggaagcaattcgaagtatcttctcttcaggaatcaccaccggaggcttaactgcaattattgcaaatatagtaatacgggtaaaagaatga

SEQ ID NO: 2625 - protein, 437 aa, Bacteroides ovatus ATCC 8483
MKTDLIYGVEDRPPFKDALFAALQHLLAIFVAIITPPLIIASALKLDVEKTSFLVSMSLFASGVSTFIQCRRFGAIGAKLLCIQGTSFSFIGPIIATGLVGGLPLIFGSCMAAAPIEMIVSRTFKYLRNIITPLVSGIVVLLIGLSLIKVGIVSCGGGYAAMDNGTFATWENLSIAGLVLLSVLFFNRCRNKYLRMSSIVLGLCLGYALAFALGKVDMSSLNVEMLMSFNIPQPFKYGVDFNVSSFIAIGLVYLITAIEATGDVTANSMISGLPIEGDSYLKRVSGGVMADGFNSFLAGVFNSFPNSIFAQNNGIIQLTGVASRYVGYYIAAMLVLLGLFPIVGAVFSLMPDPVLGGATLLMFGTVAAAGIRIVSSQEIGRKETLVLAVSLSLGLGVELMPDVLQQTPEAIRSIFSSGITTGGLTAIIANIVIRVKE

SEQ ID NO: 2626 - DNA, 1392 bp, Vibrio campbellii AND4
  CDS (1)..(1392): transl_table=11
atgacaacttcaaaccgagcttcggaactggtctatcaattaaacgatcgtccaccactacctcagaccatttttgctgcagttcagcacttactggcgatgttcgtagccgttatcactccttctctgattatttgtcagtccttgggggtgcctgctgaccaaacgaataccatcatcagcatgtcattatttgcatctggcgtatcttcatttatccagatccgtacgtttggccctatcggctcgggcttactttcagtgcaagggaccagctttaactttctcggtccgattatcgctgctggcctgtccctaaaagcaggcggcgctgacatcagtaccatgatggcggcaattttcggcaccatcttggtggcctcttttgctgaaatcctgttatctcgagtgctagaacacgcacgtcgtatcatcacgccgctggtatctggcattgttgtaacgcttatcggcctgacacttatccaggtaggcttggtctctatgggtggcggctacgctgccataagtgatggctctttcggtagcctagataagttggctttggcgggcacagtacttggtttgatagtgatccttaaccgctcaaaaaacccttacgtgcgcgttgcatctatcgtgattgccatgctagttggctacgttatggcatgctttatgggtatggtcgacacgtccaaactggggaaaacagacctcatcgcactgccgatacccatgcaatacggcttgagcttcgactggtctctgtttatcccgctggttctgattttctttatcaccgctctagaagcaattggcgacattactgcaacgtctgaggtttccggtgagccagtaaaaggtccggtttacatgaagcgcatcaaaggtggcgtattagcagatggtttgaactcagccattgcagcagtattcaacagcttcccaaattcaaccttcagccaaaacaacggcatcattatgctgactggtgtcgccagccgctatgtaggctacttcatctcaggtatgttagtgattctgggcttgttcccgggtgtagccagctttgttcagctgatccctgagccagtattgggcggtgccaccatagtgatgttcggtactatcgcagcggcgggtgtgcgcatcatctctcgtgttgatctagaccgtcgcgctattttgatcatggcactgtcattttcaatgggcttgggtatcgcacaaaaaccagaaattctgcaattcatgcctgagttcattaaaagtattttctcaactggcgtggctgctggcggcattaccgctatcattctgaacctattgcttccagagaaactggaagaggatgatgagcccacagctcaaacgattaaagaatcttaa

SEQ ID NO: 2627 - protein, 463 aa, Vibrio campbellii AND4
MTTSNRASELVYQLNDRPPLPQTIFAAVQHLLAMFVAVITPSLIICQSLGVPADQTNTIISMSLFASGVSSFIQIRTFGPIGSGLLSVQGTSFNFLGPIIAAGLSLKAGGADISTMMAAIFGTILVASFAEILLSRVLEHARRIITPLVSGIVVTLIGLTLIQVGLVSMGGGYAAISDGSFGSLDKLALAGTVLGLIVILNRSKNPYVRVASIVIAMLVGYVMACFMGMVDTSKLGKTDLIALPIPMQYGLSFDWSLFIPLVLIFFITALEAIGDITATSEVSGEPVKGPVYMKRIKGGVLADGLNSAIAAVFNSFPNSTFSQNNGIIMLTGVASRYVGYFISGMLVILGLFPGVASFVQLIPEPVLGGATIVMFGTIAAAGVRIISRVDLDRRAILIMALSFSMGLGIAQKPEILQFMPEFIKSIFSTGVAAGGITAIILNLLLPEKLEEDDEPTAQTIKES

SEQ ID NO: 2628 - DNA, 1320 bp, Bacteroides stercoris ATCC 43183
  CDS (1)..(1320): transl_table=11
atggaaaaacaacagggaaacggactgatttacggcttgaacgacaagccgccttttaaggaagctttcttcgctgcgctgcaacatctgctcgccatattcgtagccatcatcaccccgccgctcatcattgcgggcgcattgaagctcgatgcggaaactaccggctatctggtttcgatggcgctgttcgcatccggcatatccacgtttatccaatgccgcaggttcggcggactgggcacggggctgctctgcatccagggaaccagcttttcgttcataggtcccatcatctctgccggaatgctgggcgggcttcccctgattttcggttcctgcatggcggcttcaagcgtggagatgctgataagccgggtgttgaaatacacaaagaagattatcacgccgctgatatccggcatcgtagtcaccctcatcggaatgagcctgataaaggtaggaatcacagcctgcggcggcggagccacggcacaggcggacggcagcttcggcagtttccgccatgtgggccttgcggcggcggtactgctgcttatcatcgccttcaaccggagttccaaccgctacctgcgcatgagttccatcgtcatcggactggtgataggctacatcgcagcctggttcatgggcatcatcgacttctcctcgatacaaagctacggcggcttcaacctgccgatgcctttccgctacggactggacttcgacctgtccaccatcatcgccctgggacttattttcatgattaccgccatcgaggcatacggtgacatcaccgccaactcccttatctccggcgaaccggtggaaggggataccttcgtaaagcgcgcttcgggcggtatccttgccgacggcttcaactccatgctggcgggtgcgctcaactccttccccaactccgtctttgcacagaacaacggaatgatacaactgaccggagttgccagccggtatgtgggctattacatcgcagcctttcttgtactgctcggcctgttccctgccgtgggactggtattttcactgatgcccgaacccgtattgggcggcgctactctgctgatgttcggtacggtggcggcggcaggcatccgcatcattgcagcgcaggaaatcaaccggaaggctacccttgtcatggctgtcagtttctcgctcggcctcagtgtggagctggttcccgagatactgtgccaactgccggaaacgctgcggaacatcttcgcatccggcatcacaacgggcgggataacggctattctggcaaatctgctgattcatatcaaggagtaa

SEQ ID NO: 2629 - protein, 439 aa, Bacteroides stercoris ATCC 43183
MEKQQGNGLIYGLNDKPPFKEAFFAALQHLLAIFVAIITPPLIIAGALKLDAETTGYLVSMALFASGISTFIQCRRFGGLGTGLLCIQGTSFSFIGPIISAGMLGGLPLIFGSCMAASSVEMLISRVLKYTKKIITPLISGIVVTLIGMSLIKVGITACGGGATAQADGSFGSFRHVGLAAAVLLLIIAFNRSSNRYLRMSSIVIGLVIGYIAAWFMGIIDFSSIQSYGGFNLPMPFRYGLDFDLSTIIALGLIFMITAIEAYGDITANSLISGEPVEGDTFVKRASGGILADGFNSMLAGALNSFPNSVFAQNNGMIQLTGVASRYVGYYIAAFLVLLGLFPAVGLVFSLMPEPVLGGATLLMFGTVAAAGIRIIAAQEINRKATLVMAVSFSLGLSVELVPEILCQLPETLRNIFASGITTGGITAILANLLIHIKE

SEQ ID NO: 2630 - DNA, 1392 bp, Escherichia albertii TW07627
  CDS (1)..(1392): transl_table=11
atgtctgtttccaccctcgagtccgaaaatgcgcaaccggttgcgcagactcaaaacagcgaactgatttatcgtcttgaagatcgtccgccgcttcctcaaaccttatttgccgcctgtcagcacctgctggcaatgtttgtcgcggtgatcacgccagcactgttaatttgccaggcattaggtttaccagcacaggacacacaacacattattagtatgtcgctgtttgcctctggtgtggcatcgattattcagattaaagcctggggacctgtcggttcaggactgctgtcaattcagggcaccagcttcaactttgttgcgccgctgattatgggcggaacggcactaaagaccggtggtgccgatgttccgacaatgatggcggcgctgttcggcacgctaatgctggcaagctgtaccgagatgattatctcccgtgttctgcacctggcgcgccgcattattacaccgctggtttctggcgttgtggtgatgattatcggcctctcgctgattcaggtagggctaacgtccattggcggcggctatgcagccatgagcgataacaccttcggtgcgccaaaaaatctgctgctggcgggcgtggtattagttttaatcattctgcttaaccgtcaacgcaacccgtatctgcgcgtcgcctcgctggtgattgcaatggcggcaggctatgcgctggcgtggttcatgggcatgttgccagagagcaacgaaccgatggcgcaagaactgattatggtgccaacaccgctttattatggccttggcattgagtggagcctgctgctgccgctgatgctggtctttatgatcacctcgctggaaacgattggcgacatcaccgccacctctgacgtttctgaacagccggtttccggtccgttgtacatgaaacgcctgaaaggcggcgtgctggcaaatggcctgaactcatttgtgtcggcagtatttaacactttcccgaactcctgtttcgggcaaaacaacggtgtgatccagttaaccggtgttgccagccgctacgttggctttgtcgtggcgctgatgttaatcgtgctgggcctgttcccggcagtgagcggttttgtgcaacatattccagaacctgttctgggcggtgctacgcttgtgatgtttggcaccatcgccgcctctggcgtgcgtatcgtctcccgggaaccgttaaaccgtcgggcaatactgattattgcgctgtcgctggcggtcggtctgggcgtttcccagcaaccgctgattttacagtttgcccctgactggctgaaaaacctgctctcttccgggattgccgctggcggcatcacagccattgtattgaacctgatttttccaccggaaaaacagtaa

SEQ ID NO: 2631 - protein, 463 aa, Escherichia albertii TW07627
MSVSTLESENAQPVAQTQNSELIYRLEDRPPLPQTLFAACQHLLAMFVAVITPALLICQALGLPAQDTQHIISMSLFASGVASIIQIKAWGPVGSGLLSIQGTSFNFVAPLIMGGTALKTGGADVPTMMAALFGTLMLASCTEMIISRVLHLARRIITPLVSGVVVMIIGLSLIQVGLTSIGGGYAAMSDNTFGAPKNLLLAGVVLVLIILLNRQRNPYLRVASLVIAMAAGYALAWFMGMLPESNEPMAQELIMVPTPLYYGLGIEWSLLLPLMLVFMITSLETIGDITATSDVSEQPVSGPLYMKRLKGGVLANGLNSFVSAVFNTFPNSCFGQNNGVIQLTGVASRYVGFVVALMLIVLGLFPAVSGFVQHIPEPVLGGATLVMFGTIAASGVRIVSREPLNRRAILIIALSLAVGLGVSQQPLILQFAPDWLKNLLSSGIAAGGITAIVLNLIFPPEKQ

SEQ ID NO: 2632 - DNA, 1389 bp, Burkholderia ambifaria IOP40-10
  CDS (1)..(1389): transl_table=11
atgcaacccgcttcccccgcccgatccgcctcccccggcgccgccgacgccgatccgtcgcacgatctcgtctatggccccaatgaccggcccgcgccgatggtcgccttcgtcgccgcgctgcagcacctgctggcgatcatcgtgccgatcgtcacgcccggcctgctgatctgccaggcgctcggcgtatcgagccgggacaccacgcttatcgtgtcgatgtcgctggtgatttccggcatcgccaccttcgtgcagtgcaagcgcttcggcccgctgggcgccggcctgctgatcgtgcagggcaccagcttcaacttcgtcggcccgctgatcgccggcggcagcgtgatggtcaagcagggcacgccggtcgagaccgtgatggccgcgatcttcggcgtcgtgatcgccggttcgttcgtcgagatggccgtgtcgcgcatcctgccgttcgtgaagcgcctgatcacgccgctcgtcaccggcatcgtcgtgctgctgatcggcctcacgctgatcaaggtcggcctcatcagcatgggtggcggctacggcgcgatggccaacggcacgttcgcgagcgcgcagaacctgacgctgtcgtgcgtcgtgctcggcacgatcattctgctgaaccgcgtgccgatcgtgtgggtgcgcagcaccgcgctcgtgatcgccctcgtgatcggctatgccgcggcggccgtgctcggccgcctcgacttcaccggcgtacatcaggccgcgctgttccaggtcccgacgccgctgcacttcggcatcggcttctcgtggtcgctgttcgtgccgatgctgatcatctacctcgtcacgtcgctcgaagcgatcggcgacgtcaccgccaccagcaagatctcgaaggagccggtcgaagggccggtgtggatgcagcggatcaagggcggcgtgctcgtgaacggcgcgaactcgctgctggccggcgtgttcaacacgttcccgagctccgtgttcgcgcagaacaacggcgtgatccagatcaccggcgtcgcgagtcgccacgtcggcatctggatcgccggcatgctcgtggtgctcggactgttcccggtcgtcgccggcgccttgcaagccgtgccggagcccgtgctcggcggtgcggcgatggtgatgttcggcgcggtggccgcgtcgggcatcaacatcctgtccggcatccacctcgatcgccgcgcgctgctgatcatcgccgtgtcgctcgcgctcggcctcggcgtgtcgcaggtgccggacattctgaacagcctgccgcatgcactgaagaacgtgctggaatcgggcgtcgccacgggcggtatctgtgcgctcgtgatgaactggttcttgccggaacagaagtaa

SEQ ID NO: 2633 - protein, 462 aa, Burkholderia ambifaria IOP40-10
MQPASPARSASPGAADADPSHDLVYGPNDRPAPMVAFVAALQHLLAIIVPIVTPGLLICQALGVSSRDTTLIVSMSLVISGIATFVQCKRFGPLGAGLLIVQGTSFNFVGPLIAGGSVMVKQGTPVETVMAAIFGVVIAGSFVEMAVSRILPFVKRLITPLVTGIVVLLIGLTLIKVGLISMGGGYGAMANGTFASAQNLTLSCVVLGTIILLNRVPIVWVRSTALVIALVIGYAAAAVLGRLDFTGVHQAALFQVPTPLHFGIGFSWSLFVPMLIIYLVTSLEAIGDVTATSKISKEPVEGPVWMQRIKGGVLVNGANSLLAGVFNTFPSSVFAQNNGVIQITGVASRHVGIWIAGMLVVLGLFPVVAGALQAVPEPVLGGAAMVMFGAVAASGINILSGIHLDRRALLIIAVSLALGLGVSQVPDILNSLPHALKNVLESGVATGGICALVMNWFLPEQK

SEQ ID NO: 2634 - DNA, 1389 bp, Burkholderia ambifaria MEX-5
  CDS (1)..(1389): transl_table=11
atgcaacccgcttcccccgcccgatccgcctcccacggcgccgccgacacagatccgtcgcacgacctcgtctatggccccaatgaccggcccgcgccgatggtcgccttcgtcgccgcgctgcagcacctgctggcgatcatcgtgccgatcgtcacgcccggcctgctgatctgccaggcgctcggcgtatcgagccgggataccacgcttatcgtgtcgatgtcgctcgtgatttccggcatcgccaccttcgtgcagtgcaagcgcttcggcccgctgggcgccggcctgctgatcgtgcagggcaccagcttcaacttcgtcggcccgctgatcgccggcggcagcgtgatggtcaagcagggcacgccggtcgagaccgtgatggccgcgatcttcggcgtcgtgatcgccggttcgttcgtcgagatggccgtgtcgcgcatcctgccgttcgtgaagcgcctgatcacgccgctcgtcaccggcatcgtcgtgctgctcatcggcctcacgctgatcaaggttggcctcatcagcatgggcggcggctacggcgcgatggccaacggcacgttcgcgagcgcgccgaacctgacgctgtcgtgcgtcgtgctcggcacgatcatcctgctgaaccgcgtgccgatcgtgtgggtgcgcagtaccgcgctcgtgatcgccctcgtgctcggctatgctgccgccgccgtgctcggccgcctcgacttcaccggcgtgcatcaggccgcgctgttccaggtcccgacgccgctgcatttcggcatcggcttctcgtggtcgctgttcgtgccgatgctgatcatctatctcgtcacgtcgctcgaagcgatcggcgacgtcaccgccaccagcaagatctcgaaagagccggtcgaagggcccgtgtggatgcggcggatcaagggcggcgtgctcgtgaacggcgcgaactcgctgctggccggcgtgttcaacacgttccccagctccgtgttcgcgcagaacaacggcgtgatccagattaccggcgtcgccagccgccacgtcggcatctggatcgcgggcatgctcgtggtgcttggcctgttcccggtggtcgcgggcgcgctgcaggccgtgccggagcccgtgctcggcggtgcggcgatagtgatgttcggcgcggtggccgcgtcaggcatcaacatcctgtccggcatccagctcgatcgccgcgcgctgctgatcatcgcggtatcgctcgcgctcggcctcggcgtgtcgcaagtgccggacattctgaacagcctgccgcatgcactgaagaacgtactggaatcgggcgtcgccacgggcggcatctgtgcgctcgtgatgaactggttcttgccggaacagaagtaa

SEQ ID NO: 2635 - protein, 462 aa, Burkholderia ambifaria MEX-5
MQPASPARSASHGAADTDPSHDLVYGPNDRPAPMVAFVAALQHLLAIIVPIVTPGLLICQALGVSSRDTTLIVSMSLVISGIATFVQCKRFGPLGAGLLIVQGTSFNFVGPLIAGGSVMVKQGTPVETVMAAIFGVVIAGSFVEMAVSRILPFVKRLITPLVTGIVVLLIGLTLIKVGLISMGGGYGAMANGTFASAPNLTLSCVVLGTIILLNRVPIVWVRSTALVIALVLGYAAAAVLGRLDFTGVHQAALFQVPTPLHFGIGFSWSLFVPMLIIYLVTSLEAIGDVTATSKISKEPVEGPVWMRRIKGGVLVNGANSLLAGVFNTFPSSVFAQNNGVIQITGVASRHVGIWIAGMLVVLGLFPVVAGALQAVPEPVLGGAAIVMFGAVAASGINILSGIQLDRRALLIIAVSLALGLGVSQVPDILNSLPHALKNVLESGVATGGICALVMNWFLPEQK

SEQ ID NO: 2636 - DNA, 1383 bp, Providencia stuartii ATCC 25827
  CDS (1)..(1383): transl_table=11
atgaccaccgaagcatctcaaagacaggccgttgaagtcgagccaaaaagtgaactcatttaccgtttagaagataggccaccactccctcaggcgttgtttgctgcgggtcagcaccttctcgccatgtttgtggccgtcattacccccgcaatgcttatttgccagtcattagggctacccgcccatgatacacagcgcattatcagtatgtcactgtttgcttcgggtattgcttccttaattcagatccgtgcttgggggcctgttggctccgggctattatctatccaaggcaccagttttaactttgttgcacctttaattatggggggtgttgcactcaaacaaggtggcgctgatatcccctcaatgatggcggcactgtttggcacactgttggtcgcagcactcactgaagttgttttatcgcgttttctgcatttagctcgtcgagtgattaccccattagtatctggcgtggtagtcatgatcattgggctgtcactgatccaagtcggtctgacttctattggtggcgggcacagcgcaataactgataatacctttggctcccccgattatttgctactggcaggtattgtgttggctgtcattattttactcaatcgccaaaaaaacccttacttacgcgtcgcctctttggtgatagctatggcaatcggctatcttgcggcttggtggatggatatgcttcccacaactcaagacaccgatagcacacaatccgtgatcaccatacctgaacctttctattatggattatcctttgattggaacttgctgatcccactcatgctcatttttatggtgacctctttagagacaattggcgatatcaccgcgacctccgatgtctccgagcaacctgtgcgcggccccatttatatgaagcgaattaaaggcggagtgttagcaaatggtttgaactccatggtatctgctgtatttaacaccttccctaactcctgctttggccaaaataatggcgtgatccagcttactggcgtggcaagccgctacgtgggttatatcgttgctttaatgttgatcctattaggggtatttcctgctgtcgccggctttgttcaacaaattcctgagcctgttttaggcggtgccaccattgtgatgtttggtacgattgcagcttctggtgtgcgtattgtttcccgtgaacccctcaaccgccgtgcaattatgattatcgccttatcgcttgcggtcggtatgggggtttcacaacagccacttattttacaatttgcccctgattggctgaaaacactcttttcatccggtattgccgcagggggtttaaccgcaattgttctgaatttaattttccctcacgaaaagtaa

SEQ ID NO: 2637 - protein, 460 aa, Providencia stuartii ATCC 25827
MTTEASQRQAVEVEPKSELIYRLEDRPPLPQALFAAGQHLLAMFVAVITPAMLICQSLGLPAHDTQRIISMSLFASGIASLIQIRAWGPVGSGLLSIQGTSFNFVAPLIMGGVALKQGGADIPSMMAALFGTLLVAALTEVVLSRFLHLARRVITPLVSGVVVMIIGLSLIQVGLTSIGGGHSAITDNTFGSPDYLLLAGIVLAVIILLNRQKNPYLRVASLVIAMAIGYLAAWWMDMLPTTQDTDSTQSVITIPEPFYYGLSFDWNLLIPLMLIFMVTSLETIGDITATSDVSEQPVRGPIYMKRIKGGVLANGLNSMVSAVFNTFPNSCFGQNNGVIQLTGVASRYVGYIVALMLILLGVFPAVAGFVQQIPEPVLGGATIVMFGTIAASGVRIVSREPLNRRAIMIIALSLAVGMGVSQQPLILQFAPDWLKTLFSSGIAAGGLTAIVLNLIFPHEK

SEQ ID NO: 2638 - DNA, 1392 bp, Escherichia coli B7A
  CDS (1)..(1392): transl_table=11
atgtctgtttccaccctcgagtcagaaaatgcgcaaccggttgcgcagactcaaaacagcgaactgatttaccgtcttgaagatcgtccgccgcttcctcaaaccctgtttgccgcctgtcagcatctgctggcgatgttcgttgcggtgatcacgccagcgctattaatctgccaggcgctgggtttaccggcacaagacacgcaacacattattagtatgtcgctgtttgcctccggtgtggcatcgattattcaaattaaggcctggggtccggttggctccgggctgttgtctattcagggcaccagcttcaactttgttgccccgctgattatgggcggtaccgcgctgaaaaccggtggtgctgatgttcctaccatgatggcggctttgttcggcacgttgatgctggcaagttgcaccgagatggtgctctcccgcgttctgcatctggcgcgccgcattattacgccgctggtttctggcgttgtggtgatgattatcggcctgtcgctaattcaggttgggttaacgtccattggcggcggttacgcagccatgagcgataacaccttcggcgcaccgaaaaatctgctgctggcaggcgtggtcttagccttaattatcctgcttaaccgtcaacgtaacccttacttacgcgtggcctcactggtgattgcgatggcggccggatatgcgctggcgtggtttatgggcatgttgccagaaagcaacgaaccgatgacgcaagaactgattatggtgccaacgccgctctattacggtcttggcattgaatggagtctgctgctgccgctgatgctggtctttatgatcacttcgctggaaaccattggcgatatcacggcgacctctgacgtttccgaacagccagtgtccggtccgctgtacatgaaacgcctgaaaggcggcgtgctggcaaacggcctgaactcgtttgtttcggcggtgtttaacaccttcccgaactcctgcttcgggcaaaacaacggagtgatccagttgactggtgttgccagccgctatgtcggttttgtcgtcgcgctgatgttgatcgtgctgggtctgttcccggcagtgagcggttttgtacaacacattccagaaccggttctgggcggcgcaacgcttgtaatgtttggcaccatcgccgcctccggtgtgcgtatcgtttctcgtgagccgctgaaccgtcgggcgattctgattatcgcgctgtcgctggcggttggtctgggcgtgtctcagcagccgctgattttgcagtttgcccctgaatggctgaaaaacctgctctcctccgggatcgccgcgggcggtattactgccatcgtgctgaatctgattttcccaccagaaaaacagtaa

SEQ ID NO: 2639 - protein, 463 aa, Escherichia coli B7A
MSVSTLESENAQPVAQTQNSELIYRLEDRPPLPQTLFAACQHLLAMFVAVITPALLICQALGLPAQDTQHIISMSLFASGVASIIQIKAWGPVGSGLLSIQGTSFNFVAPLIMGGTALKTGGADVPTMMAALFGTLMLASCTEMVLSRVLHLARRIITPLVSGVVVMIIGLSLIQVGLTSIGGGYAAMSDNTFGAPKNLLLAGVVLALIILLNRQRNPYLRVASLVIAMAAGYALAWFMGMLPESNEPMTQELIMVPTPLYYGLGIEWSLLLPLMLVFMITSLETIGDITATSDVSEQPVSGPLYMKRLKGGVLANGLNSFVSAVFNTFPNSCFGQNNGVIQLTGVASRYVGFVVALMLIVLGLFPAVSGFVQHIPEPVLGGATLVMFGTIAASGVRIVSREPLNRRAILIIALSLAVGLGVSQQPLILQFAPEWLKNLLSSGIAAGGITAIVLNLIFPPEKQ

SEQ ID NO: 2640 - DNA, 1401 bp, Escherichia coli E110019
  CDS (1)..(1401): transl_table=11
atgtctgatataaaccatgcaggttctgaccttatatttgaactggaggatcgccctccctttcatcaggctctcattggtgccattacccatctgttggcaattttcgttccgatggtaacccccgcgttaatcgtgggtgcggccttacagctttccgctgaaacaaccgcctatcttgtttcaatggcgatgatcgcctctggtattggtacctggttacaagtaaaccgctacggcatcgtcggttctggcctactctcaattcagtcagtcaatttttcatttgttacggtcatgattgcgctgggcagcagcatgaaaagcgacggttttcacgaagagttaatcatgtcgtcgcttctcggcgtctcattcgttggcgcatttctggttgtcggatcttcatttatcttgccctatttacgtcgggttattacgcctaccgtcagcggtattgtggtactgatgatcggcttaagcctgattaaagtcggcattatcgattttggtggaggatttgcagccaaaagcagtggtacgttcggcaattacgaacatctcggcgttggtttattggttttaattgtggtgatcggctttaactgctgtcgcagtccgttgctacgcatgggagggatcgccattgggctatgtgtcggctatatcgcatcgttatgcctgggcatggtggatttcagcagtatgcgcaatttgccgttaatcaccatcccgcatccgttcaaatacggctttagttttagcttccatcagttcctggtggttggcacgatttatctgcttagcgtgctggaagcagtcggcgatatcaccgccacggcaatggtttcccgccgccccattcagggggaagagtatcagtcccgactgaaaggcggcgtgctggcagatggtctggtttctgttatcgcctccgctgtcggttcattaccattaaccacgtttgcgcaaaataatggggttattcagatgactggcgtcgcttcacgttatgtcgggcgaaccatcgcggtaatgctggttatcctcggcttatttccgatgattggcggcttcttcacgaccattccctcggcagttctgggaggcgcaatgacgttgatgttttccatgattgccatcgctgggattcgcatcatcatcaccaacggattaaagcggcgtgaaacacttattgtcgccacttctttaggtttagggcttggcgtctcctacgatcccgaaatttttaaaatattgccagcctctatttatgtattagttgaaaaccctatttgtgctggcgggttaactgcgattttattaaatattatcctccctggtggctaccgacaggaaaacgttctgcctggtattacctcagcggaagagatggattaa

SEQ ID NO: 2641 - protein, 466 aa, Escherichia coli E110019
MSDINHAGSDLIFELEDRPPFHQALIGAITHLLAIFVPMVTPALIVGAALQLSAETTAYLVSMAMIASGIGTWLQVNRYGIVGSGLLSIQSVNFSFVTVMIALGSSMKSDGFHEELIMSSLLGVSFVGAFLVVGSSFILPYLRRVITPTVSGIVVLMIGLSLIKVGIIDFGGGFAAKSSGTFGNYEHLGVGLLVLIVVIGFNCCRSPLLRMGGIAIGLCVGYIASLCLGMVDFSSMRNLPLITIPHPFKYGFSFSFHQFLVVGTIYLLSVLEAVGDITATAMVSRRPIQGEEYQSRLKGGVLADGLVSVIASAVGSLPLTTFAQNNGVIQMTGVASRYVGRTIAVMLVILGLFPMIGGFFTTIPSAVLGGAMTLMFSMIAIAGIRIIITNGLKRRETLIVATSLGLGLGVSYDPEIFKILPASIYVLVENPICAGGLTAILLNIILPGGYRQENVLPGITSAEEMD

SEQ ID NO: 2642 - DNA, 1332 bp, Bacteroides coprocola DSM 17136
  CDS (1)..(1332): transl_table=11
atggaaaaagaacagacacaagctccgggggcggggctgatttacggactgaatgaccgtccgcctgtgaaagaaacaatttttgctgctttgcaacatctgttggctatctttgttgctattattactcctccgttgattattgccggtgcgttaaaacttgatttggaaacaactggttttctcgtttctatggctttgtttgcatctggtgtttctacatttattcagtgccgtcgggtaggaccggtcggctgtggattactttgtattcagggaaccagtttctcgtttatcggacctatcatttcagccggactgacaggaggtctttctgctatttttggagcgtgtatcgttgcttcttcggtagagatgcttattagccgtgtattgaaatatactcgccgtgttattactccgctggtttcgggtattgttgtgacgcttatcggtatgagtctgataaaagtaggtatttctgcatgtggcggaggtgctgttgcacaggcaaatggaacatttggagcgatagagcatgttggtcttgctgctcttgttctgatattgattatcatatttaaccgaagttcaaaccgctatctgcgtatgagctccattgttattggtctggttatcggctatatcacagcatgggcattgggaatggtagatttctcggctgtacagagttatggtggcttcaatatacctgtacctttccgctatggtatttcgttcgatatttcttctatcattgcattggcattggtttatctgattactgcaatagaggcttatggtgatattactgccaattctctgatttcgggtgaaccggtagaaggggaaacttttgtgaaacgcgcttctggaggtattctggcagatggattcaactctatgttggctggtttcttcaattctttcccaaattcaatttttgcacagaacaacggtatgatacagcttacaggagtggccagccgctatgtaggttattacattgccggcttcctgattgttctcggcttgttcccagctgtaggacttgtattttcgctgatgcccgagcctgtgcttggtggagctactttgttgatgtttggtacagtagctgcagccggtatccgtatcattgctgcacagaagattgaccgtaaagctacactggttatggctctgagtttctcttttggtctgagtgtagaacttgtacccgatatactttgtcagttgccggaaacattgcgtaatatttttgcgtcaggtattacaaccggtggactgactgctattcttgccaacttgctgattcgtatcaaagaataa

SEQ ID NO: 2643 - protein, 443 aa, Bacteroides coprocola DSM 17136
MEKEQTQAPGAGLIYGLNDRPPVKETIFAALQHLLAIFVAIITPPLIIAGALKLDLETTGFLVSMALFASGVSTFIQCRRVGPVGCGLLCIQGTSFSFIGPIISAGLTGGLSAIFGACIVASSVEMLISRVLKYTRRVITPLVSGIVVTLIGMSLIKVGISACGGGAVAQANGTFGAIEHVGLAALVLILIIIFNRSSNRYLRMSSIVIGLVIGYITAWALGMVDFSAVQSYGGFNIPVPFRYGISFDISSIIALALVYLITAIEAYGDITANSLISGEPVEGETFVKRASGGILADGFNSMLAGFFNSFPNSIFAQNNGMIQLTGVASRYVGYYIAGFLIVLGLFPAVGLVFSLMPEPVLGGATLLMFGTVAAAGIRIIAAQKIDRKATLVMALSFSFGLSVELVPDILCQLPETLRNIFASGITTGGLTAILANLLIRIKE

SEQ ID NO: 2644 - DNA, 1392 bp, Shigella dysenteriae 1012
  CDS (1)..(1392): transl_table=11
atgtctgtttccaccctcgagtcagaaaatgcgcaaccggttgcgcagactcaaaacagcgaactgatttaccgtcttgaagatcgtccgccgcttcctcaaaccctgtttgccgcctgtcagcatctgctggcgatgttcgttgcggtgatcacgccagcgctattaatctgccaggcgctgggtttaccggcacaagacacgcaacacattattagtatgtcgctgtttgcctccggtgtggcatcgattattcaaattaaggcctggggtccggttggctccgggctgttgtctattcagggcaccagcttcaactttgttgccccgctgattatgggcggtaccgcgctgaaaaccggtggtgctgatgttcctaccatgatggcggctttgttcggcacgttgatgctggcaagttgcaccgagatggtgatctcccgcgttctgcatctggcgcgccgcattattacgccgctggtttctggcgttgtggtgatgattatcggcctgtcgctaattcaggtggggctgacctcaattggcggcggttacgcagccatgagcgataacaccttcggcgcaccgaaaaatctgctgctggcaggcgtggtcttagccttaattatcctgcttaaccgtcaacgtaacccttacttacgcgtggcctcactggtgattgcgatggcggccggatatgcgctggcgtggtttatgggcatgttgccagaaagcaacgaaccgatgacgcaagaactgattatggtgccaacgccgctctattacggtcttggcattgaatggagtctgctgctgccgctgatgctggtctttatgatcacttcgctggaaaccattggcgatatcacggcgacctctgacgtttccgaacagccagtgtccggtccgctgtacatgaaacgcctgaaaggcggcgtgctggcaaacggcctgaactcgtttgtttcggcggtgtttaacaccttcccgaactcctgcttcgggcaaaacaacggagtgatccagttgactggtgttgccagccgctatgtcggttttgtcgtcgcgctgatgttgatcgtgctgggtctgttcccgacagtgagcggttttgtacaacacattccagaaccggttctgggcggcgcaacgcttgtaatgtttggcaccatcgccgcctccggtgtgcgtatcgtttctcgtgagccgctgaaccgtcgggcgattctgattatcgcgctgtcgctggcggttggtctgggcgtgtctcagcagccgctgattttgcagtttgcccctgaatggctgaaaaacctgctctcctccgggatcgccgcgggcggtattactgccatcgtgctgaatctgattttcccaccagaaaaacagtaa

SEQ ID NO: 2645 - protein, 463 aa, Shigella dysenteriae 1012
MSVSTLESENAQPVAQTQNSELIYRLEDRPPLPQTLFAACQHLLAMFVAVITPALLICQALGLPAQDTQHIISMSLFASGVASIIQIKAWGPVGSGLLSIQGTSFNFVAPLIMGGTALKTGGADVPTMMAALFGTLMLASCTEMVISRVLHLARRIITPLVSGVVVMIIGLSLIQVGLTSIGGGYAAMSDNTFGAPKNLLLAGVVLALIILLNRQRNPYLRVASLVIAMAAGYALAWFMGMLPESNEPMTQELIMVPTPLYYGLGIEWSLLLPLMLVFMITSLETIGDITATSDVSEQPVSGPLYMKRLKGGVLANGLNSFVSAVFNTFPNSCFGQNNGVIQLTGVASRYVGFVVALMLIVLGLFPTVSGFVQHIPEPVLGGATLVMFGTIAASGVRIVSREPLNRRAILIIALSLAVGLGVSQQPLILQFAPEWLKNLLSSGIAAGGITAIVLNLIFPPEKQ

SEQ ID NO: 2646 - DNA, 1413 bp, Synechococcus sp. PCC 7335
  CDS (1)..(1413): transl_table=11
atgagccaacctaacagatttgtcgaaactccagatgagactgtcgctgatttgccacccgcacccgtaattgcagtcccaacagacttaatctacggcttagaagatagaccgccgcttagggaggcaatctttgccgccgttcagcacgttttagccagctttattggtatcatcacaccctctctaatcatcgggggcgctctggacctacccccagaagatagagcctacatcattagtatgtctctatttatctcaggcattgccacctttattcaggcaaagaagatcggacctgttggctctggtttgctgagtattcaaggaacgagctttgcttttatcggaccgattatcggcgctgggctagcggcaacagcagggggggcaacgccgaccgaagctctaggactcatctttggactgtgctttgtcggcgcgtttattgaaatgatcttcagtcagttcttagaggttattagccgaattattacgccgctagtcactggcacagtggtcatgctgatcggtttaacgctgactaacgctggcatattagctatgggcggcggcgcactagctaagaacaatgagacgtttggcagcgctcagaatatctttctctctttgtttgtgctcgctattatccttattcttaacagtagtagcaacacttttttgcggatggcttctatcgccattggtttgattgttggctacattcttggcatcttcttaggcattgttgatcttagtagcctaggatctctatctttgtttgcgctacctcagccttttcgctatggctttggatttgactttgccgcctttattccattcgcttttctctatttgatcactacgattgaatcgattggtgatttgacagctacctctgtagtaacgggacagcccatcaagggaaaggtttacttcaatcgaattcgtggcggtgtgctaggcgatgggattaactctgcgatcgcaggtgcattcaactgctttcctaacaccacctttagtcaaaacaacggcgtcattcagctcacgggcatcggcagccgctacgttggctacttcatcgcagctatttttgctttgttaggtttgttcccaattgtcggcggcgtgttacaggcgattccgcagcctgtgctaggcggtgccacaattttgatgtttggcagcgtagccgcagccggaatgaaaatcatctctacgattgagctaggcagacgagagactttaattctggcgacttctcttggtctagggctaggcgtaacctttgatccagactttctagtgggtctgccgcccttggcgcaaaatatctttgcttctggcatctcaaccggtggaatttgcgccctggtgctcaatattcttctacctggtgagcgtcgataa

SEQ ID NO: 2647 - protein, 470 aa, Synechococcus sp. PCC 7335
MSQPNRFVETPDETVADLPPAPVIAVPTDLIYGLEDRPPLREAIFAAVQHVLASFIGIITPSLIIGGALDLPPEDRAYIISMSLFISGIATFIQAKKIGPVGSGLLSIQGTSFAFIGPIIGAGLAATAGGATPTEALGLIFGLCFVGAFIEMIFSQFLEVISRIITPLVTGTVVMLIGLTLTNAGILAMGGGALAKNNETFGSAQNIFLSLFVLAIILILNSSSNTFLRMASIAIGLIVGYILGIFLGIVDLSSLGSLSLFALPQPFRYGFGFDFAAFIPFAFLYLITTIESIGDLTATSVVTGQPIKGKVYFNRIRGGVLGDGINSAIAGAFNCFPNTTFSQNNGVIQLTGIGSRYVGYFIAAIFALLGLFPIVGGVLQAIPQPVLGGATILMFGSVAAAGMKIISTIELGRRETLILATSLGLGLGVTFDPDFLVGLPPLAQNIFASGISTGGICALVLNILLPGERR

SEQ ID NO: 2648 - DNA, 1392 bp, Salmonella enterica subsp. enterica serovar Javiana str. GA_MM04042433
  CDS (1)..(1392): transl_table=11
atgtccgttaacgccatcgagccggcagatgcgcaaccggttgtgcagacgcaaaacagcgaattaatttaccgtcttgaagatcgcccgccgctccctcaaacactttttgccgcttgtcagcatctgctggccatgtttgtcgcggtaatcacgccagcgctgttaatctgccaggcgttgggtttaccggcgcaggatacgcagcacattatcagcatgtcgctgttcgcctccggcgtagcctctattattcaaatcaaagcgtgggggccggtaggatcggggctgttatccatccagggaaccagttttaactttgtcgccccgctgattatgggcggtaccgcgctgaaaaccggcggcgcggacgtcccgacgatgatggcggcgctgttcggcacgctgatgctggcaagctgcaccgagatggtgctttctcgcattctacatctggcgcgccggattatcacgccgttagtctccggcgtcgtggtgatgattattggcctgtcgctgattcaggtggggctaacctccatcggcggcggctatgccgccatgagcgacaacacctttggcgcaccgaaaaacctgctgctggccggcgtcgtcctggccattattatcctgctgaatcggcagcgtaatccctacctacgcgtggcttctttggttattgccatggcggcaggctatcttttggcctggtttatgggcatgttgcctgagaataacgcgccagtctcgcaggacatcctgatggtgccgaccccgctgtattatggtctgggcattgactggaacctgttactgccgttgatgctggtctttatgattacgtcgctggagaccatcggcgacatcaccgccacctctgatgtctccgagcagccggtatccggccccttgtatatgaaacggctaaagggcggcgtactggctaacggcctgaactcatttgtttcagcggtatttaatacgttcccgaattcctgtttcggtcagaacaacggcgtaattcagttgaccggcgtcgccagccgctatgtgggatttgtcgtcgcgctgatgctgattgtgctcggcctgttcccggcggtaagcggttttgtgcagcatatcccggaaccggtgctcggcggcgccacgttagtgatgttcggcaccattgccgcctccggggtgcgtattgtctcacgtgagccgctgaaccgccgcgcgattctgattatcgccctgtcgctggccgtgggtcttggcgtctcgcaacagccgcagatcctgcagttcgcgccggaatgggtgaaaaatctgctctcatccggaattgccgctggcggcatcacggctatcgtgctgaacctgattctcccgccggaaaaaccgtaa

SEQ ID NO: 2649 - protein, 463 aa, Salmonella enterica subsp. enterica serovar Javiana str. GA_MM04042433
MSVNAIEPADAQPVVQTQNSELIYRLEDRPPLPQTLFAACQHLLAMFVAVITPALLICQALGLPAQDTQHIISMSLFASGVASIIQIKAWGPVGSGLLSIQGTSFNFVAPLIMGGTALKTGGADVPTMMAALFGTLMLASCTEMVLSRILHLARRIITPLVSGVVVMIIGLSLIQVGLTSIGGGYAAMSDNTFGAPKNLLLAGVVLAIIILLNRQRNPYLRVASLVIAMAAGYLLAWFMGMLPENNAPVSQDILMVPTPLYYGLGIDWNLLLPLMLVFMITSLETIGDITATSDVSEQPVSGPLYMKRLKGGVLANGLNSFVSAVFNTFPNSCFGQNNGVIQLTGVASRYVGFVVALMLIVLGLFPAVSGFVQHIPEPVLGGATLVMFGTIAASGVRIVSREPLNRRAILIIALSLAVGLGVSQQPQILQFAPEWVKNLLSSGIAAGGITAIVLNLILPPEKP

SEQ ID NO: 2650 - DNA, 1734 bp, Penicillium chrysogenum Wisconsin 54-1255
  CDS (1)..(1734)
atggacggtccagatcagatcggtcccgatcatacgcccaagcgaacaattagcgacaaagtccgatacgccgttagaactttcactacacgggagggcctactaggagactacgactatggatatctctttatcccacgactgcccttcgccaagcgagctcgcaaatccgccccgtttttcggcctcgatgatcgcgtgccagtcgtgctcgcattgattctggggttacaacatgcacttgcaatgctggctggtgtgatttcaccacccatcttgctcggcggttcaggcggtgccaactttggcgatgacctctaccagtacttggtttcgacttcgttgattgtgtcgggcctgttgagtgttgttcaaatgttccggttccatatcaagggaacaaaatactatattggaactggactactatcagtcgttggtacatcgttctcaacgatcacagtcgctcaaggcgcattctcccaaatgtataaatcgggctactgcccaaccctcgaagatggaactaagctcccttgtccaaaaggctacggcgccctccttggcacctcatgtctctgctccctcctcgaaatcggcatgtccttcatgagcagcaagatcctcgcccgcgtcttccccccactcgtcaccggcccgacggttctcctgatcggcgcctcgctcatcaagtccgccatgcaggactgggccggtggcgcgtcgtgcggcgctgacccttctgcccgcgcaatgtgccccagcgccaacgccccgcaccctctaccctggggaagccctgagttcattggactgggattcctggtattcgtgacgatcattgtttgcgagcgctggggtcctcccattctgaagagttgctccgttattgttggcctcttggttggctccatcgtcgctgccgcgtgcaactacttcgattcttccggtatcgccgctgccccggtggcttccttcgcttgggtccacaccttcccgctatcggtgtacccaccactcatcctgcccttgctcgcactgtatatcgttatcatgatggagtctattggggacatcacggcgacatgtgacgtctcccggctccaagtggagggtgataccttcgattcccgcatccaaggcggcgtcttgggtaacgggatcacatgtcttttggccggcttgatgactattagccctatgtctgtcttcgcgcagaacaacggtgtgattgcgctgacgaaatgcgctaaccgcaccgccggctactgctgctgcttcttcctggttatcatgggcattttctccaagttcgccgctgcgctggttgcaatccctagctccgtccttggtggtatgaccgctttcctcttcagctcggtggcagttagtggtctgcgcattattgggtctgttcctcccacccgtcgcaaccggttcatcctcacggcaagtttctcgattggaatgggtgttacactgctgccggaatggttcagctacttcttcacctacaagggtgacaaccatgcccttgagggtctgatcaatgctgtcgatctggtcatggagaacggattcgctatctcagcgattctcggcatcttccttaacctctttattcccgacgagcctgatgatgtccctgccatctttgagtcgaccaactctaatgatgcccctgtacagaccgatattcctgagcagtcgtcgacaactactaagattgcttga

SEQ ID NO: 2651 - protein, 577 aa, Penicillium chrysogenum Wisconsin 54-1255
MDGPDQIGPDHTPKRTISDKVRYAVRTFTTREGLLGDYDYGYLFIPRLPFAKRARKSAPFFGLDDRVPVVLALILGLQHALAMLAGVISPPILLGGSGGANFGDDLYQYLVSTSLIVSGLLSVVQMFRFHIKGTKYYIGTGLLSVVGTSFSTITVAQGAFSQMYKSGYCPTLEDGTKLPCPKGYGALLGTSCLCSLLEIGMSFMSSKILARVFPPLVTGPTVLLIGASLIKSAMQDWAGGASCGADPSARAMCPSANAPHPLPWGSPEFIGLGFLVFVTIIVCERWGPPILKSCSVIVGLLVGSIVAAACNYFDSSGIAAAPVASFAWVHTFPLSVYPPLILPLLALYIVIMMESIGDITATCDVSRLQVEGDTFDSRIQGGVLGNGITCLLAGLMTISPMSVFAQNNGVIALTKCANRTAGYCCCFFLVIMGIFSKFAAALVAIPSSVLGGMTAFLFSSVAVSGLRIIGSVPPTRRNRFILTASFSIGMGVTLLPEWFSYFFTYKGDNHALEGLINAVDLVMENGFAISAILGIFLNLFIPDEPDDVPAIFESTNSNDAPVQTDIPEQSSTTTKIA

SEQ ID NO: 2652 - DNA, 1386 bp, Photorhabdus asymbiotica subsp. asymbiotica ATCC 43949
  CDS (1)..(1386): transl_table=11
atgttcacctcatcccctgaacaagccgcaacaatccccgtgaaaaaaccagatagtgaattgatttatcgcttagaagatcggccaccgctgctacaaacattgtttgctgcctgccagcatttactggcaatgtttgtcgctgttatcacaccagcaattttaatctgtcaggcactggggctacctgctcacgatacacagcggatcatcagtatgtctctgtttgcttcagggatagcttcattaatccagatccgagcctggggacctgtcggttctggtttactttctatccaaggaaccagttttaactttgtgtccccattgattatgggcggtctggcattaaaaaacggtggagcagacatcccgaccatgatggcagcactattcggtactctaatgttggcatccgttaccgaaattctgttatcccgcgtattacatctggcccggagaattatcacgccgctggtttccggtgttgttgtgatgattattggtttgtctcttattcaggtcggattaacttcgatcggtggcggattctctgctatcgaaaatcacacctttggttctccagagaatctgtttctggccggtgttgtgttggcggtgattgttttgctgaaccgccagcgtaatccttatctacgtgtcgcttctctggtgattgcaatgtcggtcggttatgttgtcgcctggcttatgggcatgctgccacaagcaacagtaccggagaatagttcattaataacgattcctacaccgctctattatggtctttcttttgactggcatctgcttctccctttgatgctaatttttatggtcacttcactggaaaccatcggcgatattaccgcgacctctgacgtttcggaacaaccggtcagcggccctctatatatgaagcgtattaaaggcggtgttttagctaacggtctaaattcaatgctttctgccgtattcaataccttcccgaactcctgctttggacagaataacggagttatccagttaaccggcgttgccagccgtcatgtgggttatgccgtagcgttgatgctgattctgttaggtctgtttcctgcggtggcaggctttgtacaacagatccctgaaccggtattgggaggtgccactatcgtgatgtttggtacgattgccgcgtctggtgtccgtatcgtttccagagaggctcttaaccgccgggcaattatgattattgcactatctttagcggttgggatgggtgttgctcaacagccacttattttacaattcgcgcctgattggctgaaaacgctactctcttccggtattgccgctggtggtctgacagccatcgttcttaatctgatatttcctcaggaaaaataa

SEQ ID NO: 2653 - protein, 461 aa, Photorhabdus asymbiotica subsp. asymbiotica ATCC 43949
MFTSSPEQAATIPVKKPDSELIYRLEDRPPLLQTLFAACQHLLAMFVAVITPAILICQALGLPAHDTQRIISMSLFASGIASLIQIRAWGPVGSGLLSIQGTSFNFVSPLIMGGLALKNGGADIPTMMAALFGTLMLASVTEILLSRVLHLARRIITPLVSGVVVMIIGLSLIQVGLTSIGGGFSAIENHTFGSPENLFLAGVVLAVIVLLNRQRNPYLRVASLVIAMSVGYVVAWLMGMLPQATVPENSSLITIPTPLYYGLSFDWHLLLPLMLIFMVTSLETIGDITATSDVSEQPVSGPLYMKRIKGGVLANGLNSMLSAVFNTFPNSCFGQNNGVIQLTGVASRHVGYAVALMLILLGLFPAVAGFVQQIPEPVLGGATIVMFGTIAASGVRIVSREALNRRAIMIIALSLAVGMGVAQQPLILQFAPDWLKTLLSSGIAAGGLTAIVLNLIFPQEK

SEQ ID NO: 2654 - DNA, 1389 bp, Vibrio alginolyticus 12G01
  CDS (1)..(1389): transl_table=11
atgacaacttcaaaccgatcttcggaactggtctatcaactcaacgatcgaccacctttgcctcaaaccatttttgccgcacttcagcacttattggcgatgttcgtcgcggttatcactccgtcactgatcatctgtcagtctttgggtgtaccagcagaccaaacgaataccatcatcagcatgtctttgtttgcgtcaggcgtgtcttcgtttattcaaattcgcaccgttggcccaattggctctggtttgctctctgttcaaggcaccagctttaactttttaggtcctattattggtgcaggcctatcgctgaaagctggtggagcagacatcagtaccatgatggctgccatttttggtacgattttagtcgcatcatttgcagaaatttttctatctcgcgtgttggagcatgcccgccgaatcatcactccgcttgtttcaggcatcgtcgtcactcttatcggtctcacactgattcaagtcggcttagtatcaatgggcggtggctacgcagcattaaatgaaggaaccttcggcagcttagacaaacttgctctggctgggacggtacttggattaattgtgattttaaaccgctcgaaaaacccatacatccgtgtggcttcaatcgtgattgcgatgctagtgggctacatcatggcgtattttatggggatggtagatacttctcagctaggcgcaaccgagatcgtagcactgcccgtaccaatgcaatatggcttatcgtttgactggtctctgttcattccgctggtactgattttctttattaccgcactagaagccatcggtgatattaccgcaacatctgaagtgtctggtgagccagtaaaaggcccagtgtacatgaaacgcattaagggcggtgtgttagcagacggcttaaactctgcaatcgcagccgttttcaacagcttcccgaactcaacgtttagccagaataacggcatcatcatgctaacaggagtcgcgagccgctacgtgggttactttatttcaggcatgttagtgattcttggcttgtttcctggcgtcgctagctttgttcagttgattcctgagccagtacttggcggcgcaacgattgtcatgtttggtacgattgctgccgctggtgtgcgtattatctctcgtgttgagctcgatcgccgcgcaattctgatcatggccttatccttctcaatgggacttggtatcgcacaaaaaccagagatcctgcaatttatgccagaatttattaagagtattttctcaactggtgttgcagcaggtggcatcacagcgatcattttaaatctacttctgccagagaaactggaagacgaagatgaacttcctcaggaagtgaaagagtcttaa

SEQ ID NO: 2655 - protein, 462 aa, Vibrio alginolyticus 12G01
MTTSNRSSELVYQLNDRPPLPQTIFAALQHLLAMFVAVITPSLIICQSLGVPADQTNTIISMSLFASGVSSFIQIRTVGPIGSGLLSVQGTSFNFLGPIIGAGLSLKAGGADISTMMAAIFGTILVASFAEIFLSRVLEHARRIITPLVSGIVVTLIGLTLIQVGLVSMGGGYAALNEGTFGSLDKLALAGTVLGLIVILNRSKNPYIRVASIVIAMLVGYIMAYFMGMVDTSQLGATEIVALPVPMQYGLSFDWSLFIPLVLIFFITALEAIGDITATSEVSGEPVKGPVYMKRIKGGVLADGLNSAIAAVFNSFPNSTFSQNNGIIMLTGVASRYVGYFISGMLVILGLFPGVASFVQLIPEPVLGGATIVMFGTIAAAGVRIISRVELDRRAILIMALSFSMGLGIAQKPEILQFMPEFIKSIFSTGVAAGGITAIILNLLLPEKLEDEDELPQEVKES

SEQ ID NO: 2656 - DNA, 1395 bp, Manganese-oxidizing bacterium (strain SI85-9A1)
  CDS (1)..(1395)
atgacgcagaaaacggcagcccctctttcaggcatgatctaccggctggaggaccgcccgccgccaggcccggccattctcgccgccatccagcatatcctcgcctccatcgtcggcatcgtcacgccggcgctgatcatcggcggcgtgctggggctgggcgagcacattccctatctcgtcgccatgtcgctgttcgtgtcgggcgtcgccaccttcatccagtgccgccgcttcggaccggtcggctcgggactgctgtcggtgcagggcaccagcttcgccttcgtcggcgcgatcctggcggccggcttcgcggtgaaggggcggggcggcacgccggaagacattctggcgatgatcttcggcctgtgcctcgtcggctgcctcgtggagatcggcctcagccggttcgtcggccggctgcggcgcatcatcaccccgacggtgaccggcatcgtcatcaccatcatcggcctcagcctggtcaaggtcggcttcaccgactttgccggcggtgcgacggccggcgacgcgctgggcgagccggtcaatctgctgctcggcttcatcgtcgtcgcggcgatcctcgccctgaccttccagcgcaatcagacggtgcggatctcggcgatcatggccgggctcgtcatcggcttcgtggtcgcagcgctgctgggcaaggtggatttctccagcgccggcagcgggccgctgatcgccctgccgatcccgtttcgctacggcatcgacttcgatctggcgctgttcctgccgatcgccttcatctatctgatcaccgccatcgagacgacgggcgatctgaccgccaattcgatcatcgccggcgagccggtgcgcggcgatctctacatggcgcggatcaagggcggcattctggccgacggcgtcaattccggccttgcggcggtgttcaacacctttcccaacacgaccttctcccagaacaacggcgtcatccagatgaccggcgtcgccagccgacatgtcggcatgatcatcgccgtgatcctgattgtcctggggttctttccggtgatcggcaacgctttcctgctggtgccgaaaccggtgctgggcggcgcgacgctggtcctgttcggcaccatcgcagtggccggcatccgcatcctcgcctccgagccgatcgaccggcgcaaggcctacatcatggccgtgtccttcggcctcggcctcggcgtgacgctggtgccggacgccacgcagcacctgccggacttcatccgccaggtcttcgcgacgccgatcacgctgagcggtctgtcggcgatcatcctgtcgctggtgatcccggaaggagacgatgcggtggccgagccggcaacggccgagcgcccggtgcaaccggcctga

SEQ ID NO: 2657 - protein, 464 aa, Manganese-oxidizing bacterium (strain SI85-9A1)
MTQKTAAPLSGMIYRLEDRPPPGPAILAAIQHILASIVGIVTPALIIGGVLGLGEHIPYLVAMSLFVSGVATFIQCRRFGPVGSGLLSVQGTSFAFVGAILAAGFAVKGRGGTPEDILAMIFGLCLVGCLVEIGLSRFVGRLRRIITPTVTGIVITIIGLSLVKVGFTDFAGGATAGDALGEPVNLLLGFIVVAAILALTFQRNQTVRISAIMAGLVIGFVVAALLGKVDFSSAGSGPLIALPIPFRYGIDFDLALFLPIAFIYLITAIETTGDLTANSIIAGEPVRGDLYMARIKGGILADGVNSGLAAVFNTFPNTTFSQNNGVIQMTGVASRHVGMIIAVILIVLGFFPVIGNAFLLVPKPVLGGATLVLFGTIAVAGIRILASEPIDRRKAYIMAVSFGLGLGVTLVPDATQHLPDFIRQVFATPITLSGLSAIILSLVIPEGDDAVAEPATAERPVQPA

SEQ ID NO: 2658 - DNA, 1380 bp, Photobacterium profundum 3TCK
  CDS (1)..(1380): transl_table=11
atgacccgccagcatagtgacattgaaataccaagaaattcagatctcatttaccgtttagaagatcgaccaccgctaccacaaacactgtttgcggccactcaacacttactggctatgtttgtcgcagtgatcacaccgtcgttgattatctgtcaggctctgggtttacctgcaagcgataccaacaccattgttagtatgtctttattcgcctctggtattgcttcatttatccaaatacgtacatttggccctattggctcaggtttactgtccattcaaggtaccagtttcaatttcttaggccctatcattggtgccggtttagcattaaaagccggtggcgctgatgttccaacgatgatggctgctatcttcggtaccattctggtggcttcattgactgaagtattcatctcacgcgtactgcaacatgcacagcgtattatcacaccactggtatcaggtatcgttgtcaccctaataggcctaactcttatccagataggtctaacatcggtgggtggtggttatgccgcgattaacgacggtagctttggtagccttgaaaacttgatgcttgcgggcacagtattaggcctaatagtgttactaaaccgcgtcaaaaacccttacttacgcgtctcttcgattgtaatcgcaatggcagcaggtacggtattagcttggttcacaggtatgctaaatgcccctcaagaaacgcaaagtgctttcattgcgattccaatgccgatgcaatatgggctgagctttgattggggactgcttattccgctagtgatcgtttttgcgattacatcacttgaagcaattggcgatattaccgcgacatcagaaacctcggaacaacctgttgctggcccgatttatctgaaacgtattaaaggtggcgtattagccgatgggattaattctgccatcgcatcagtattgaatagcttccctaattcaacctttagccaaaataacggcatcattcagttaacgggtgtggcgagtcgttatatcggatatttcgttgcaggtatgttggtgttgctcggtttattccctggggttgcaaaccttgttcagttaattccagagccagtattgggcggtgcaacgattgtgatgttcggtacaatcgctgcttcgggtattcgtattatctcgcgttgtgagctagaccgccgtgccattcttattatggcgttatctttctctatggggctgggtattgctcagaaacctgaaattttgcaatttatgcctgattgggtgaaaggtattttatcgtcaggcatggctgctggtggtatcactgcaattatcctaaaccttgtacttcccgaagagaagaaaaacgcagactaa

SEQ ID NO: 2659 - protein, 459 aa, Photobacterium profundum 3TCK
MTRQHSDIEIPRNSDLIYRLEDRPPLPQTLFAATQHLLAMFVAVITPSLIICQALGLPASDTNTIVSMSLFASGIASFIQIRTFGPIGSGLLSIQGTSFNFLGPIIGAGLALKAGGADVPTMMAAIFGTILVASLTEVFISRVLQHAQRIITPLVSGIVVTLIGLTLIQIGLTSVGGGYAAINDGSFGSLENLMLAGTVLGLIVLLNRVKNPYLRVSSIVIAMAAGTVLAWFTGMLNAPQETQSAFIAIPMPMQYGLSFDWGLLIPLVIVFAITSLEAIGDITATSETSEQPVAGPIYLKRIKGGVLADGINSAIASVLNSFPNSTFSQNNGIIQLTGVASRYIGYFVAGMLVLLGLFPGVANLVQLIPEPVLGGATIVMFGTIAASGIRIISRCELDRRAILIMALSFSMGLGIAQKPEILQFMPDWVKGILSSGMAAGGITAIILNLVLPEEKKNAD

SEQ ID NO: 2660 - DNA, 1404 bp, Photobacterium sp. SKA34
  CDS (1)..(1404): transl_table=11
atgtcgagccaaccaaaacgtaatagcgatctagtttatgggttaaatgatcgcccgccttttgcccaaagtcttttcgcagcaacccaacacttattagctatgtttgttgcagtgatcaccccttcactgattatttgccagtcattagggctccccaccagcgatactaacaccatagtaagcatgtcactcttagcctcagggattgcatcctttattcaaattcgtacctttggccccgttggctctggattattatcgatccaaggcacgagctttaatttccttggtcctatcattggtgcgggtctggcacttaaagctggcggcgcagatattccaaccatgatggctgctatctttggcacaactcttttagcgtcttttaccgaagtatttatttcacgtatcttgcagtacgcacagcgcatcattaccccactggtatctggcatagtggtcacactgatcggtttaacccttattcaaatcggtttaacgtcaattggtggtggttatactgcaatagaaaatggtactttcggtagtcttgataacctattactagctggtaccgttcttggttttatcgtgttattaaatcgcgtaaaaaacccgtacctacgcgtatcttctattgttatttcgatgacggctggcaccttattagcctggtggttaggcatgattaataccaatattgctatctcaaatagcttaattgcgatcccaaccccatttcagtacgggctaagtattgattggggtttgctgatccctttagtgattgtctttgctgtgacctcacttgaagctattggtgatatcactgccacttccgaaacatctgaacaaccagtaaaaggtcccatctacctaaagcgtatcaaaggtggcgtattggctgatgggcttaactcagcaatggctgctgtgcttaacagcttccctaactctacctttagccaaaacaacggcatcatccaactaactggtgttgcaagccgttatattggttatttcgttgctggaatgttggtgttactcggcttatttcctagtgtggcaagccttgtacaattgatcccagagcccatattaggtggagctactatcgtgatgttcggtacgattgccgcatcaggtattcggataatttctcgctgcgagcttgatcgacgcgcaattttaattatggcactgtctttttcgatgggcttaggtatttcacaaaagcctgagattttgcaattcttacctgacattgtgaaaagtattctctcatcaggaatggctgccggtggtattactgctatcttgcttaacataatcttacctgaagaaaaaacagttaataacgcggtagtaaatgaccctagtgacgcagtgactgcaaaataa

SEQ ID NO: 2661 - protein, 467 aa, Photobacterium sp. SKA34
MSSQPKRNSDLVYGLNDRPPFAQSLFAATQHLLAMFVAVITPSLIICQSLGLPTSDTNTIVSMSLLASGIASFIQIRTFGPVGSGLLSIQGTSFNFLGPIIGAGLALKAGGADIPTMMAAIFGTTLLASFTEVFISRILQYAQRIITPLVSGIVVTLIGLTLIQIGLTSIGGGYTAIENGTFGSLDNLLLAGTVLGFIVLLNRVKNPYLRVSSIVISMTAGTLLAWWLGMINTNIAISNSLIAIPTPFQYGLSIDWGLLIPLVIVFAVTSLEAIGDITATSETSEQPVKGPIYLKRIKGGVLADGLNSAMAAVLNSFPNSTFSQNNGIIQLTGVASRYIGYFVAGMLVLLGLFPSVASLVQLIPEPILGGATIVMFGTIAASGIRIISRCELDRRAILIMALSFSMGLGISQKPEILQFLPDIVKSILSSGMAAGGITAILLNIILPEEKTVNNAVVNDPSDAVTAK

SEQ ID NO: 2662 - DNA, 1389 bp, Erwinia carotovora subsp. atroseptica
  CDS (1)..(1389): transl_table=11
atgactaccaccacggaaacgtcccaaaccgaagccgctgccgcacctcagcgcagtgaactcatctatcgtcttgaagacaggccgccgctgccgcagacgctgtttgccgccagccagcatctgcttgccatgtttgttgcggtgattacccccgcgctactgatctgtcaggcattaggtttacccgctcaggatacgcagcgcatcatcagcatgtcgcttttcgcttccggtctggcctctattctacaaattaaaacttggggcccagtcggttctggtctgctgtctattcagggcaccagctttaacttcgtgacgccgctgattatgggtgggctggcgctgaagaacggtggagcagatgttcccacgatgatggcagcactgttcggtacgctgatggttgcttccttcaccgaaatcattctttcacgcttcctgcatttaactcgccgtatcattaccccgctggtttccggcattgtggtgatgatcattggtctgtcgttgattcaggtcggcctgacctctatcggcggcggctatgccgcaatgggtaataacaccttcggcgcacccaagaatctgctattagcgggtgcggtgttagtggtgatcattctgcttaaccgccagcgtaacccctaccttcgcgtcgcgtcgctggtaattgccatggcggtgggttatctgggtgcctggttgatgggaatgctgccggaaagcgcgcctgcgccacacgatacggtcatcatggtgcccacgccgctgtattacggtttaggctttgattggaacctgttaatcccgctgatgctgattttcatggtgacatcgttagaaaccatcggtgacatcaccgctacctctgacgtttcagagcagccggtcagaggcccgctgtacatgaaacgcttaaaaggcggcgtgctggctaatggcctgaactcgtgcctgtctgccgtgttcaataccttccccaactcatgcttcggccagaataacggcgttatccagcttaccggtgttgccagccgctatgtcggttttgtagtttcgctgatgctgatcgctctggggctattccctgccgttagcggatttgtacagcatattccagagcctgttctgggcggtgcgactatcgtgatgtttggtacgatcgcggcatccggtgtacgcattgtgtcccgtgagccgctgaaccgtcgcgctatcatgattattgcgctgtcactggctgtcggtcttggtgtatcacagcagccattgattctgcaattcgcaccggattggattaaaacattgctgtcttccggtattgccgctggcgggattacggcaatcgtgctgaatatcgtcttcccacacgaagaaaaatag

SEQ ID NO: 2663 - protein, 462 aa, Erwinia carotovora subsp. atroseptica
MTTTTETSQTEAAAAPQRSELIYRLEDRPPLPQTLFAASQHLLAMFVAVITPALLICQALGLPAQDTQRIISMSLFASGLASILQIKTWGPVGSGLLSIQGTSFNFVTPLIMGGLALKNGGADVPTMMAALFGTLMVASFTEIILSRFLHLTRRIITPLVSGIVVMIIGLSLIQVGLTSIGGGYAAMGNNTFGAPKNLLLAGAVLVVIILLNRQRNPYLRVASLVIAMAVGYLGAWLMGMLPESAPAPHDTVIMVPTPLYYGLGFDWNLLIPLMLIFMVTSLETIGDITATSDVSEQPVRGPLYMKRLKGGVLANGLNSCLSAVFNTFPNSCFGQNNGVIQLTGVASRYVGFVVSLMLIALGLFPAVSGFVQHIPEPVLGGATIVMFGTIAASGVRIVSREPLNRRAIMIIALSLAVGLGVSQQPLILQFAPDWIKTLLSSGIAAGGITAIVLNIVFPHEEK

SEQ ID NO: 2664 - DNA, 1725 bp, Emericella nidulans
  CDS (1)..(1725)
atggacaactccatccattcaaccgacggccccgactccgtcatccccaactccaaccccaagaagaccgtccgacagagagtccgcttgctggctaggcatctgacgacccgcgagggcctgatcggcgactatgactatggcttccttttccggcccgagctacccttcatgaagaaagatccacgggcgccgcctttttttggcctcaacgagaagattcccgtgctgttggcgtttatcctgggtcttcagcatgcgcttgccatgttggcgggtgtggtcactcctcctctgatcatatcaagctcgctgagcctgccgtccgatctccagcagtatctcgtttcgacctcgcttatcgtctgcgggctgctgtcgatggtccagataacgcgatttcatatctacaagacaccgtactatatcggcagtggcgtcctctcagttatgggggtctcgttctccatcatctccgtcgccagcggcgccttcaaccagatgtactcgaacgggttctgtcaactcgacgaggctggaaacagactcccttgccccgaagcgtacggcgccttgattggcacctcggcctgctgtgctttggtggagatcctcctcgctttcgtgcctcccaaagtgatacagaaaatcttcccgcccatcgtcactggtcccactgtaatgcttatcgggataagtctgattggaactgggttcaaagactgggctggcggctcggcgtgtatggatgacgggatgctgtgcccgtccgcaactgcaccgcgccctctcccgtgggggagtccagagttcatcggcctgggttttctagtctttgtatcgatcatcctctgcgaacgatttggagccccgattatgaagtcctgttctgttgtcatcgggctgctcgtcggttgtatagtcgctgcagcctgcggctacttcagccacgccgatattgacgctgcccctgccgcctcattcatctgggtcaagactttccctctctctgtctatggtccgatggttctcccgatcatcgcggttttcatcatctgcgcctgcgagtgcatcggtgatgtaaccgccacctgcgacgtctcgcgtctcgaagtccgcggcggcacattcgagtcgcgcatccagggcgccgtcctagcagacgggatcaactcggtagtcgctgcccttgcgacaatgacccccatgacgacctttgcgcagaacaacggcgtgattgccctcactcgctgcgcaaaccgctgggccggatactgctgctgtctgatattgatagtagccggtatctttgctaaattcgctgcagccattgttgccatacccaacagtgtcatgggcgggatgaagacgtttctcttcgcttcggtcgttattagcggacaggcgatcgtggccaaggcgccgttcacaaggcgaaatcggtttatcctcaccgcgtcaatggccctgggatacggggcgacgctggtgcccacttggtttgggaatgtattccctcagaccgagaatagagacctggaggggtttgaaaatgcgatcgagctcgtgcttgagacggggtttgcggtcacggcatttgttgctatgctcttgaacgcaatcatgcctgctgaagtcgaagagatcggtgccgtcacccctatgccggtctctgctcatgataatcgggatggcgaggcggagtatcagagcaagcaggcttag

SEQ ID NO: 2665 - protein, 574 aa, Emericella nidulans
MDNSIHSTDGPDSVIPNSNPKKTVRQRVRLLARHLTTREGLIGDYDYGFLFRPELPFMKKDPRAPPFFGLNEKIPVLLAFILGLQHALAMLAGVVTPPLIISSSLSLPSDLQQYLVSTSLIVCGLLSMVQITRFHIYKTPYYIGSGVLSVMGVSFSIISVASGAFNQMYSNGFCQLDEAGNRLPCPEAYGALIGTSACCALVEILLAFVPPKVIQKIFPPIVTGPTVMLIGISLIGTGFKDWAGGSACMDDGMLCPSATAPRPLPWGSPEFIGLGFLVFVSIILCERFGAPIMKSCSVVIGLLVGCIVAAACGYFSHADIDAAPAASFIWVKTFPLSVYGPMVLPIIAVFIICACECIGDVTATCDVSRLEVRGGTFESRIQGAVLADGINSVVAALATMTPMTTFAQNNGVIALTRCANRWAGYCCCLILIVAGIFAKFAAAIVAIPNSVMGGMKTFLFASVVISGQAIVAKAPFTRRNRFILTASMALGYGATLVPTWFGNVFPQTENRDLEGFENAIELVLETGFAVTAFVAMLLNAIMPAEVEEIGAVTPMPVSAHDNRDGEAEYQSKQA

SEQ ID NO: 2666 - DNA, 28 bp, Artificial sequence
  primer
atgggaatttattttactaattcagatg

SEQ ID NO: 2667 - DNA, 28 bp, Artificial sequence
  primer
atgggaatttattttactaattcagatg

SEQ ID NO: 2668 - protein, 560 aa, Artificial sequence
  consensus sequence
  Variant (2)..(13): Xaa in position 2 to 13 is any amino acid
  Variant (16)..(16): Xaa in position 16 is any amino acid
  Variant (19)..(24): Xaa in position 19 to 24 is any amino acid
  Variant (27)..(27): Xaa in position 27 is any amino acid
  Variant (29)..(44): Xaa in position 29 to 44 is any amino acid
  Variant (45)..(60): Xaa in position 45 to 60 is any or no amino acid
  Variant (62)..(63): Xaa in position 62 to 63 is any amino acid
  Variant (65)..(66): Xaa in position 65 to 66 is any amino acid
  Variant (69)..(73): Xaa in position 69 to 73 is any amino acid
  Variant (75)..(81): Xaa in position 75 to 81 is any amino acid
  Variant (82)..(87): Xaa in position 82 to 87 is any or no amino acid
  Variant (89)..(89): Xaa in position 89 is any amino acid
  Variant (93)..(95): Xaa in position 93 to 95 is any amino acid
  Variant (100)..(112): Xaa in position 100 to 112 is any amino acid
  Variant (113)..(115): Xaa in position 113 to 115 is any or no amino acid
  Variant (117)..(121): Xaa in position 117 to 121 is any amino acid
  Variant (122)..(141): Xaa in position 122 to 141 is any or no amino acid
  Variant (143)..(154): Xaa in position 143 to 154 is any amino acid
  Variant (156)..(166): Xaa in position 156 to 166 is any amino acid
  Variant (167)..(167): Xaa in position 167 is any or no amino acid
  Variant (169)..(169): Xaa in position 169 is any amino acid
  Variant (171)..(171): Xaa in position 171 is any amino acid
  Variant (173)..(173): Xaa in position 173 is any amino acid
  Variant (176)..(177): Xaa in position 176 to 177 is any amino acid
  Variant (180)..(181): Xaa in position 180 to 181 is any amino acid
  Variant (184)..(185): Xaa in position 184 to 185 is any amino acid
  Variant (186)..(186): Xaa in position 186 is any or no amino acid
  Variant (188)..(192): Xaa in position 188 to 192 is any amino acid
  Variant (195)..(196): Xaa in position 195 to 196 is any amino acid
  Variant (197)..(242): Xaa in position 197 to 242 is any or no amino acid
  Variant (244)..(246): Xaa in position 244 to 246 is any amino acid
  Variant (247)..(249): Xaa in position 247 to 249 is any or no amino acid
  Variant (251)..(256): Xaa in position 251 to 256 is any amino acid
  Variant (258)..(260): Xaa in position 258 to 260 is any amino acid
  Variant (262)..(264): Xaa in position 262 to 264 is any amino acid
  Variant (266)..(269): Xaa in position 266 to 269 is any amino acid
  Variant (271)..(276): Xaa in position 271 to 276 is any amino acid
  Variant (277)..(301): Xaa in position 277 to 301 is any or no amino acid
  Variant (303)..(312): Xaa in position 303 to 312 is any amino acid
  Variant (314)..(316): Xaa in position 314 to 316 is any amino acid
  Variant (318)..(320): Xaa in position 318 to 320 is any amino acid
  Variant (322)..(351): Xaa in position 322 to 351 is any amino acid
  Variant (352)..(357): Xaa in position 352 to 357 is any or no amino acid
  Variant (359)..(368): Xaa in position 359 to 368 is any amino acid
  Variant (370)..(371): Xaa in position 370 to 371 is any amino acid
  Variant (374)..(374): Xaa in position 374 is any amino acid
  Variant (378)..(380): Xaa in position 378 to 380 is any amino acid
  Variant (382)..(386): Xaa in position 382 to 386 is any amino acid
  Variant (388)..(388): Xaa in position 388 is any amino acid
  Variant (389)..(392): Xaa in position 389 to 392 is any or no amino acid
  Variant (394)..(395): Xaa in position 394 to 395 is any amino acid
  Variant (400)..(401): Xaa in position 400 to 401 is any amino acid
  Variant (403)..(414): Xaa in position 403 to 414 is any amino acid
  Variant (416)..(418): Xaa in position 416 to 418 is any amino acid
  Variant (420)..(420): Xaa in position 420 is any amino acid
  Variant (427)..(428): Xaa in position 427 to 428 is any amino acid
  Variant (430)..(431): Xaa in position 430 to 431 is any amino acid
  Variant (433)..(433): Xaa in position 433 is any amino acid
  Variant (435)..(436): Xaa in position 435 to 436 is any amino acid
  Variant (438)..(443): Xaa in position 438 to 443 is any amino acid
  Variant (445)..(447): Xaa in position 445 to 447 is any amino acid
  Variant (449)..(449): Xaa in position 449 is any amino acid
  Variant (451)..(460): Xaa in position 451 to 460 is any amino acid
  Variant (462)..(462): Xaa in position 462 is any amino acid
  Variant (468)..(472): Xaa in position 468 to 472 is any amino acid
  Variant (474)..(476): Xaa in position 474 to 476 is any amino acid
  Variant (478)..(479): Xaa in position 478 to 479 is any amino acid
  Variant (481)..(482): Xaa in position 481 to 482 is any amino acid
  Variant (484)..(491): Xaa in position 484 to 491 is any amino acid
  Variant (492)..(492): Xaa in position 492 is any or no amino acid
  Variant (494)..(496): Xaa in position 494 to 496 is any amino acid
  Variant (498)..(500): Xaa in position 498 to 500 is any amino acid
  Variant (502)..(504): Xaa in position 502 to 504 is any amino acid
  Variant (506)..(506): Xaa in position 506 is any amino acid
  Variant (508)..(511): Xaa in position 508 to 511 is any amino acid
  Variant (513)..(514): Xaa in position 513 to 514 is any amino acid
  Variant (515)..(529): Xaa in position 515 to 529 is any or no amino acid
  Variant (531)..(544): Xaa in position 531 to 544 is any amino acid
  Variant (545)..(548): Xaa in position 545 to 548 is any or no amino acid
  Variant (550)..(551): Xaa in position 550 to 551 is any amino acid
  Variant (553)..(555): Xaa in position 553 to 555 is any amino acid
  Variant (557)..(559): Xaa in position 557 to 559 is any amino acid
DXXXXXXXXXXXXQHXLAXXXXXXTPXLXXXXXXXXXXXXXXXXXXXXXXXXXXXXXXXXSXXLXXSGXXXXXQXXXXXXXXXXXXXGXGLLXXXGTSFXXXXXXXXXXXXXXXXGXXXXXXXXXXXXXXXXXXXXXXXXXGXXXXXXXXXXXXSXXXXXXXXXXXXPXVXGXVVXXIGXXLIXXXGXXXXXGGXXXXXXXXXXXXXXXXXXXXXXXXXXXXXXXXXXXXXXXXXXXXXXXXAXXXXXXGXXXXXXLXXXVXXXIXXXXRXXXXXXXXXXXXXXXXXXXXXXXXXXXXXXXRXXXXXXXXXXGXXXAXXXGXXXXXXXXXXXXXXXXXXXXXXXXXXXXXXXXXXXXPXXXXXXXXXXEXXGDXTATXXXSXXXXXGXXXXXRXXGGVLXXGXXXXXXXXXXXXPXXXFXQNNGVIXXTXXAXRXXGXXXXXXLXXXGXFXXXXXXXXXXPXPVLGGXXXXXFXXXAXXGXXIXXXXXXXXXRXXXIXXXSXXXGXGXXXXPXXXXXXXXXXXXXXXXXLXXXXXXXXXXXXXXXXXXGXXAXXXNXXXP

SEQ ID NO: 2669 - protein, 24 aa, Artificial sequence
  protein pattern
  Variant (2)..(2): Xaa in position 2 is any amino acid
  Variant (3)..(3): Xaa in position 3 is Ser or Thr
  Variant (4)..(4): Xaa in position 4 is Cys, Thr or Val
  Variant (6)..(6): Xaa in position 6 is Ala, Gly or Ser
  Variant (11)..(11): Xaa in position 11 is any or no amino acid
  Variant (13)..(14): Xaa in position 13 to 14 is any amino acid
  Variant (15)..(15): Xaa in position 15 is any or no amino acid
  Variant (17)..(18): Xaa in position 17 to 18 is any amino acid
  Variant (20)..(20): Xaa in position 20 is Ala, Asn or Ser
  Variant (22)..(22): Xaa in position 22 is any amino acid
  Variant (23)..(23): Xaa in position 23 is Ala, Ile or Val
PXXXFXQNNGXIXXXTXXAXRXXG

SEQ ID NO: 2670 - protein, 21 aa, Artificial sequence
  protein pattern
  Variant (2)..(2): Xaa in position 2 is Ile or Val
  Variant (3)..(3): Xaa in position 3 is any amino acid
  Variant (4)..(4): Xaa in position 4 is Ala or Ser
  Variant (5)..(5): Xaa in position 5 is Asn, Ser or Thr
  Variant (6)..(6): Xaa in position 6 is Ala, Cys or Ser
  Variant (7)..(8): Xaa in position 7 to 8 is any amino acid
  Variant (10)..(12): Xaa in position 10 to 12 is any amino acid
  Variant (13)..(13): Xaa in position 13 is Ile or Val
  Variant (14)..(14): Xaa in position 14 is any amino acid
  Variant (16)..(17): Xaa in position 16 to 17 is any amino acid
  Variant (18)..(18): Xaa in position 18 is Phe, Trp or Tyr
  Variant (19)..(20): Xaa in position 19 to 20 is any amino acid
DXXXXXXXSXXXXXGXXXXXR

SEQ ID NO: 2671 - protein, 20 aa, Artificial sequence
  protein pattern
  Variant (2)..(2): Xaa in position 2 is any amino acid
  Variant (5)..(6): Xaa in position 5 to 6 is any amino acid
  Variant (7)..(8): Xaa in position 7 to 8 is any or no amino acid
  Variant (10)..(10): Xaa in position 10 is any amino acid
  Variant (11)..(12): Xaa in position 11 to 12 is any or no amino acid
  Variant (15)..(15): Xaa in position 15 is Ala, Gly, Pro, Ser or Thr
  Variant (16)..(16): Xaa in position 16 is Ile or Leu
  Variant (17)..(17): Xaa in position 17 is Ile, Leu or Val
  Variant (18)..(18): Xaa in position 18 is Ile, Leu, Met or Val
  Variant (19)..(19): Xaa in position 19 is Ala, Cys, Gly or Ser
  Variant (20)..(20): Xaa in position 20 is Ala, Gly, Asn, Gln or Ser
HXLAXXXXVXXXTPXXXXXX

SEQ ID NO: 2672 - protein, 19 aa, Artificial sequence
  protein pattern
  Variant (2)..(2): Xaa in position 2 is any amino acid
  Variant (3)..(3): Xaa in position 3 is any or no amino acid
  Variant (5)..(5): Xaa in position 5 is any amino acid
  Variant (7)..(7): Xaa in position 7 is Ser or Thr
  Variant (9)..(9): Xaa in position 9 is Ile, Pro or Val
  Variant (10)..(10): Xaa in position 10 is Thr or Val
  Variant (11)..(11): Xaa in position 11 is Ile or Val
  Variant (12)..(12): Xaa in position 12 is any amino acid
  Variant (13)..(13): Xaa in position 13 is Ile, Leu or Met
  Variant (16)..(17): Xaa in position 16 to 17 is any amino acid
  Variant (19)..(19): Xaa in position 19 is Ile or Val
IXXPXVXGXXXXXIGXXLX

SEQ ID NO: 2673 - protein, 14 aa, Artificial sequence
  protein pattern
  Variant (2)..(2): Xaa in position 2 is any or no amino acid
  Variant (4)..(4): Xaa in position 4 is Phe, Leu or Val
  Variant (5)..(5): Xaa in position 5 is Ala, Cys, Gly, Ser or Val
  Variant (6)..(6): Xaa in position 6 is Phe, Ile, Leu, Met or Val
  Variant (8)..(8): Xaa in position 8 is Leu or Met
  Variant (9)..(9): Xaa in position 9 is Ala, Gly or Ser
  Variant (10)..(10): Xaa in position 10 is Ala, Ile, Leu or Val
  Variant (11)..(13): Xaa in position 11 to 13 is any amino acid
AXSXXXGXXXXXXP

SEQ ID NO: 2674 - protein, 13 aa, Artificial sequence
  protein pattern
  Variant (4)..(4): Xaa in position 4 is Leu or Met
  Variant (5)..(5): Xaa in position 5 is Ala, Gly or Val
  Variant (6)..(6): Xaa in position 6 is Asp or Asn
  Variant (8)..(8): Xaa in position 8 is any amino acid
  Variant (9)..(9): Xaa in position 9 is Cys, Asn, Ser, Thr or Val
  Variant (10)..(10): Xaa in position 10 is Cys, Gly or Ser
  Variant (11)..(11): Xaa in position 11 is any amino acid
  Variant (12)..(12): Xaa in position 12 is Phe, Ile, Leu, Met or Val
  Variant (13)..(13): Xaa in position 13 is Ala or Ser
GGVXXXGXXXXXX

SEQ ID NO: 2675 - DNA, 1041 bp, Escherichia coli
  CDS (1)..(1041): transl_table=11
atgaaagttatgcgtaccaccgtcgcaactgttgtcgccgcgaccttatcgatgagtgctttctctgtgtttgcagaagcaagcctgacaggtgcaggtgcaaccttccctgcgccggtgtatgccaaatgggctgacacttaccagaaagaaaccggtaataaagttaactaccagggtatcggttcttccggtggcgtaaaacagattatcgctaataccgttgattttggtgcctctgacgcgccgctgtctgacgaaaaactggctcaggaaggtctgttccagttcccgaccgtgattggcggcgtggtgctggcggttaacattccagggctgaagtctggcgaactggtgctggatggtaaaaccctcggcgacatctacctgggcaaaatcaagaagtgggatgatgaagccatcgccaaactgaatccgggtctgaaactgccttcacaaaacattgctgtagtacgccgcgcagatggctccgggacttccttcgtcttcaccagctacctggcgaaagtgaacgaagagtggaaaaacaacgttggtactggctctaccgtaaaatggccgatcggtctgggcggtaaaggtaacgacggtatcgccgcgttcgttcagcgtctgccgggtgcaattggttatgttgaatatgcttacgcgaagcagaacaacctggcgtacaccaaactgatctccgctgatggtaaaccggttagtccgaccgaagaaaacttcgctaatgcagcaaaaggtgcagactggagcaaaaccttcgctcaggatctgaccaaccagaaaggcgaagatgcatggcctattacctctaccacgttcattctgatccacaaagatcagaagaaaccagaacaaggcacagaagtgctgaaattcttcgactgggcgtacaaaaccggggctaaacaggcgaacgacctggattacgccagcctgccggatagtgtagttgaacaggttcgcgctgcgtggaagaccaatattaaagacagtagcggtaagccgctgtactaa

SEQ ID NO: 2676 - protein, 346 aa, Escherichia coli
MKVMRTTVATVVAATLSMSAFSVFAEASLTGAGATFPAPVYAKWADTYQKETGNKVNYQGIGSSGGVKQIIANTVDFGASDAPLSDEKLAQEGLFQFPTVIGGVVLAVNIPGLKSGELVLDGKTLGDIYLGKIKKWDDEAIAKLNPGLKLPSQNIAVVRRADGSGTSFVFTSYLAKVNEEWKNNVGTGSTVKWPIGLGGKGNDGIAAFVQRLPGAIGYVEYAYAKQNNLAYTKLISADGKPVSPTEENFANAAKGADWSKTFAQDLTNQKGEDAWPITSTTFILIHKDQKKPEQGTEVLKFFDWAYKTGAKQANDLDYASLPDSVVEQVRAAWKTNIKDSSGKPLY

SEQ ID NO: 2677 - DNA, 1056 bp, Mesorhizobium loti MAFF303099
  CDS (1)..(1056): transl_table=11
atgagacatttcatccgctcggcggccgttgcgatcgcaatggctacagcgtctaccttcaccctttccgcagccatcgcagctgacctttccggcgctggctcgaccttcatctatccggtgttcgccaagtgggccgacacctacaagaaggacaccggcgtcggcctcaactatcagtcgatcggttcgggcggcggcatcaagcaggtcatcgccaagaccgtgaccttcggcgccaccgacaagccgatgtccgatgccgatctggaaaagaacggcctcgtgcagttcccgatggtgatgggcggcatcgtgccgatcgtcaacctcaccggcgtcaagccgggcgaactcgtcctcgacggcaagacgctcgcccagatctatctcggcgccatcaccacctgggacgatgccgcgatcaaggcgctgaaccccagcctcaccctgccgtcgaccgcgatcgccgtcgtgcatcgttcggacggctcgggcaccaccttcaacttcaccaactatctggtaaagctctcgcccgactggaaggacaaggtcggttcggacaccgccgtcgaatggccgacgggcgtcggcgccaagggcagcgaaggcgttgccaacaccgtcaagcagacggatggcggcatcggctacgtcgaatacgcctatgccaagcagaacaacctgtcctactccaagatgctgaacgcagccggcaaggtcgtcgagccgtcgctcgaatccttcggcgctgccgcttcgaatgccgacttcaagggcgccaagaacttcaacgtcatcatcaccaacgagcccggcgacaccacctggccgatcgcggcctcgacctgggtcctgatccacaaggctccggatgatgccgctgccaccggcgaagccctgaagttctttgcctgggcctacaaggacggcaaggaaaccgccaaggcgctcgactatgtctcgatccccgacagcgtcgtcgacctgatcaaggcttcgtggaaggccgacatccaggccggcggcaagcccgtctacgccggcgagtaa

SEQ ID NO: 2678 - protein, 351 aa, Mesorhizobium loti MAFF303099
MRHFIRSAAVAIAMATASTFTLSAAIAADLSGAGSTFIYPVFAKWADTYKKDTGVGLNYQSIGSGGGIKQVIAKTVTFGATDKPMSDADLEKNGLVQFPMVMGGIVPIVNLTGVKPGELVLDGKTLAQIYLGAITTWDDAAIKALNPSLTLPSTAIAVVHRSDGSGTTFNFTNYLVKLSPDWKDKVGSDTAVEWPTGVGAKGSEGVANTVKQTDGGIGYVEYAYAKQNNLSYSKMLNAAGKVVEPSLESFGAAASNADFKGAKNFNVIITNEPGDTTWPIAASTWVLIHKAPDDAAATGEALKFFAWAYKDGKETAKALDYVSIPDSVVDLIKASWKADIQAGGKPVYAGE

SEQ ID NO: 2679 - DNA, 1122 bp, Aeropyrum pernix K1
  CDS (1)..(1122): transl_table=11
atgttggataagaagcttgttctaaccgtgctggctgttgttgtgcttctcggtatagggcttgccctggcatctggctggttaggcggtgaacagggagagagcagcggagggtcaggccccgcccaagtagtcctccagggtgagggatcaacattcatatatccacagatccaagcatggagcgaggagataaagaagacttacccctggataaccattaattacaacccaacaggcagcggtgcaggccaaagcgctttcaaagatggcgttgtagacttcgccggtagcgacactcctctgcccagagaagtctggtccgccatgcagggtaatgtcatacagattcccgtagtcataggaatgctagcaatagtgtacaacataccaggactggaggacctcaagctagacgccaagactatagccttgatatacaagggagagatagagtactgggacgatcctaggatagcctcgctaaacccgggagccagcctgccccatgagaagatagttgctgtccataggagcgactcgagcggcacaacccacgtattcaccatattcctccataagggagcccccgatgtttggacggaggacctcgtgggtaagtctgttgactggccggttgacgccacgggccgaggtgtaggaggcaagggcaaccagggtgttatggaagtcgtcaagaatactccatacagtattggatatgtggagtatgcttacgtggtcaaagcgggagaaggggttaacgtggctttagttgccaaccgggatgatgtcttcctgaagccttcgcccgaaggagctcaggcagccgcatctggcgccgtccaaaacctgccggactctccagacgacgactggagcacaggctacgacgcgataatatatgctcctggtaaggacagctacccaataacctcctggtcattcctcctattctataagcagtacaacgatagggataaagcggaagccataaagaagtttatcgaatggattaacacagaaggccaaactaagatcatcgagggctatatacctattcccgacgagataaggcagatcaacatgaaagccgtggagatgatctcgtacacgggctga

SEQ ID NO: 2680 - protein, 373 aa, Aeropyrum pernix K1
MLDKKLVLTVLAVVVLLGIGLALASGWLGGEQGESSGGSGPAQVVLQGEGSTFIYPQIQAWSEEIKKTYPWITINYNPTGSGAGQSAFKDGVVDFAGSDTPLPREVWSAMQGNVIQIPVVIGMLAIVYNIPGLEDLKLDAKTIALIYKGEIEYWDDPRIASLNPGASLPHEKIVAVHRSDSSGTTHVFTIFLHKGAPDVWTEDLVGKSVDWPVDATGRGVGGKGNQGVMEVVKNTPYSIGYVEYAYVVKAGEGVNVALVANRDDVFLKPSPEGAQAAASGAVQNLPDSPDDDWSTGYDAIIYAPGKDSYPITSWSFLLFYKQYNDRDKAEAIKKFIEWINTEGQTKIIEGYIPIPDEIRQINMKAVEMISYTG

SEQ ID NO: 2681 - DNA, 1014 bp, Aquifex aeolicus VF5
  CDS (1)..(1014): transl_table=11
atgaacaggaagaaatttcttcttggggtactagcattagcaatttttcccgccgcaggaatagcaaaggaaaaagtaatcaacggtgctggagcaacttttcccgctcctctctactggaaatgggctgacgcttactacaaggcaaccggtattaaggtaaactaccagtccataggttcaggtggaggagttaggcagatagtaaacagaacagttgactttggagcatctgatgctcccttaaaacctgaggaaacaaaaaaacacaatctggctcaattcccgactgtgattggaggtgttaccgtagcttataacttaaggggagtagaaaatctcaagctctctacaagagcggtttgtgatatttttctcggaaaaattaagtactgggatgacccagttataaagaaggataatcccggagtaaaacttcctcacaagagaattaccgttgttcgcaggagtgacggttcaggaactacctggatattcacaaactacctctccaaagcttgccccgagtggaaggaaaaagtcggttacggaaaagcggtaaggtggcctacaggtataggtgctaaaggaaacgaaggtgtagcaaactatataagaaggataaaaggagctataggctatgtggaatacgcttacgcaattcaaaacaagatacccgtcgcggcagtggaaaacagagatggaaaatttgtaaaaccttctatagaaacattccaagcagctgctgcaaacgcaaagtgggatcctaaaaaagacttctacgaagtcctgacatggcagcccggtgaaaaagcttaccccatagctggtgctacctttatactccttgcaaaggacgaagacaggaaggaaataaataaggaagtagttaaattctttgactgggcttacaaaaatggtgataaaatggctatagagttgcattacgtaccgttgcccgaaaacgttaagaacatgattaggaactactggagagagcatggatggtattaa

SEQ ID NO: 2682 - protein, 337 aa, Aquifex aeolicus VF5
MNRKKFLLGVLALAIFPAAGIAKEKVINGAGATFPAPLYWKWADAYYKATGIKVNYQSIGSGGGVRQIVNRTVDFGASDAPLKPEETKKHNLAQFPTVIGGVTVAYNLRGVENLKLSTRAVCDIFLGKIKYWDDPVIKKDNPGVKLPHKRITVVRRSDGSGTTWIFTNYLSKACPEWKEKVGYGKAVRWPTGIGAKGNEGVANYIRRIKGAIGYVEYAYAIQNKIPVAAVENRDGKFVKPSIETFQAAAANAKWDPKKDFYEVLTWQPGEKAYPIAGATFILLAKDEDRKEINKEVVKFFDWAYKNGDKMAIELHYVPLPENVKNMIRNYWREHGWY

SEQ ID NO: 2683 - DNA, 1212 bp, Pasteurella multocida subsp. multocida str. Pm70
  CDS (1)..(1212): transl_table=11
ttggctataaaacaatccactcgccttgcctttttcaaaaaatctgtacaaaaacaaccgcactttttgcactgcaaactgtcattcgcctgtcatcaaactgtcatatttgttcattacaatcactttcgctaccacatggtagtgattgaaaagacactcaaaggagtaacatctatgacaaaacgtgcaatgcttttggctattctattcagtacatttgctttgacgacgcaggcacaaaccattactggcgcgggcgcttcttttccttatccaatctatgccaaatgggcatccatgtatgaaaaacaaacaggtaacaaagtcaactatcaatcaattggctcggggggcggtcagcaacaaattatcgccaaaaccattgattttggtgcctcagatgatccgatgaaagcagaacttttagcacaacatcaattattacaatttccagccattatcggtggcacagtgcctgtcgtgaatttaccagaaatcaccgccggacagcttaaactttctggtgaagttctcgccgatattttcttaggcaaaattaaaaagtggaatgatcccgctatcgccaaattaaaccaaggggctaatttacccgataaagccattatcgtcgtacatcgttctgacggttcaggcaccacattcggttggactaattatctttctaaagtatcgactgaatggaaagaaacagtcggtcaaggtaaatcagtcaaatggcctacgggacaaggcggcaaaggtaacgaaggcgtggctgcttatgtcagcaaaatcaaatattcgattggttatgtggaatatgcgtacgcgaaacaaaaccagctcgcttgggcgtcattacaaaataaagccgggcaatttgtacagccctcagcagaaagttttatggcagctgccgccaatgcacaatgggaaagtgcggtcggtatgggcgtcattttaaccaatgaagaaggcgatacatcttggccagtcaccgcagcaagtttcatcttattgcataagcatgcagaaaagccagaaatcaccaaagctgtctttgatttctttgactgggcattcaagcaaggcaaagtcgcagcaaccgagcttgattatgtgcctctgcctgaggaagttattcagaaaattcaagcgcaatggaaaaccgaggtgaagtccagtgatggcaaaacactttggcaataa

SEQ ID NO: 2684 - protein, 403 aa, Pasteurella multocida subsp. multocida str. Pm70
MAIKQSTRLAFFKKSVQKQPHFLHCKLSFACHQTVIFVHYNHFRYHMVVIEKTLKGVTSMTKRAMLLAILFSTFALTTQAQTITGAGASFPYPIYAKWASMYEKQTGNKVNYQSIGSGGGQQQIIAKTIDFGASDDPMKAELLAQHQLLQFPAIIGGTVPVVNLPEITAGQLKLSGEVLADIFLGKIKKWNDPAIAKLNQGANLPDKAIIVVHRSDGSGTTFGWTNYLSKVSTEWKETVGQGKSVKWPTGQGGKGNEGVAAYVSKIKYSIGYVEYAYAKQNQLAWASLQNKAGQFVQPSAESFMAAAANAQWESAVGMGVILTNEEGDTSWPVTAASFILLHKHAEKPEITKAVFDFFDWAFKQGKVAATELDYVPLPEEVIQKIQAQWKTEVKSSDGKTLWQ

SEQ ID NO: 2685 - DNA, 1212 bp, Deinococcus radiodurans R1
  CDS (1)..(1212): transl_table=11
atgtccgtctcatggtcgctgcaaatgcactctgctgcaactgccggggtcacgaacgtctgggcagggagcggggaaggaagggctgcgtcgccgttcttgccggtaagaaccgttcctctatgcggcacatccccagtcttcggaagccttgacgccccgctgacaaagccccgccacactcggcgacgtatgaagaagaccctgctgggcctcagcgcccttgtcatgatcagcaccgccgccgcccagggcgccatcaccggcgcgggcgcgagcttcccctatcccctgtactccaagatgttcagcgagtacaaggcgagcaacgtcaactaccagtcggtgggctcgggcagcggccagaagcagattctggagcgcaccgtggacttcgcgggcagcgacaaccccatgaccgacgcgcagctggggagcgcccccggcaccctgctgcacgtgcccaccgccatcggcgccgtggtgcccgcctacaacctgcccggcgtgaccaagcccctgaacttcgatggccccacgctcgccaacatctacctcggcaaaatcaagacctggggtgaccccgccatcgccaagctcaaccccggcgtgaccattcccccgctgccgatcaccgtggcgcgccgctccgacggctcgggtaccaccttcgtgttctcggactacctgagcaaagtcagcggcgagtggaagagcaaggtcggcgcgggcaacagccttcagtggcccgtcggcaccggcgccaagggcaacgacggcgtggcgggcgtggtcaagggcacccccggcgccatcggttacgtggaactggtgtacgccaagcagaacaagctgtccttcggcgccgtgaaaaaccgcgcgggcaagttcatcctggccgataacggtcccgccagcaacgcggctctgggcgtggtcatccccgccgatacccgcgtcagtctgaccaacagcgccaacgccggcgcttacccgattgccagcttcacctacctgattttctacaaggatcagaagtacggcaaccgcaccgaagcccaggccaaggcgctcaagaacctgctcacctacgtcgtgaccagcggccagcagtacaacgaaggcctcgactacgccaagctgcccagcaacgtggcggccaaggccaagaccatcatcaactcgatgaactacggcggcaagaagctctga

SEQ ID NO: 2686 - protein, 403 aa, Deinococcus radiodurans R1
MSVSWSLQMHSAATAGVTNVWAGSGEGRAASPFLPVRTVPLCGTSPVFGSLDAPLTKPRHTRRRMKKTLLGLSALVMISTAAAQGAITGAGASFPYPLYSKMFSEYKASNVNYQSVGSGSGQKQILERTVDFAGSDNPMTDAQLGSAPGTLLHVPTAIGAVVPAYNLPGVTKPLNFDGPTLANIYLGKIKTWGDPAIAKLNPGVTIPPLPITVARRSDGSGTTFVFSDYLSKVSGEWKSKVGAGNSLQWPVGTGAKGNDGVAGVVKGTPGAIGYVELVYAKQNKLSFGAVKNRAGKFILADNGPASNAALGVVIPADTRVSLTNSANAGAYPIASFTYLIFYKDQKYGNRTEAQAKALKNLLTYVVTSGQQYNEGLDYAKLPSNVAAKAKTIINSMNYGGKKL

SEQ ID NO: 2687 - DNA, 1041 bp, Escherichia coli O157:H7 EDL933
  CDS (1)..(1041): transl_table=11
atgaaagttatgcgtaccaccgtcgcaactgttgtcgccgcgaccttatcgatgagtgctttctctgtgtttgcagaagcaagcctgacaggtgcaggtgcaaccttccctgcgccggtgtatgccaaatgggctgacacttaccagaaagaaaccggtaataaagttaattaccagggtatcggttcttccggtggcgtaaaacagattatcgccaataccgttgattttggtgcttctgacgcgccgctgtctgacgaaaaactggctcaggaaggtctgttccagttcccgaccgtgattggcggcgtggtgctggcggttaacattccaggtctgaagtctggtgagctggtgctggatggtaaaaccctcggcgatatctacctgggcaaaatcaagaagtgggatgatgaagccatcgccaaattgaatccgggtctgaaactgccttcacagaacattgctgtagtgcgccgcgcagatggctccgggacttccttcgtcttcaccagctacctggcgaaagtgaatgaagagtggaaaaacaacgttggtactggctctaccgtaaaatggccgatcggtctgggtggtaaaggtaacgacggtatcgctgcgttcgttcagcgtctgccgggtgcaattggttacgttgaatatgcttatgcgaagcaaaacaacctggcgtacaccaaactgatctccgctgatggtaaacctgttttgccgaccgaagaaaacttcgctaatgcagcaaaaggtgcagactggagcaaaaccttcgctcaggatctgaccaaccagaaaggcgaagatgcgtggcctattacctctaccacgttcattctgatccacaaagatcagaagaaaccagaacaaggcacagaagtgctgaaattcttcgactgggcgtacaaaaccggggctaaacaggcgaacgacctggattacgccagcctgccggatagcgtagttgaacaggttcgcgctgcgtggaagaccaatattaaagacagtagcggcaagccgctgtactaa

SEQ ID NO: 2688 - protein, 346 aa, Escherichia coli O157:H7 EDL933
MKVMRTTVATVVAATLSMSAFSVFAEASLTGAGATFPAPVYAKWADTYQKETGNKVNYQGIGSSGGVKQIIANTVDFGASDAPLSDEKLAQEGLFQFPTVIGGVVLAVNIPGLKSGELVLDGKTLGDIYLGKIKKWDDEAIAKLNPGLKLPSQNIAVVRRADGSGTSFVFTSYLAKVNEEWKNNVGTGSTVKWPIGLGGKGNDGIAAFVQRLPGAIGYVEYAYAKQNNLAYTKLISADGKPVLPTEENFANAAKGADWSKTFAQDLTNQKGEDAWPITSTTFILIHKDQKKPEQGTEVLKFFDWAYKTGAKQANDLDYASLPDSVVEQVRAAWKTNIKDSSGKPLY

SEQ ID NO: 2689 - DNA, 1095 bp, Xylella fastidiosa 9a5c
  CDS (1)..(1095): transl_table=11
atgaaagtatattttgctggtttcactctcctttgtttatgcactgccgtaacaatcaccggctgtaaaccttccaacgataaccagtcaacaggtgtcagtcaggatgggaacagtacgacgccaccctctgccgagcaaaccaagagtgtgaaaatttcaggcgcaggcgcctcatttatctatccactgatctcgcaatggtcagccgactacaacgccgccactggcaataaaattaactatcagtcaatcggctcaggcggtggtattgcccaaatcaaagccgccacaatcgattttggttcttctgataagccacttgacagcagcgaactgacccaagcgggtctagggcagtttccatcggccataggtggcgtcgtgccggtggtcaatctagacaacatcgaaccaggcaaactacgcctgacaggcccactgcttgcagatattttcctagggaagatcagtaagtggaatgacgcagcaatcatcagcgccaatccggggttacatcttcccgacactaaaatcaacatcgtgcatcgttccgatggctctggcacgacattcaatttcagcaactatctatccaaagtcagcgcggaatggaaacagaaagtgggtgaaggcacttcagtgcagtggcctgggggcgtcggcggtaagggcaacgaaggtgtagcctcatatgttcaacagattaaaggctcaatcggctacgttgaactggcgtatgcgcttcagaacaaaatgtcatatacagcgctccagaacgctgctggtcaatgggtacaaccaagcgcagaaagctttgcagccgccgcatccaacgcagactggagcaatgcaaaggatttcaatttggtcattaccaacgctactggggaagcagcttggccgatcacagcgacaaactttatattgatgcgcaagcaaactaaggatgcagcgcaaagaaaagccactctagacttcttcaagtggtcctttgaaaatgggcagaaacaagccaatgaattgcactatgtgccattgccaccaaatctggtgaagcaaatcgaagcttactgggcaagcgaattcaagtaa

SEQ ID NO: 2690 - protein, 364 aa, Xylella fastidiosa 9a5c
MKVYFAGFTLLCLCTAVTITGCKPSNDNQSTGVSQDGNSTTPPSAEQTKSVKISGAGASFIYPLISQWSADYNAATGNKINYQSIGSGGGIAQIKAATIDFGSSDKPLDSSELTQAGLGQFPSAIGGVVPVVNLDNIEPGKLRLTGPLLADIFLGKISKWNDAAIISANPGLHLPDTKINIVHRSDGSGTTFNFSNYLSKVSAEWKQKVGEGTSVQWPGGVGGKGNEGVASYVQQIKGSIGYVELAYALQNKMSYTALQNAAGQWVQPSAESFAAAASNADWSNAKDFNLVITNATGEAAWPITATNFILMRKQTKDAAQRKATLDFFKWSFENGQKQANELHYVPLPPNLVKQIEAYWASEFK

SEQ ID NO: 2691 - DNA, 1041 bp, Yersinia pestis CO92
  CDS (1)..(1041): transl_table=11
atgaaactgatgcgtaccaccgtagccagcattgtggcagcgactttatctatgactgctgtatccgcgttcgctgctgcaagcctgacaggtgcaggtgcgacattccccgcaccggtgtatgccaagtgggcagattcttatcagaaagaaacaggtaacaaaattaactatcaaggtatcggttcttccggtggcgtgaagcaaattattgccaatactgttgattttggtgcttctgatgcgccattaacagatgaaaaactggctactgaaggtttgttccaattcccgaccgtgattggcggtgtggtgttagccgtgaatattcctggcattaaatccggtgagctgacattagacggtaaaacgctgggtgatatctatctgggcactgtgaaaaagtggaatgatcctgcgattgttaagttgaacccaggcgttaaattaccggatcaaaatattgctgttgtacgtcgtgctgacggctcgggtacctcatttgttttcaccagctacttggctaaagtgaacgcagaatggaaagagaaagtcggggctggctctaccgtgaactggccaaccggtttaggtggtaaaggtaacgacggtatcgctgcttttgttcagcgcctgcctggctcaattggctatgtagaatatgcttacgcgaaacaaaataatttggcttacactaaactgatttcagcagatgggaagcccgttagcccaactgagcacagctttagctctgcagcaaaaggtgtggactggagcaaatcatttgctcaagacttaaccaatcaaaaaggtgatgatgtttggccaattacctcaacgaccttcatcttagtgcataaagaacagaagaatgctgctaatggcacagaagtattgaaattctttgactggggttacacacacggcgctaaacaagctaacgaactggattatgcaacattacccgcggaagttgttgaacaagtacgtgcagcttggaaaactcagattaaagatagcagcggcaagccaatcttctga

SEQ ID NO: 2692 - protein, 346 aa, Yersinia pestis CO92
MKLMRTTVASIVAATLSMTAVSAFAAASLTGAGATFPAPVYAKWADSYQKETGNKINYQGIGSSGGVKQIIANTVDFGASDAPLTDEKLATEGLFQFPTVIGGVVLAVNIPGIKSGELTLDGKTLGDIYLGTVKKWNDPAIVKLNPGVKLPDQNIAVVRRADGSGTSFVFTSYLAKVNAEWKEKVGAGSTVNWPTGLGGKGNDGIAAFVQRLPGSIGYVEYAYAKQNNLAYTKLISADGKPVSPTEHSFSSAAKGVDWSKSFAQDLTNQKGDDVWPITSTTFILVHKEQKNAANGTEVLKFFDWGYTHGAKQANELDYATLPAEVVEQVRAAWKTQIKDSSGKPIF

SEQ ID NO: 2693 - DNA, 1152 bp, Synechocystis sp. PCC 6803
  CDS (1)..(1152): transl_table=11
atgactactttcaagcagattaaaaagttgtccaagcatttagtgcccacagcttctatcctggcactaactgttggtctggcagcctgtggtggcggtggtggtggtggtgacacagcccaaaccggtggtggtgatgcaactacaactactgccgcagatgcctttgccagtaaagtttccttgaccggtgccggtgctagttttcctgctcccctttaccaaggctggtttgtggccctcaatcaagctgtgcctaacttagaagttaactatcagtccgtgggtagtggtgctggggttgagcaattcatgagtaagaccgtggattttggtgccagcgatgtggccatggacgacgaagagattgccaaggttaacggtgaagtggtaatgcttcccatgaccgctggtagcattgttatggcctacaacttgcctggggtggaagggttgaagttatcccaggaagccttggcgggcatcatgttgggcaatattactaaatggaatgaccccaaattagtggcggataatcccgatttgaccttgcccgatcgccctatcacggtggtgcatcgttccgacggtagcggtaccacggcggttttcaccatgaacttggccgccatgagtcccgaatttaaggaaaccatcggtgacggtaaaaccgttgagtggcccaccagtaaaggtaaattcatcggtggtaagggtaacgaaggtgtaaccgctggtattcaacaaaatgagggagccattggctacgttgaatatggctacgccaccaacaataacctgaccatggccagcctccagaacaaggatggacagtttgttgtgccgaccgatgaaaatgcttcggccaccctggctgcagtcgaactgccggaaaacctgcgggaattcatcactaaccccgctggggctgattcctatcccattgttacctacacctggatgttgctttatccccagtacgctgatgcggaaaaggctaaaggtatcgaagcgatggtggaatttggtctgaatgaaggtcaaaccatggcccccactttgggttatgtacctttacctcaaaatgtgcgggaaaaagtggccgccgctgctgacaaaatctcccccgattacaccattaccttgaaatag

SEQ ID NO: 2694 - protein, 383 aa, Synechocystis sp. PCC 6803
MTTFKQIKKLSKHLVPTASILALTVGLAACGGGGGGGDTAQTGGGDATTTTAADAFASKVSLTGAGASFPAPLYQGWFVALNQAVPNLEVNYQSVGSGAGVEQFMSKTVDFGASDVAMDDEEIAKVNGEVVMLPMTAGSIVMAYNLPGVEGLKLSQEALAGIMLGNITKWNDPKLVADNPDLTLPDRPITVVHRSDGSGTTAVFTMNLAAMSPEFKETIGDGKTVEWPTSKGKFIGGKGNEGVTAGIQQNEGAIGYVEYGYATNNNLTMASLQNKDGQFVVPTDENASATLAAVELPENLREFITNPAGADSYPIVTYTWMLLYPQYADAEKAKGIEAMVEFGLNEGQTMAPTLGYVPLPQNVREKVAAAADKISPDYTITLK

SEQ ID NO: 2695 - DNA, 1041 bp, Salmonella enterica subsp. enterica serovar Typhi str. CT18
  CDS (1)..(1041): transl_table=11
atgaaagttatgcgtaccactgtcgcaactgttgtcgccgcgactttatcgatgagcgcgttctctgcctttgcagcagcaagcctgacaggtgccggtgcaacgtttcctgcgccggtgtatgccaaatgggcggatacctaccagaaagaaaccggtaacaaagtcaattaccaggggataggctcttccggcggcgtgaaacaaattaccgcgaataccgttgattttggcgcttccgatgcgccgctgtctgacgaaaaactgaatcaggaaggcctgttccagtttccgacggtgatcggcggcgtggtgctggcggtgaatattccaggcctcaaatccggcgaactggtgctggatggtaaaacgctgggtgacatctacctcggtaaaatcaagaagtgggatgatgaagccatcaccaaactgaacccaggcgtgaagctgccctcacagaatatcgctgtggtgcgtcgcgctgacggttccggtacctccttcgtgttcaccagttacctggcgaaagtcaacgacgagtggaaatcgaaagtgggcgcgggttctaccgtgaactggccaaccggtctgggcggtaaaggtaacgacggcatcgcggcatttgtacagcgtctgccaggcgctatcggctacgttgaatacgcttacgctaaacagaacaacctggcctacaccaaactggtttctgccgacggcaaaccggtaagcccgacggaagagagcttctctaatgcggcgaaaggcgcagactggagcaaaaccttcgcgcaggatctgaccaaccagaaaggtgacgatgtgtggccaatcacctccaccacctttatcctggtccacaaagcgcaaaagaaacctgagcagggtgctgaagtgttgaagttcttcgactgggcctacaaaaatggcgctaaacaggcgaatgatctggactacgccagcctgccggataacgttgttgatcaggttcgtaccgcctggaagaccagtataaaagacagcaacggtaaggcgctgtattaa

SEQ ID NO: 2696 - protein, 346 aa, Salmonella enterica subsp. enterica serovar Typhi str. CT18
MKVMRTTVATVVAATLSMSAFSAFAAASLTGAGATFPAPVYAKWADTYQKETGNKVNYQGIGSSGGVKQITANTVDFGASDAPLSDEKLNQEGLFQFPTVIGGVVLAVNIPGLKSGELVLDGKTLGDIYLGKIKKWDDEAITKLNPGVKLPSQNIAVVRRADGSGTSFVFTSYLAKVNDEWKSKVGAGSTVNWPTGLGGKGNDGIAAFVQRLPGAIGYVEYAYAKQNNLAYTKLVSADGKPVSPTEESFSNAAKGADWSKTFAQDLTNQKGDDVWPITSTTFILVHKAQKKPEQGAEVLKFFDWAYKNGAKQANDLDYASLPDNVVDQVRTAWKTSIKDSNGKALY

SEQ ID NO: 2697 - DNA, 1041 bp, Salmonella typhimurium LT2
  CDS (1)..(1041): transl_table=11
atgaaagttatgcgtaccactgtcgcaactgttgtcgccgcgaccttatcgatgagcgcgttctctgcctttgcagcagcaagcctgacaggtgccggtgcaacgtttcctgcgccggtgtatgccaaatgggcggatacctaccagaaagaaaccggtaacaaagtcaattaccaggggataggctcttccggcggcgtgaaacaaatcaccgcgaataccgttgattttggcgcttccgatgcgccgctgtctgacgaaaaactgaatcaggaaggcctgttccagttcccgacggtgatcggcggcgtggtgctggcggtgaatattccaggcctcaaatccggcgaactggtgctggatggtaaaacgctgggtgacatctacctcggtaaaatcaagaagtgggatgatgaagccatcaccaaactgaacccaggcgtgaagctgccttctcagaacatcgctgtggtgcgtcgcgctgacggttccggtacctccttcgtgttcaccagttacctggcgaaagtcaacgacgagtggaaatcgaaagtgggcgcgggttctaccgtgaactggccaaccggtctgggcggtaaaggtaacgacggcatcgcggcatttgtacagcgtctgccaggcgctatcggctacgttgaatacgcttacgccaagcagaacaacctggcctacaccaaattggtttctgccgacggcaaaccggtaagcccgacggaagagagcttctctaatgcggcgaaaggcgcagactggagcaaaaccttcgcgcaggatctgaccaaccagaaaggtgacgatgtgtggccaatcacttccaccacgtttatcctggtccacaaagcgcagaagaaacctgagcagggtgctgaagtgttgaagttcttcgactgggcctacaaaaatggcgctaagcaggcgaatgatctggactacgccagcctgccggataacgttgttgagcaggttcgtgctgcatggaagaccagtataaaagacagcaacggtaaggcgctgtattaa

SEQ ID NO: 2698 - protein, 346 aa, Salmonella typhimurium LT2
MKVMRTTVATVVAATLSMSAFSAFAAASLTGAGATFPAPVYAKWADTYQKETGNKVNYQGIGSSGGVKQITANTVDFGASDAPLSDEKLNQEGLFQFPTVIGGVVLAVNIPGLKSGELVLDGKTLGDIYLGKIKKWDDEAITKLNPGVKLPSQNIAVVRRADGSGTSFVFTSYLAKVNDEWKSKVGAGSTVNWPTGLGGKGNDGIAAFVQRLPGAIGYVEYAYAKQNNLAYTKLVSADGKPVSPTEESFSNAAKGADWSKTFAQDLTNQKGDDVWPITSTTFILVHKAQKKPEQGAEVLKFFDWAYKNGAKQANDLDYASLPDNVVEQVRAAWKTSIKDSNGKALY

SEQ ID NO: 2699 - DNA, 1032 bp, Ralstonia solanacearum GMI1000
  CDS (1)..(1032): transl_table=11
atgaaattggtcaagactgcgattgcgggcgttgtttcgctggctttcgctggtatcgcgtttgccgccgacatcaccggcgctggcgcgacgttcccggcgcctgtctataacaagtgggctgacgcctatcagaaggccaccggcaccaaggtgaactatcaaggcatcggctcgtcgggcggcatcaagcagatcaccgccaagaccgtcgatttcggcgcctcggacatgccgctcaaggatgacgagctgagcaaggacggcctgctgcaattcccgaccgtgatcggcggcgtggtgccggtgatcaatctgccgggcgtgaagccgggcgagctggtcctgacgggccaggtgctgggcgacatctacctgggcaaggtcaagaagtggaatgacccggccatcgtcaagctgaatccgaaggccaagctgccggaccaggacatcctggtggtgcgccgtgctgacggttcgggcacctcgttcatcttcacgaactacctgtcgaaggtgagcgccgagtggaagggcaaggtcggcgaaggcacgaccgtgaactggccgaccggcacgggcggcaagggcaacgaaggcgtggccgccttcgtgcagcgtctgggtggcgcgatcggctacgtcgagtacgcctacgccaagcagaaccacatgacccacatcaatctgcagaacgcctcgggcgccgtggtgcagccgaccagcgacgccttcaaggccgccgctgccggcgccgactggagcaagtcgttctaccagatcctgaccaaccagccgggcaaggacgcatggccgatcgccggcgcgaccttcatcctggtgcacaagacccaggacaagccggtccagggcaccgaggtcctgaagttcttcgactgggcctacaagaacggcggcaaggatgcttccgcgctggactacgtgccgctgccggacccggtgctgaaccagattcgcgccacctggaagtcgggcgtgaaggacgcttcgggcaagccgatctacaactga

SEQ ID NO: 2700 - protein, 343 aa, Ralstonia solanacearum GMI1000
MKLVKTAIAGVVSLAFAGIAFAADITGAGATFPAPVYNKWADAYQKATGTKVNYQGIGSSGGIKQITAKTVDFGASDMPLKDDELSKDGLLQFPTVIGGVVPVINLPGVKPGELVLTGQVLGDIYLGKVKKWNDPAIVKLNPKAKLPDQDILVVRRADGSGTSFIFTNYLSKVSAEWKGKVGEGTTVNWPTGTGGKGNEGVAAFVQRLGGAIGYVEYAYAKQNHMTHINLQNASGAVVQPTSDAFKAAAAGADWSKSFYQILTNQPGKDAWPIAGATFILVHKTQDKPVQGTEVLKFFDWAYKNGGKDASALDYVPLPDPVLNQIRATWKSGVKDASGKPIYN

SEQ ID NO: 2701 - DNA, 1233 bp, Pyrobaculum aerophilum str. IM2
  CDS (1)..(1233): transl_table=11
atgggcataaaaacggtcgtaatagccgccgcggcgattataataattgctctactggcggcgttgcttggtttgggcgggggaggcaagcagacccagtcggcagagccccctcagaccagcgcgccgggccagtcgcagactattaccagcacctcggcgataggcggttctctcactggcggcggatctacttttataaatcctcagatggtggcttggtcaaagaggttctatgaagccactggcggaaaggtgcaagtaaattatcaatccattggctccggggcaggaacagcgcagttcttggagaaaaagctagatttcggcgcatccgacgtgcccatgccgagagataaatatgaacaagtcaaggggcgttttatgcaattccccgtaatcataggctctattgttgttgtgtacaacgtgccggagatagcatatgagaagactgggaagtacctaaacctcacctctgaggtgatctctctaatatacacgggggagattaaacagtggtgtgacgataggataaaggcaattaacccaggcctcgcggacaaactcccctgtagggacattacggctgttcacagaagcgacggctcgggcactaccgccgcctttactctttacttatcaaaggcctatcctccgtggaaccagacagtggggtgggggtatactgttaagtggcctgtcgacgagagaggcaagggcgtcggcgccaagggaaatgaaggcgtggcgcaggcggttttgcagaacgcctattccatcggatatgtggaatacgcctattgggttaaaaacaaagagaagtacgacaaaatcggcggcgtggcgtatcttaaaaacgacaacgacgggaagtactacttcccatccgccgaggccgtaagcgctggtgcatcggcggctctggagagatatagagctaagtatgggcaagtgcccgcgccagacgctgactggaatcccgtctctatagagttttcaaacccgccgaagggatacccactgctgtcttttacctacgtctttgtatggaaggactactccgctgagggctacggcaacgcgccggggaaagccgccttaattaggcagtttctccaatgggtgcttacagaaggccaaaagcagggtaacttagttgagggctacatcccgttgccgccggacttagccgccataggcctagaggcccttaagcaagtgaaaccctaa

SEQ ID NO: 2702 - protein, 410 aa, Pyrobaculum aerophilum str. IM2
MGIKTVVIAAAAIIIIALLAALLGLGGGGKQTQSAEPPQTSAPGQSQTITSTSAIGGSLTGGGSTFINPQMVAWSKRFYEATGGKVQVNYQSIGSGAGTAQFLEKKLDFGASDVPMPRDKYEQVKGRFMQFPVIIGSIVVVYNVPEIAYEKTGKYLNLTSEVISLIYTGEIKQWCDDRIKAINPGLADKLPCRDITAVHRSDGSGTTAAFTLYLSKAYPPWNQTVGWGYTVKWPVDERGKGVGAKGNEGVAQAVLQNAYSIGYVEYAYWVKNKEKYDKIGGVAYLKNDNDGKYYFPSAEAVSAGASAALERYRAKYGQVPAPDADWNPVSIEFSNPPKGYPLLSFTYVFVWKDYSAEGYGNAPGKAALIRQFLQWVLTEGQKQGNLVEGYIPLPPDLAAIGLEALKQVKP

SEQ ID NO: 2703 - DNA, 1092 bp, Xanthomonas campestris pv. campestris str. ATCC 33913
  CDS (1)..(1092): transl_table=11
atgaaactgcagtcggccagcctgaccgccctgtccctcaccatcgcccttgccctggcggcctgctcgcccggcaaggacgcgcagtccggcgatcccgcacaaggcggtgccaacgcaggcgcggcggccggcgagagcaagagtgcggagatcgccggcgccggtgcgtccttcatctacccgctggtgtccaagtggtcggccgactacaacgccgccaccggcaacaaggtcaattaccagtcgatcggttcgggcggcggcattgcgcagatcaaggccggcaccgtggatttcggctcctccgacaagccgctcgatagcgccgagctgcagcaggccggcctgggccagttcccctcggccatcggcggcgtggtgccggtggtgaacatcgaaggcatggcgcccggcaagctgcgcctgaccggcgccctgctcggcgacatcttcctgggcaaggtcaccatgtggaacgacgcggcgattgctgcggccaacccgggcgtgaccctgccggcgaccaagatcaacctggtgcatcgctccgacggttcgggcaccacattcaacttctccaactacctgtccaaggtcagcccggagtggaagaccaaggtcggcgaaggcacctcggtgcagtggccgggcggcgtgggcggcaagggcaacgaaggcgtggcctcctacgtgcagcagatcaagggctcgatcggctatgtcgaactggcctacgcgctgcagaacaagatgccgtacgcgtcgatgcagaacgctgccggccagtgggtggagccgaacgctgaaagcttcggcgccgcagcggccagcgccgactggaccaatgccaaggacttcaacctggtgatcaccaatgcaccgggcgagaaggcctggccgatcaccgcgaccaacttcatgctgatgcacaagcagcccaaggacgcggcccgcagcaaggccacgctggacttcttcaagtgggcactggaaaacggccaggcccaggccagcgaactgcattacgtgccgctgccgccggagctggtgaagcagatcgaagcctactggggcagcgagttcaagtga

SEQ ID NO: 2704 - protein, 363 aa, Xanthomonas campestris pv. campestris str. ATCC 33913
MKLQSASLTALSLTIALALAACSPGKDAQSGDPAQGGANAGAAAGESKSAEIAGAGASFIYPLVSKWSADYNAATGNKVNYQSIGSGGGIAQIKAGTVDFGSSDKPLDSAELQQAGLGQFPSAIGGVVPVVNIEGMAPGKLRLTGALLGDIFLGKVTMWNDAAIAAANPGVTLPATKINLVHRSDGSGTTFNFSNYLSKVSPEWKTKVGEGTSVQWPGGVGGKGNEGVASYVQQIKGSIGYVELAYALQNKMPYASMQNAAGQWVEPNAESFGAAAASADWTNAKDFNLVITNAPGEKAWPITATNFMLMHKQPKDAARSKATLDFFKWALENGQAQASELHYVPLPPELVKQIEAYWGSEFK

SEQ ID NO: 2705 - DNA, 1092 bp, Xanthomonas campestris pv. campestris str. ATCC 33913
  CDS (1)..(1092): transl_table=11
ttgcgcaggacgccattgccctgcaatggcgtcctgcgggacgtcatccctatcgctacaaggagctgttccgtgatctcttccatcaaatcccgtctggctgtcggcgtgctcgctgccgcactggccatgggcgcccaggctgccgatgtcaccggcgccggcgcatcgttcatttacccggtcatgtcgaagtggtcggccgactacaacaccgccaccaagaagcaggtcaactatcagtcgatcggctccggtggcggcattgcgcagatcaaggccgccagcgtggatttcggttcttccgatgccccgctcaagcccgaagagttggctgccgccggactggcgcagtttccctcggtgatcggcggcgtggtgccggtgatcaacgtgccgggcatcgctgccggtgcggtcaagctggacggcaagaccctgggcgatatcttcctgggcaaggtcaccacctggaacgatgcggccatcgttgcgctgaacccgggcgtgaagctgcccgacagcaagatcaccgtggtgcatcgctccgacggttcgggcaccagcttcaacttcaccaactacctgtccaaggtcaatccggactggaagagcaaggtcggcgaaggcacggcggtgcagtggccgaccggcattggcggcaagggcaacgaaggcgtggccgcctacgtgaagcagatcaagggcggcatcggctatgtcgagctgtcgtacgcgctgcagaacaagatggcctacaccgcgatgaagaatgcggccggcaagttcgtgcagccgtccgatgagaccttcgctgcggccgccaacagtgccgactggggcagcagcaaggacttctacctggtgatgaccaatgccgccggcgacaacgcctggccgatcaccgccaccaatttcatcctggtgcagaagaagccgaagaatccggccggcctgaagaacaccctggagttcttccgctgggtctacagcaagggcgatgcgcaggccaaggcgctggactacgtgccgctgccggacacgctggtcagccagatcgaagcctactgggccaagaccctgccccgctaa

SEQ ID NO: 2706 - protein, 363 aa, Xanthomonas campestris pv. campestris str. ATCC 33913
MRRTPLPCNGVLRDVIPIATRSCSVISSIKSRLAVGVLAAALAMGAQAADVTGAGASFIYPVMSKWSADYNTATKKQVNYQSIGSGGGIAQIKAASVDFGSSDAPLKPEELAAAGLAQFPSVIGGVVPVINVPGIAAGAVKLDGKTLGDIFLGKVTTWNDAAIVALNPGVKLPDSKITVVHRSDGSGTSFNFTNYLSKVNPDWKSKVGEGTAVQWPTGIGGKGNEGVAAYVKQIKGGIGYVELSYALQNKMAYTAMKNAAGKFVQPSDETFAAAANSADWGSSKDFYLVMTNAAGDNAWPITATNFILVQKKPKNPAGLKNTLEFFRWVYSKGDAQAKALDYVPLPDTLVSQIEAYWAKTLPR

SEQ ID NO: 2707 - DNA, 1092 bp, Xanthomonas axonopodis pv. citri str. 306
  CDS (1)..(1092): transl_table=11
atgaaattgcagtcggccagcctgaccgccctgtccctcaccattgccctcgccctggccgcgtgctcgcccggcaaggacgcgcagtccgcagacgccgcaaagggcgcgccagccgcaggcgccgccgccagcgacagcaagggtgctgaaatttccggcgccggtgcttccttcatctatccgctggtgtccaagtggtcggccgactacaacgccgccaccggcaacaaggtcaactatcaatcgatcggctccggcggcggcattgcgcagatcaaggccggcacggtggatttcggttcgaccgacaagccactggacagcgccgaactgcaacaggctggcctggggcagttcccgtccgccatcggcggcgtggtgccggtggtgaatctggaaggcatcgcgccgggcaagctgcgcttgaccggcgccctgctgggcgacatcttcctgggcaaggtcacgatgtggaacgacgcggccattgtcgcggccaacccgggcgtgaccctgcccgccaccaagatcaacctggtgcatcgctcggatggttcgggcaccaccttcaacttctccaactacctgtccaaggtcagcccggagtggaagagcaaggtcggcgaaggcacctcggtgcagtggccgggtggcgtgggcggcaagggcaacgagggcgttgcgtcgtacgtgcagcagatcaagggctcgatcggctatgtcgagcttgcctacgctctgcagaacaagatgccgtacacctcgctgcagaacgcggccggccaatggatcgagccgaatgcggaaagctttgccgccgccgctgccagcgccgactgggccaacgcccgtgacttcaatctggtgatcaccaatgcgccgggcgagaaggcatggccgatcaccgcgaccaacttcatgttgatgcacaagcagcccaaggacgccgcgcgcagcaaggcgacgctggacttcttcaagtgggcgctggaaaacggccaggcccaggccagcgaattgcactacgtgccgctgccgccggagctggtgaagcagatcgaagcctactggggcagcgagttcaagtaa

SEQ ID NO: 2708 - protein, 363 aa, Xanthomonas axonopodis pv. citri str. 306
MKLQSASLTALSLTIALALAACSPGKDAQSADAAKGAPAAGAAASDSKGAEISGAGASFIYPLVSKWSADYNAATGNKVNYQSIGSGGGIAQIKAGTVDFGSTDKPLDSAELQQAGLGQFPSAIGGVVPVVNLEGIAPGKLRLTGALLGDIFLGKVTMWNDAAIVAANPGVTLPATKINLVHRSDGSGTTFNFSNYLSKVSPEWKSKVGEGTSVQWPGGVGGKGNEGVASYVQQIKGSIGYVELAYALQNKMPYTSLQNAAGQWIEPNAESFAAAAASADWANARDFNLVITNAPGEKAWPITATNFMLMHKQPKDAARSKATLDFFKWALENGQAQASELHYVPLPPELVKQIEAYWGSEFK

SEQ ID NO: 2709 - DNA, 1020 bp, Xanthomonas axonopodis pv. citri str. 306
  CDS (1)..(1020): transl_table=11
atgatccactccttcaagacccgtctggccgtcggcgtgctcgccgcttcgctggcactgtgcgcccaggctgccgacgtcaccggtgccggtgcgtcgttcatctacccggtgatgtccaagtggtcggccgactacaacgcggccaccaagaagcaggtcaactaccaatcgatcggttcgggcggcggcattgcccagatcaaggcggccagcgtggacttcggctcttccgatgccccgctcaagccggaagaactggccgctgccggcctggcgcagtttccctcggtgatcggcggcgtggtaccggtggtcaacgtgccgggcattgccgccggtacgctcaagttggacggcaagactctgggcgacatcttcctgggcaaggtcagcacctggaacgacccggccatcgccgcgctcaacccgggcgtgaaactgccggaaggcaagatcaccgtggtgcaccgctccgacggctcgggcaccagcttcaacttcaccaactacctctccaaggtcaacccggactggaagggcaaggtcggcgaaggcacggcggtgcagtggccgaccggcatcggcggcaagggcaacgagggcgtggctgcctacgtgaagcagatcaagggcggcatcggctatgtcgagctgtcgtacgcgctgcagaacaagatggcctacaccgcaatgaagaacgcggccggcaagttcgtgcagccgtcggatgaaaccttcgccgccgctgccaacagcgccgactggggcacggccaaggacttctatctggtgatgaccaacgcggccggcgataacgcctggccgatcacggcgaccaacttcatcctggtgcagaaaaagccgaagaatccggctggactgaagaacacgctggaattcttccgctgggtctacaccaagggcgatgcgcaggccaaacagttggactacgtgccgctgccggacacgctggtgacccagatcgaggcgtactgggccaagaatctgccgcactaa

SEQ ID NO: 2710 - protein, 339 aa, Xanthomonas axonopodis pv. citri str. 306
MIHSFKTRLAVGVLAASLALCAQAADVTGAGASFIYPVMSKWSADYNAATKKQVNYQSIGSGGGIAQIKAASVDFGSSDAPLKPEELAAAGLAQFPSVIGGVVPVVNVPGIAAGTLKLDGKTLGDIFLGKVSTWNDPAIAALNPGVKLPEGKITVVHRSDGSGTSFNFTNYLSKVNPDWKGKVGEGTAVQWPTGIGGKGNEGVAAYVKQIKGGIGYVELSYALQNKMAYTAMKNAAGKFVQPSDETFAAAANSADWGTAKDFYLVMTNAAGDNAWPITATNFILVQKKPKNPAGLKNTLEFFRWVYTKGDAQAKQLDYVPLPDTLVTQIEAYWAKNLPH

SEQ ID NO: 2711 - DNA, 1041 bp, Escherichia coli CFT073
  CDS (1)..(1041): transl_table=11
atgaaagttatgcgtaccaccgtcgcaactgttgtcgccgcgaccttatcgatgagcgctttctctgtgtttgcagaagcaagcctgacaggtgcaggtgcaaccttccctgcgccggtgtatgccaaatgggctgacacttaccagaaagaaaccggtaataaagttaactaccagggtatcggttcttctggtggtgtaaaacagatcatcgccaataccgttgattttggtgcttctgacgcgccgctgtctgacgaaaaactggctcaggaaggcctgttccagttcccgaccgtgattggcggcgtggtgctggcggttaatattccaggtctgaagtctggcgaactggtgctggatggtaaaaccctcggcgacatctacctgggcaaaatcaagaagtgggatgatgaagccatcgccaaactgaatccgggtctgaaactgccttcacagaacattgctgtagtacgccgcgcagatggctccgggacttccttcgtcttcaccagctacctggcgaaagtgaacgaagagtggaaaaacaacgttggtactggctctaccgtaaaatggccgatcggtctgggcggtaaaggtaacgacggtatcgccgcgttcgttcagcgtctgccgggtgcagttggttacgttgaatatgcttacgcgaagcagaacaacctggcgtacaccaaactgatctccgctgatggcaaaccggtgagtccgaccgaagaaaacttcgctaatgcagcaaaaggcgcagactggagcaaaacattcgctcaggatctgaccaaccagaaaggcgaagatgcatggcctattacctctaccacgttcattctgatccataaagatcagaagaaaccagaacaaggcactgaagtgctgaagttcttcgactgggcatacaaaaccggggctaaacaggcgaacgacctggattatgccagcctgccggatagcgtagttgaacaggttcgcgctgcgtggaagaccaatattaaagacagtagcggcaagccgctgtactaa

SEQ ID NO: 2712 - protein, 346 aa, Escherichia coli CFT073
MKVMRTTVATVVAATLSMSAFSVFAEASLTGAGATFPAPVYAKWADTYQKETGNKVNYQGIGSSGGVKQIIANTVDFGASDAPLSDEKLAQEGLFQFPTVIGGVVLAVNIPGLKSGELVLDGKTLGDIYLGKIKKWDDEAIAKLNPGLKLPSQNIAVVRRADGSGTSFVFTSYLAKVNEEWKNNVGTGSTVKWPIGLGGKGNDGIAAFVQRLPGAVGYVEYAYAKQNNLAYTKLISADGKPVSPTEENFANAAKGADWSKTFAQDLTNQKGEDAWPITSTTFILIHKDQKKPEQGTEVLKFFDWAYKTGAKQANDLDYASLPDSVVEQVRAAWKTNIKDSSGKPLY

SEQ ID NO: 2713 - DNA, 1026 bp, Bradyrhizobium japonicum USDA 110
  CDS (1)..(1026): transl_table=11
atggagaccagcatgaatttcctcaaaacgatcgtcgctgccggcttggtcgccgcatcgacgacggcggcctttgctgccgatatcaccggcgccggcgcgacgttcccgttcccgatctattccaagtgggccgacgcctacaagaaagagaccggcaacggtctgaactaccagtcgatcggctccggcggcggcatcaagcagatccaggccaagaccgtgaccttcggcgccagcgacgcgccgctcaaggccgagcagctcgagaaggacggcctcgtccagtggccgatggtgatgggtgccatcgttccggtcgtcaacatcgagggcgtgaagccgggcgagatggtgttcgacggcgagacgctcgccagcatctatctcggcaagatcaccaagtgggacgatgccgcgatcaagaagctcaatccgaacctgaagctgccctcggacgcgatcaccgtggttcgccgctcggacggttcgggcaccaccttcaacttcaccaactacctctccaaggccagcgcggactggaagagcaaggtcggcgagggcacggccgtcgagtggccggtcggcgtcggcgccaagggcaacgagggcgtgtccggcaacatcggccagaccaagaactcgatcggttacgtcgagtacgcctatgccaagcagaacaagctgacctacaccggtctcgtcaacaaggccggcaagccggtgcagccgaccgtcgaggccttccaggcggccgcctcgaacgccgactgggccaaggcgcccggctactacgtcatcctgaccgaccagcccggcgagaagtcctggccgatcacggcggcgaccttcatcctcatgcacaaggatgccaccgacaaggcagcctcgcaggaagccatcaagttcttccgctgggccttcaagaacggcggcaaggcggccgaagagctcgactacatcccgatgcccgagggcgtcgtgaccctgatcgagaagacctgggctgccgagatcaagagctaa

SEQ ID NO: 2714 - protein, 341 aa, Bradyrhizobium japonicum USDA 110
METSMNFLKTIVAAGLVAASTTAAFAADITGAGATFPFPIYSKWADAYKKETGNGLNYQSIGSGGGIKQIQAKTVTFGASDAPLKAEQLEKDGLVQWPMVMGAIVPVVNIEGVKPGEMVFDGETLASIYLGKITKWDDAAIKKLNPNLKLPSDAITVVRRSDGSGTTFNFTNYLSKASADWKSKVGEGTAVEWPVGVGAKGNEGVSGNIGQTKNSIGYVEYAYAKQNKLTYTGLVNKAGKPVQPTVEAFQAAASNADWAKAPGYYVILTDQPGEKSWPITAATFILMHKDATDKAASQEAIKFFRWAFKNGGKAAEELDYIPMPEGVVTLIEKTWAAEIKS

SEQ ID NO: 2715 - DNA, 1026 bp, Pseudomonas syringae pv. tomato str. DC3000
  CDS (1)..(1026): transl_table=11
atgatactgctgactaaaaaacgcttgtcgcttctgatcgcttcgctgtgcctcagcggtgtggcccacgcgactgacgtaaccggcgctggttcgagtttcgttttcccggttatttcggcgtggtcccaggactacagcaaaagcaacgattccaaaaatcgcatcaactaccagtccatcggttcgggcggtggtatcgctcagatcaaggcggctaccgttgacttcggcgcatccgatgccccgatgtccgctgaggacctgcaagccggtggcctgggtcagttcccgagcgtgatcggcggtatcgtgccgatcgtcaacgtcgaaggcgttgaaagcggtgagttgaaactggacggcgcattgcttgccaagatcttcatgggcgaagtcaagaagtggaacgaccctgcaatcgtcgctctgaacccaggcgtcaagctgcctgagaccgcgatcactgttgttcaccgttcggacggctcgggcactacctacaacttcaccaactacctgagcaaagtcagcccggagtggaacgagaagctgaagtttggttcgaccgtgcaatggcctgccggtgtgggcggtaaaggtaacgaaggtgtttctgcctacgtgaagcagatcaagggttcgatcggctacgtcgagtactcgtacgcggtcaccaacaagctgtcctacacccagttgaagaacgctgccggcaaattcatcaagccagacgccaaggcttttgctgctgctgccgactcggccaagtgggaagatgccaaggacttcaacctgatcatgaccaacgctccgggtgacaccgcgtggccaatcaccgctaccacctggatcatcatgtacaagaaagccaagaacgaagagaaaagcgctgctgctttcgacttcttcaaatggtccctggaaaacggccagcaacaggccgagaaactggactatgtcgctttgccgaaatcgctggttgatcgcgtagagaactactggaaaacggaattcaccaagtaa

SEQ ID NO: 2716 - protein, 341 aa, Pseudomonas syringae pv. tomato str. DC3000
MILLTKKRLSLLIASLCLSGVAHATDVTGAGSSFVFPVISAWSQDYSKSNDSKNRINYQSIGSGGGIAQIKAATVDFGASDAPMSAEDLQAGGLGQFPSVIGGIVPIVNVEGVESGELKLDGALLAKIFMGEVKKWNDPAIVALNPGVKLPETAITVVHRSDGSGTTYNFTNYLSKVSPEWNEKLKFGSTVQWPAGVGGKGNEGVSAYVKQIKGSIGYVEYSYAVTNKLSYTQLKNAAGKFIKPDAKAFAAAADSAKWEDAKDFNLIMTNAPGDTAWPITATTWIIMYKKAKNEEKSAAAFDFFKWSLENGQQQAEKLDYVALPKSLVDRVENYWKTEFTK

SEQ ID NO: 2717 - DNA, 1041 bp, Bordetella pertussis Tohama I
  CDS (1)..(1041): transl_table=11
atgttcaaacgtgtcttcaaacagatttcgatcggcgccgcgctgagcgcagccgttttcgccgcccaggccgccgatgtgaccggcgcgggcgcgtcgttcccgtaccccatctacgccaagtgggcctccgactacaaggctgccaccaacaacgccgtcaactaccagtccatcggttcgggcggcggccagcagcagatcaaggccaagacggtcgacttcggcgcctcggatgacccgctcaaggccgaagacctggaaaagaatggcctgctgcagttcccggccgtgatcggcggcaccgtgccggtgatcaacatcgacggcatcgcgccgggccagctgaagctgtcgggcgccgtgctggccgacatcttcctgggcaaggtcaagaagtgggacgacgccgccatcaaggcgctcaaccccgacctgaagctgccctcggccgacatcgtggtggtgcaccgttcggacggttcgggcacgaccttcggctggaccaactacctgtcgaaagtgtcgtccgcctggaaagagcaagtgggcgagggcaaggccgtcaagtggcccaccggccagggcggcaagggcaacgaaggcgtggccgcctacgtgggccagctgaagaactcgatcggttatgtcgagtacgcctacgccaagcagaacaagctggcctggacgcagctgcagaacaaggacggcaagttcgtccagcccgagcagaaggcgttcgccgccgccgccgccaatgccgactggaagagcgcgcccggcatgggcgtggtgctgaccaacgagccgggcgccgattcgtggcccgtgaccgccgctaccttcatcctggtgcacaagagccaggacaagccggtccagggccgcgcggtgctggagttcttcgactgggcgttcaagaacggcgccaagtcggccgaagcgctggactacgtgccgctgcccgaggccgtgaccacggaaatccgcgccgcctggggtgaagtcaagggcgccgacggcaaggccgtgtggcagtaa

SEQ ID NO: 2718 - protein, 346 aa, Bordetella pertussis Tohama I
MFKRVFKQISIGAALSAAVFAAQAADVTGAGASFPYPIYAKWASDYKAATNNAVNYQSIGSGGGQQQIKAKTVDFGASDDPLKAEDLEKNGLLQFPAVIGGTVPVINIDGIAPGQLKLSGAVLADIFLGKVKKWDDAAIKALNPDLKLPSADIVVVHRSDGSGTTFGWTNYLSKVSSAWKEQVGEGKAVKWPTGQGGKGNEGVAAYVGQLKNSIGYVEYAYAKQNKLAWTQLQNKDGKFVQPEQKAFAAAAANADWKSAPGMGVVLTNEPGADSWPVTAATFILVHKSQDKPVQGRAVLEFFDWAFKNGAKSAEALDYVPLPEAVTTEIRAAWGEVKGADGKAVWQ

SEQ ID NO: 2719 - DNA, 1041 bp, Bordetella parapertussis 12822
  CDS (1)..(1041): transl_table=11
atgttcaaacgtgtcttcaaacagatttcgatcggcgccgcgctgagcgcagccgttttcgccgcccaggccgccgatgtgaccggcgcgggcgcgtcgttcccgtaccccatctacgccaagtgggcctccgactacaaggctgccaccaacaacgccgtcaactaccagtccatcggttcgggcggcggccagcagcagatcaaggccaagacggtcgacttcggcgcctcggatgacccgctcaaggccgaagacctggaaaagaacggcctgttgcagttcccggccgtgatcggcggcaccgtgccggtgatcaacgtcgacggcatcgcgccgggccagctgaagctgtcgggcgccgtgctggccgacatcttcctgggcaaggtcaagaagtgggacgacgccgccatcaaggcgctcaaccccgacctgaagctgccctcggccgacatcgtggtggtgcaccgttcggacggttcgggcacgaccttcggctggaccaactacctgtcgaaagtgtcgcccgcctggaaagagcaagtgggcgagggcaaggccgtcaagtggcccaccggccagggcggcaagggcaacgaaggcgttgccgcctacgtgggccagctgaagaactcgatcggttatgtcgagtacgcctacgccaagcagaacaagctggcctggacgcagctgcagaacaaggacggcaagttcgtccagcccgagcagaaggcgttcgccgccgctgccgccaatgccgactggaagagcgcgcccggcatgggcgtggtgctgaccaacgagccgggcgccgattcgtggcccgtgaccgccgccaccttcatcctggtgcacaagagccaggacaagccggttcagggccgcgcggtgctggagttcttcgactgggcgttcaagaacggcgccaagtcggccgaagcgctggactacgtgccgctgcccgaggccgtgaccacggaaatccgcgccgcctggggtgaagtcaagggcgccgacggcaaggccgtgtggcagtaa

SEQ ID NO: 2720 - protein, 346 aa, Bordetella parapertussis 12822
MFKRVFKQISIGAALSAAVFAAQAADVTGAGASFPYPIYAKWASDYKAATNNAVNYQSIGSGGGQQQIKAKTVDFGASDDPLKAEDLEKNGLLQFPAVIGGTVPVINVDGIAPGQLKLSGAVLADIFLGKVKKWDDAAIKALNPDLKLPSADIVVVHRSDGSGTTFGWTNYLSKVSPAWKEQVGEGKAVKWPTGQGGKGNEGVAAYVGQLKNSIGYVEYAYAKQNKLAWTQLQNKDGKFVQPEQKAFAAAAANADWKSAPGMGVVLTNEPGADSWPVTAATFILVHKSQDKPVQGRAVLEFFDWAFKNGAKSAEALDYVPLPEAVTTEIRAAWGEVKGADGKAVWQ

SEQ ID NO: 2721 - DNA, 1038 bp, Chromobacterium violaceum ATCC 12472
  CDS (1)..(1038): transl_table=11
atgaaacagtctgttcgtctggccgccatcctgggttccacgctgatcgcaggctcggtctacgcggctgacatcaccggcgccggcgcgaccttcccctacccgctgtacgccaagtgggcggcgacgtacaagggcagcaccggcaacaacatgaactaccagtccattggctccggcggcggcatcaagcagatccagtccaagaccgtggatttcggcgcctccgacatgccgctgaagccggaagagctggaaaaggccggcctgacccagttcccgaccgtgatgggcggcgtggtgccggtgtacaacatcccgggcatcgccgccggccagatcaagttcaccggcccgctgctggccgacatctacatgggcaaggtttccaaatggaacgacgccgccatcgccaagctgaacccgggcgtcaagctgcctgaccagcgcatctcggtggtgcgccgctccgacggctccggcaccaccttcatcttcaccaattacctgtccaaggtttcgccggaatgggcgaaagacgtcggctccaacaccgccgtcagctggaagggcagctcggtcggcggcaagggcaacgaaggcgtggccaactacgtgtcgcgcatcaagggcgccatcggctacgtcgaatacgcctacgccaagcagaacaagctggcctacggcctgctgcagaaccaggccggcgctttcgtgaagccggatgaggcctcgttcaaggccgccgcggccaacgccgactggaaaaaggccccgggcttctacctgctgctgaccaaccagccgggcaaggccagctggccgatcgccggcgccaccttcatcctgatgcacaagaagcaggacaagccggcccaagccgccgaagtgctgaaatacttcgactgggcttacaagaacggcgacaagaccgcgcaggagctggactacattccgatgcccgacaatgtgaagggcgtgatccgcaccagctggaaacagatcaccgacggcagcggcaaggctgtctggaactga

SEQ ID NO: 2722 - protein, 345 aa, Chromobacterium violaceum ATCC 12472
MKQSVRLAAILGSTLIAGSVYAADITGAGATFPYPLYAKWAATYKGSTGNNMNYQSIGSGGGIKQIQSKTVDFGASDMPLKPEELEKAGLTQFPTVMGGVVPVYNIPGIAAGQIKFTGPLLADIYMGKVSKWNDAAIAKLNPGVKLPDQRISVVRRSDGSGTTFIFTNYLSKVSPEWAKDVGSNTAVSWKGSSVGGKGNEGVANYVSRIKGAIGYVEYAYAKQNKLAYGLLQNQAGAFVKPDEASFKAAAANADWKKAPGFYLLLTNQPGKASWPIAGATFILMHKKQDKPAQAAEVLKYFDWAYKNGDKTAQELDYIPMPDNVKGVIRTSWKQITDGSGKAVWN

SEQ ID NO: 2723 - DNA, 1044 bp, Gloeobacter violaceus PCC 7421
  CDS (1)..(1044): transl_table=11
atgcagaccaacaagtggacccgcagggcttttgtttcggtagtggctctggcttcactcgcttctcccctgttgacgcaggtcgcccacgccctgaccctcagcggcgccggcgcaacgttcccgcagccactctatgaaaagtggttcttcgagtacaacaagaagaaccccgatgtcaaaatcaactaccagggcatcggcagcggcggcggcatcaaccagatcaccaacaagacggttgatttcggcgcttccgacgcggcaatgaacgacgagcagctcgccaaggtcggcggctcctcgaagatgctgatgctgcccatgaccgccggtgcagtggctatcacctttaacgtgcccggtgtgaagtcgggtttgcggatcacccgcgtggctttgaccgatatttttctgggcaaggtcaccaagtggaacgacccggccatcgcctcggtcaaccgcgacgtcaagctgccggatttgcccatcgccgtggtgcgccgctccgacagctccggtacgacctttatcttcaccaaccacctgtcggcgatcaaatcctcggattggtccgagaaagtcggcaagggcacctcggtgaactggcccaccggcatcggcgccaagggcaaccagggcgtctccgcccaggtccagcagactcccggtgcgattggctatgtcgagtacgcctacgccaccgagaacaacctgccggtggccgcggtcgaaaaccgcgaaggcaagttcgtgctgccgacggtcaaggcgaccgagaccgccctcgacgggaccaagtaccccgaaaatttccgcgtcttcatcgaagatccggacggggccggttcctatccgatcgtgggcctcacctggctgctggtgtacaaagaaggcaacgacaaggccaaggccgctgaactgaagaagttcgtcaactgggccttgaccgaggggcaacagtacgtcgagcccctcaagtacaccccgctgcctgccgccgtctccaaaaacgtgatcaaggcggccgagcagatcaagtaa

SEQ ID NO: 2724 - protein, 347 aa, Gloeobacter violaceus PCC 7421
MQTNKWTRRAFVSVVALASLASPLLTQVAHALTLSGAGATFPQPLYEKWFFEYNKKNPDVKINYQGIGSGGGINQITNKTVDFGASDAAMNDEQLAKVGGSSKMLMLPMTAGAVAITFNVPGVKSGLRITRVALTDIFLGKVTKWNDPAIASVNRDVKLPDLPIAVVRRSDSSGTTFIFTNHLSAIKSSDWSEKVGKGTSVNWPTGIGAKGNQGVSAQVQQTPGAIGYVEYAYATENNLPVAAVENREGKFVLPTVKATETALDGTKYPENFRVFIEDPDGAGSYPIVGLTWLLVYKEGNDKAKAAELKKFVNWALTEGQQYVEPLKYTPLPAAVSKNVIKAAEQIK

SEQ ID NO: 2725 - DNA, 1050 bp, Gloeobacter violaceus PCC 7421
  CDS (1)..(1050): transl_table=11
atgctgggagcaaaccttttgttgtcccagtgccagtcttccccaccggagggtcccagtgccaccgcccctagccccggcggcgcaccggccggtgcggtgaccctctccggcgccggggccaccttcccggcaccgctctatcagcggtggttctacgattatggccaggccaacccgaacgtcaaagtcagctaccagggcgtgggcagcggcgccggcatcaagcagtttcaaagcaaaaccgtcgattttgccgcgagcgacgtggcaatgagcgacgaggagattgccgcggtgccggcggatcgaggcgtggtgctattgccgatgaccgccggtagcgtcgtgctcatctacaacgtaccgggtgcgccggagaatcttaaactctcccgcgccgtctacagcgatatgttcctgggcaagattaaaaactggaacgacccgaagattgccgcactcaacccgggtgtcaaactgccggatctggccgccacggtggtgcgccgcgccgacggcagcggcacgaccggcgtgttcactcgccacctgagtgccgtcagccccgagtggaaaacgaaagtcggcgaaggcatcgccgtcaaatggcccacgggtgtaggcggcaagggcaacgacggtgtgacggctcaggtccagcagaaccccggctcgatcggctacgtggaatacggctacgccaccaacaacaagttgccctacgcttcgcttgaaaacaaagagggcaactatgtcctgccgacgctggaaaattccgccgcggccctcgcctcggtagagttgccgcccaacctgcgcgcttttatcgccgatccgcccggtaaggattcgtatccactggtcacttacacctggatcctcgcacccaagacaatggacacccccgaaaaggcgacggctttgaaggaagttctcaagtggtgcctcaccgaagggcaaaagtcgagcgaatccctcggatacattgaactgcccaaaccggttaccgagcgcgtcctggcggctgtcgagcaaattggcagctaa

SEQ ID NO: 2726 - protein, 349 aa, Gloeobacter violaceus PCC 7421
MLGANLLLSQCQSSPPEGPSATAPSPGGAPAGAVTLSGAGATFPAPLYQRWFYDYGQANPNVKVSYQGVGSGAGIKQFQSKTVDFAASDVAMSDEEIAAVPADRGVVLLPMTAGSVVLIYNVPGAPENLKLSRAVYSDMFLGKIKNWNDPKIAALNPGVKLPDLAATVVRRADGSGTTGVFTRHLSAVSPEWKTKVGEGIAVKWPTGVGGKGNDGVTAQVQQNPGSIGYVEYGYATNNKLPYASLENKEGNYVLPTLENSAAALASVELPPNLRAFIADPPGKDSYPLVTYTWILAPKTMDTPEKATALKEVLKWCLTEGQKSSESLGYIELPKPVTERVLAAVEQIGS

SEQ ID NO: 2727 - DNA, 1041 bp, Photorhabdus luminescens subsp. laumondii TTO1
  CDS (1)..(1041): transl_table=11
atgaaactgatgcgtaccaccgtaaccggcataatggcagcggcgttttctttgacaaccctgcctgtatttgctgccactagtttaaccggggcaggtgcgacatttcccgcaccggtgtatgccaagtgggcggattcttatcaaaaagagacaggtaataaagtcaattatcaaggcatcggttcttccggtggcgtaaaacaaattctggcaaataccgttgatttcggggcttccgatgcccctttatctgatgaaaagttagctgctgatggtttgtttcaattcccgaccgtcatcggtggggtggtactggcggttaatatcccggggattaaatctggtgaattgacattggatggtaaaactttaggcgatatttacttaggtaaagtgaaaaagtggaatgatccagcaattactcaattgaatccgggagtcaaactgccggaacaagatattgctgtgatacgtcgtgctgacggttccggtacttcctttgtatttactcgctacctctctaaagtgaataaagcgtggcaagaaaaagttggcgtgggttccaccgtaagctggcctattggtttgggtggtaaaggtaatgatgggattgccgcatttgttcaacgtctgacgggttccattggttatgttgaatatgcttacgctaaacagaatcatctggcttataccaaattggtatctgctaatggcaacattgttagcccgacagaagagagtttcagtgccgcagcgaagaaagcagaatggcataaaacgtttgctcaggatttgacaaaccagcaaggtgaaaatgtgtggccgatgacttccactacatttgttctggttcatcaacagcaaaaagatgcagtgaaaggggcagaaatattgaaattctttgactgggcttatgagaaaggcagtaaacaggcaaacgatctggattatgcaactctgcctaaagaggtgattgagcaagttcgtgcggcttggaaaacccagataaaagatagcaatggcaaggccctgtattaa

SEQ ID NO: 2728 - protein, 346 aa, Photorhabdus luminescens subsp. laumondii TTO1
MKLMRTTVTGIMAAAFSLTTLPVFAATSLTGAGATFPAPVYAKWADSYQKETGNKVNYQGIGSSGGVKQILANTVDFGASDAPLSDEKLAADGLFQFPTVIGGVVLAVNIPGIKSGELTLDGKTLGDIYLGKVKKWNDPAITQLNPGVKLPEQDIAVIRRADGSGTSFVFTRYLSKVNKAWQEKVGVGSTVSWPIGLGGKGNDGIAAFVQRLTGSIGYVEYAYAKQNHLAYTKLVSANGNIVSPTEESFSAAAKKAEWHKTFAQDLTNQQGENVWPMTSTTFVLVHQQQKDAVKGAEILKFFDWAYEKGSKQANDLDYATLPKEVIEQVRAAWKTQIKDSNGKALY

SEQ ID NO: 2729 - DNA, 1011 bp, Rhodopseudomonas palustris CGA009
  CDS (1)..(1011): transl_table=11
atgaatttcatcaaggcaatcgtcgcggccggtatggttgcggcgtcgacctcggccttcgccgccgacatcacgggcgctggcgccactttcccgtacccggtctactcgaagtgggcggacacctataagaaggacaccggcaacggtctgaactaccagtcgatcggttcgggcgccggcatcaagcagatcattgccaagaccgtgacgttcggcgcaaccgacgcgccgttgaagccggagcagctcgagaaggaaggcctggtgcagtggccgatggtgatgggcgccatcgtgccggtcgtgaacctcgaaggcgtgaagccgggtgagatggtgctcgacggcgagaccctggccaacatctacatcggcaagatcaccaagtgggacgacccggcgatcaagaagctgaacccgaaggtcagcctgccgggcgacgcgatcaccgtggttcgccgctccgacggttcgggcaccaccttcaacttcaccgactacctgtccaaggtcagcgctgactggaagaccaaggttggttcgggcaccgcggtcgagtggccggtcggcgtcggcgccaagggcaacgaaggcgtcgccggcaacgtcggtcagaccaagaattcgatcggctacgtcgaatacgcctacgccaagcagaacaagctgacctacaccggcctggtgaacagcgctggcaagaccgttcagccgacgattgcggccttccaggctgccgcggcgaatgccgattgggccaaggctccgggctactacctgatcctgaccaaccagccgggcgaagcctcgtggccgatcaccgccgcgaccttcatcctgatgcacaaggagccggtcgacaaggcggcttccggcgaagccgtgaagttcttcaagtgggcgttcgagaagggcggcaaggctgccgaagagctcgactacatcccgatgccggaaccggtcgtcaagctgatcgagaagacctgggccgcggacatcaagagctga

SEQ ID NO: 2730 - protein, 336 aa, Rhodopseudomonas palustris CGA009
MNFIKAIVAAGMVAASTSAFAADITGAGATFPYPVYSKWADTYKKDTGNGLNYQSIGSGAGIKQIIAKTVTFGATDAPLKPEQLEKEGLVQWPMVMGAIVPVVNLEGVKPGEMVLDGETLANIYIGKITKWDDPAIKKLNPKVSLPGDAITVVRRSDGSGTTFNFTDYLSKVSADWKTKVGSGTAVEWPVGVGAKGNEGVAGNVGQTKNSIGYVEYAYAKQNKLTYTGLVNSAGKTVQPTIAAFQAAAANADWAKAPGYYLILTNQPGEASWPITAATFILMHKEPVDKAASGEAVKFFKWAFEKGGKAAEELDYIPMPEPVVKLIEKTWAADIKS

SEQ ID NO: 2731 - DNA, 1041 bp, Yersinia enterocolitica subsp. enterocolitica 8081
  CDS (1)..(1041): transl_table=11
atgaaactgatgcgtaccaccgtagccagcattgtggcagcgactttatctatgaccactgtgtccgcgttcgctgctgctagcctgacaggtgcaggtgcgacattccccgcgccggtgtatgccaagtgggcagattcttatcagaaagaaacaggtaacaaagttaactatcaggggatcggttcttcaggcggcgtgaaacaaatcattgctaatactgtagatttcggtgcttctgatgcgccattagcagacgacaaactggctgctgaaggtttgttccaattcccgacagtgattggcggtgtggtgttggccgtgaatatccctggcattaaatccggtgaactgacattagacggtaaaacactgggtgatatctatctgggtaatgtgaaaaagtggaatgacccggctatcactaagttgaacccaggcgttaaattgccagatcaaaatatcgctgtggtgcgccgcgctgacggttccggtacctcatttgtattcaccagctacctggctaaagtgaatgcggaatggaaagaaaaagtaggtgctggttcgactgttaactggccgaccggtttgggtggcaaaggtaatgacggtatcgccgcctttgtacagcgcttacctggctccattggctatgtagaatatgcttacgccaaacagaataacctggcttacaccaaactggtttctgctgatggcaaacaggttagtccgactgagcacagctttagctctgcggcaaaaggtgtagactggagcaaaacattcgctcaagatttaaccaatcaaaaaggtgatgatgtatggccaattacatcaacaactttcatcttggtacataaagagcaaaaaaatgccgctaacggcgctgaagtattgaagttctttgactggggttacacccacggtgctaaacaagccaacgagctggattatgcaacattgccagctgaagttgtcgagcaagtccgtgctgcctggaaaactcagattaaagacagcagcggtaagccaatcttctga

SEQ ID NO: 2732 - protein, 346 aa, Yersinia enterocolitica subsp. enterocolitica 8081
MKLMRTTVASIVAATLSMTTVSAFAAASLTGAGATFPAPVYAKWADSYQKETGNKVNYQGIGSSGGVKQIIANTVDFGASDAPLADDKLAAEGLFQFPTVIGGVVLAVNIPGIKSGELTLDGKTLGDIYLGNVKKWNDPAITKLNPGVKLPDQNIAVVRRADGSGTSFVFTSYLAKVNAEWKEKVGAGSTVNWPTGLGGKGNDGIAAFVQRLPGSIGYVEYAYAKQNNLAYTKLVSADGKQVSPTEHSFSSAAKGVDWSKTFAQDLTNQKGDDVWPITSTTFILVHKEQKNAANGAEVLKFFDWGYTHGAKQANELDYATLPAEVVEQVRAAWKTQIKDSSGKPIF

SEQ ID NO: 2733 - DNA, 1044 bp, Actinobacillus pleuropneumoniae L20
  CDS (1)..(1044): transl_table=11
atgttattggtaaaaacagctaaaaaattcgttgttatcggactttcattaggcgtaatggcatcaagttatgctgaaacgattaccggtgcaggcgcttcattcccctatccgatttatgcgaaatgggcttcactttatgaaaaagaaacgggtaataaagtgaattatcaatctatcggttccggcggaggtcagcaacaaattatcgcaaaaacgattgatttcggtgcgtcggacgatccgatgaaagcggaattattggatcaacacaaattattacaattcccggcaattatcggcggtacggtaccggtggtgaacttaccggaatttaaagcgggtgaattaaaattatccggtacggtattggcggatattttcctcggtaaaattactaaatggaatgacccggcgattaaagcgttaaacgcatcgttaaatttaccggataaaagtattgtcgttgtacgtcgttcggacggttcgggtacaacattcggttggactaactatttatcgaaagtgtcgctggaatggaaagaaaaagtcggtgaaggtaaatcggttaaatggcctaccggtcaaggcggtaaaggtaatgaaggcgtagccgcttatgtgaaacaacttaaatattccatcggttatgtcgaatatgcttatgcgaaacaaaataacttagcttgggcttcgttacaaaaccaagcgggtaaatttgtacaaccgtcacgcgaaagttttatggcggcggctgcaaatgcgcagtgggataaagcgaaaggtatgggcattatgcttaccaatgaaagcggcgataattcatggcctgtgacggcggcaagtttcatccttgttcaccaacaggcggataatccgaccgcaaccaaagcggtgtttgacttcttcgattgggcttttgaaaaaggtaaaaatgcggcgtcggagttagattatgtgccgttaccggatgaagtcgtaacgaaaatcaaacaaaaatggcaaaacgaagtaaaagataaagacggtaaagcggttcgctaa

SEQ ID NO: 2734 - protein, 347 aa, Actinobacillus pleuropneumoniae L20
MLLVKTAKKFVVIGLSLGVMASSYAETITGAGASFPYPIYAKWASLYEKETGNKVNYQSIGSGGGQQQIIAKTIDFGASDDPMKAELLDQHKLLQFPAIIGGTVPVVNLPEFKAGELKLSGTVLADIFLGKITKWNDPAIKALNASLNLPDKSIVVVRRSDGSGTTFGWTNYLSKVSLEWKEKVGEGKSVKWPTGQGGKGNEGVAAYVKQLKYSIGYVEYAYAKQNNLAWASLQNQAGKFVQPSRESFMAAAANAQWDKAKGMGIMLTNESGDNSWPVTAASFILVHQQADNPTATKAVFDFFDWAFEKGKNAASELDYVPLPDEVVTKIKQKWQNEVKDKDGKAVR

SEQ ID NO: 2735 - DNA, 996 bp, Prochlorococcus marinus str. MIT 9301
  CDS (1)..(996): transl_table=11
atgacatccatgaacattgctaagaaagctttggttttcacttctgcagtagccattgctgctggtacaagtgttcctggcataagtgtttctgctagaacaagattaagtggtgctggggcatcattccctgccaaaatttacactcgttggttcaaagatttagcctcttcaggtggaccaagagtaaactatcaagctgttggttcaggctctggaagaaaagcttttattgatcagacagtaaactttggtgcttctgatgatcctatgaaggataaagatatagcaaaggtaacaagaggattagtacagattcctatggttggaggaactattgcttttggttataactatgattgtgatttgaaactttcccaagagaaagcagtacaagttgctatgggtatggttaaaaactggaaagaattaggctgtaaacctggtaaattaacttgggcacatcgttctgacggatcaggcacaaccaaagcttttactaactctatggaagctttttcaaaaacctggacattaggcactggtaagtctgttaagtggccagcaggcgttggagcaaaaggtaattctggtgttgcaggtgtaattcaaaacactccaggcgcaattggttatgtaaatcagtcatatattaaaggtaatgtgaaagctgctgcacttcagaacctttctggagaatatgtaaagcctacagttgaggcaggagctaaagctctcaatggtattactttagatgaaaatctcgctggtaaaaatcctaatccaacagcaaaaggagcatatcctatagcttcattgacatggatacttgcctatgaagaaggtaatggtagaaacactaaagctatcaaacaagcctttaatacattattaagtgatgagtatcaagataaagctccatcacttggatttgttcctttgaaaggcgatattcttgagaaatcaagagctgctgtaaaaagaatcggtaaataa

SEQ ID NO: 2736 - protein, 331 aa, Prochlorococcus marinus str. MIT 9301
MTSMNIAKKALVFTSAVAIAAGTSVPGISVSARTRLSGAGASFPAKIYTRWFKDLASSGGPRVNYQAVGSGSGRKAFIDQTVNFGASDDPMKDKDIAKVTRGLVQIPMVGGTIAFGYNYDCDLKLSQEKAVQVAMGMVKNWKELGCKPGKLTWAHRSDGSGTTKAFTNSMEAFSKTWTLGTGKSVKWPAGVGAKGNSGVAGVIQNTPGAIGYVNQSYIKGNVKAAALQNLSGEYVKPTVEAGAKALNGITLDENLAGKNPNPTAKGAYPIASLTWILAYEEGNGRNTKAIKQAFNTLLSDEYQDKAPSLGFVPLKGDILEKSRAAVKRIGK

SEQ ID NO: 2737 - DNA, 1044 bp, Herminiimonas arsenicoxydans
  CDS (1)..(1044): transl_table=11
atgcgattgaatcaatttgtcaaaaccgctgtagtggctgcaggtgcagcagtggcgttttcttccgcagtggccgccgatattaccggtgccggtgcgaccttcccttacccgattttttcaaaatgggctgaagcttacaaaacagcaactggtaccggcatgaactatcaatccatcggttccggcggcggtatcaagcaaatcaaggcaaaaactgtcgatttcggtgcttccgacatgccattgaaggcagaagagctggaaaccgaaggcttgatacaattcccggcgatcatgggtggcgttgtgcctatcgtgaacgtggacggcgttgcgccaggtcaattgaaactgacttcggatgtcattgctggcatttacctcggcaagatcaccaaatggaacgatccgcaactgaccgcattgaatccagccgcaaaactgcctaatgcagacattactgttgttcatcgttcggatggatcgggcacaactttcctgtggactgactatctgtcgcaaaccaatgccgaattcaaatcgacagtcggtgctggcactgcagtcaaatggccagctggcgtaggcggtaaaggcaacgaaggtgttgcagccaacgtgcaacgtatcaaaggttcgattggctatgtggaatacgcatacgccaagaaaaacaaaatgtcccacacccagttgaaaaaccgtgatggtcaatttgtgcaaccagaagacgacagcttcaaggctgccgctgcaggcgcagactgggctaaagctccaggcatgggtttggtcctgaccaaccaaaagggtaaagacagctggcctatcactggtgtgtctttcatcctgatgcacaaatcgcaagcttcggccgaacgcggtaaagaagtgttgaagttcttcgactgggcttataaaaacggtggcgcaatggcaaccgagctcgattatgtcggcatgccagcatcggtagtaaaaatggtgcaagacagctggaaagcaaatgtgaaagacgcttccggtaaagctgtttggtaa

SEQ ID NO: 2738 - protein, 347 aa, Herminiimonas arsenicoxydans
MRLNQFVKTAVVAAGAAVAFSSAVAADITGAGATFPYPIFSKWAEAYKTATGTGMNYQSIGSGGGIKQIKAKTVDFGASDMPLKAEELETEGLIQFPAIMGGVVPIVNVDGVAPGQLKLTSDVIAGIYLGKITKWNDPQLTALNPAAKLPNADITVVHRSDGSGTTFLWTDYLSQTNAEFKSTVGAGTAVKWPAGVGGKGNEGVAANVQRIKGSIGYVEYAYAKKNKMSHTQLKNRDGQFVQPEDDSFKAAAAGADWAKAPGMGLVLTNQKGKDSWPITGVSFILMHKSQASAERGKEVLKFFDWAYKNGGAMATELDYVGMPASVVKMVQDSWKANVKDASGKAVW

SEQ ID NO: 2739 - DNA, 1026 bp, Burkholderia vietnamiensis G4
  CDS (1)..(1026): transl_table=11
atgcaaaccgcgattgctggcctggctggcgcacttttcgcagttgctgcgcacgctgccgacatcacgggcgcaggcagcacgttcgctatgccgatctatacgaaatgggctgccgactaccagcagtcgggcggcgcgaaggtgaactaccaaggtatcggctcgtcgggcggcctgaagcagatcatcgcgaagacggtcgattttgccggctcggacgctccgctgaaggatgaggacctcgcgaaggacggcctgttccagttcccgacggtggtcggcggcgtggtgccggtcgtcaacgtgccgggcgtgaaggccggcgaactgacgctgtcgggcccggtgctcggcgacatctacctcggcaagatcaagaagtggaacgacccggcgatcgccgcgctgaacccgaaggtcaagctgccggatacggacatcgcggtcgtgcgccgcgccgacggctcgggcacgagcttcatctggacgaactacctgtcgaaggtcaacgatgagtggaagtcgaagatcggcgaaggcacgacggtcaactggccgacgggcacgggcggcaagggtaacgacggcgtcgcggcgttcgtgcagcgcctgccgggcgcgatcggctacgtcgaatgggcgtacgcgaagaagaacaacatgatctacaccgccctgaagaactcgacgggcacggtggtcgagccgaagacggaaacgttcaaggccgctgcagccggcgcgaactggtcgaagtcgttctaccagatcctgacgaaccagccgggcaaggaagcatggccggtcgtcggcgcgacgttcgtgctgctgcacgcgaagcaggacaagccggagcagggcgccgaaacgctgaagttcttcagctgggcgttcaagaacggcgagaaggcagcggacagcctcgactacatctcgctgccgccggcagtcgaagcggaaatccgcaagcagtggaagaccaaggtgacggacgcagcgggcaagccggtcgccaccgagtaa

SEQ ID NO: 2740 - protein, 341 aa, Burkholderia vietnamiensis G4
MQTAIAGLAGALFAVAAHAADITGAGSTFAMPIYTKWAADYQQSGGAKVNYQGIGSSGGLKQIIAKTVDFAGSDAPLKDEDLAKDGLFQFPTVVGGVVPVVNVPGVKAGELTLSGPVLGDIYLGKIKKWNDPAIAALNPKVKLPDTDIAVVRRADGSGTSFIWTNYLSKVNDEWKSKIGEGTTVNWPTGTGGKGNDGVAAFVQRLPGAIGYVEWAYAKKNNMIYTALKNSTGTVVEPKTETFKAAAAGANWSKSFYQILTNQPGKEAWPVVGATFVLLHAKQDKPEQGAETLKFFSWAFKNGEKAADSLDYISLPPAVEAEIRKQWKTKVTDAAGKPVATE

SEQ ID NO: 2741 - DNA, 1023 bp, Polynucleobacter necessarius subsp. asymbioticus QLW-P1DMWA-1
  CDS (1)..(1023): transl_table=11
atgaaatcttttttgaaaaaagccctgattattggcgctatttcacttgctcctaccgcatttgctgtagaaatgactggtgctggatcctcttttatttatccagtattaagtaagtgggctgaatcatataaagctaaaagcggtgacagcctgaattaccagtccataggttctggaggcggtattaaacagattaaagctaaaacagttgattttggtgctactgatgcaccattaagttttgaagacttacaaagtaatggcatggttcagtttccagcaattattggcggcgtagttccagttgttaacatcgaaggtattggcccaaaccagttgaagctctctggtgaccttttgtcagatattttccaaggttctgtaacagactggagcgacaaacgcgtagctctcctaaatccaggcatgaagatcccatctggtccgatcacagttgtaactcgtgcagacggatctggtactactgcaatttttactagcttcctttctaaagcaagtagcaactttaaagatgcggttggctttggtgcgcaagttaaatggcctgcagcttctactgtaagtggcaaaggaaacgaaggcgttgcggctaacgttgcacgcatcaagaactcaattggttatgttgagtatgcttatgctaaaaagaataacctgagctatacacaggttcgcaatgctgatggcgtaatagtatctccaactgcagaagctttcgctgccgcctctgccggtacagactggtctaaatttcctggaatgaatacttttattacatatgctaaaggtgctaaagcatggccaattacaggcgcaactttcgttgtagtttataaaaagccagaaaataaatctcaagctgcagcagtattgaaattctttgattattcattcaaagatggtaagaaagccgcctcagacttagattacgtcccaatgcctgacgcaaccgtagattacattcggaagcaagtttggtcacaagttgagactaaataa

SEQ ID NO: 2742 - protein, 340 aa, Polynucleobacter necessarius subsp. asymbioticus QLW-P1DMWA-1
MKSFLKKALIIGAISLAPTAFAVEMTGAGSSFIYPVLSKWAESYKAKSGDSLNYQSIGSGGGIKQIKAKTVDFGATDAPLSFEDLQSNGMVQFPAIIGGVVPVVNIEGIGPNQLKLSGDLLSDIFQGSVTDWSDKRVALLNPGMKIPSGPITVVTRADGSGTTAIFTSFLSKASSNFKDAVGFGAQVKWPAASTVSGKGNEGVAANVARIKNSIGYVEYAYAKKNNLSYTQVRNADGVIVSPTAEAFAAASAGTDWSKFPGMNTFITYAKGAKAWPITGATFVVVYKKPENKSQAAAVLKFFDYSFKDGKKAASDLDYVPMPDATVDYIRKQVWSQVETK

SEQ ID NO: 2743 - DNA, 1041 bp, Enterobacter sp. 638
  CDS (1)..(1041): transl_table=11
atgaaagttatgcgtaccactgtcgcaactgttgtcgccgcgaccttatctatgagcgcgttctctgtattcgcagaagcaagcctgactggcgctggtgcaactttccctgcgccggtgtatgccaaatgggcagatacctataataaagaaaccggtaacaaggtgaactatcagggtatcggctcctccggtggcgttaaacaaattacggctaataccgtcgatttcggtgcatctgatgcgccattgtccgatgacaaactggctcaggaaggtctgttccagttcccaaccgtcatcggtggtgttgtgttggctgtgaatatcccgggcctgaaatctggcgaactggtgctggatggcaaaaccctcggtgatatctacctcggcaaaatcaaaaaatgggatgacgaagccatcaccaaactgaacccaggcgtgaaactgccttcgcagaacatcgctgtggttcgccgtgctgacggttccggtacgtccttcgtcttcaccagctacctggcgaaagtgaacgaagagtggaaatccaaaatcggttctggctcaactgttaactggccgaccggtctgggcggtaaagggaatgacggtatcgccgcgttcgtacagcgtctgccgggttcaatcggttacgttgaatacgcttacgccaagcaaaacaacctggcttacaccaagctgatttcagctgacggtaaagcggttagcccgaccgaagaaaacttcgctaacgctgcgaaaggcgctgactggagcaaatccttcgcacaggatctgactaaccagaaaggtgacggcgcgtggccaatcacgtccaccacattcattctggtgcacaaagatcagaagaaacctgagcagggtgctgaagtgctgaagttcttcgattgggcatacaaaaacggtggcaaacaggctaacgacctggattacgcaagcctgccggacagcgtggttgagcagattcgtgctgcatggaaaaccaacgtgaaagacagcagcggtaaagcattgtattga

SEQ ID NO: 2744 - protein, 346 aa, Enterobacter sp. 638
MKVMRTTVATVVAATLSMSAFSVFAEASLTGAGATFPAPVYAKWADTYNKETGNKVNYQGIGSSGGVKQITANTVDFGASDAPLSDDKLAQEGLFQFPTVIGGVVLAVNIPGLKSGELVLDGKTLGDIYLGKIKKWDDEAITKLNPGVKLPSQNIAVVRRADGSGTSFVFTSYLAKVNEEWKSKIGSGSTVNWPTGLGGKGNDGIAAFVQRLPGSIGYVEYAYAKQNNLAYTKLISADGKAVSPTEENFANAAKGADWSKSFAQDLTNQKGDGAWPITSTTFILVHKDQKKPEQGAEVLKFFDWAYKNGGKQANDLDYASLPDSVVEQIRAAWKTNVKDSSGKALY

SEQ ID NO: 2745 - DNA, 1011 bp, Bradyrhizobium sp. ORS278
  CDS (1)..(1011): transl_table=11
atgaatttcgtcaaagctatcgtcgctgccggcttggtcgccgcatcgacgtcggcattcgctgccgacatcaccggcgcgggcgcgacgttcccgttcccgatctattcgaagtgggctgacgcctacaagaaggagaccggcaacggtctgaactaccagtcgatcggttccggcggcggcatcaagcagatccaggccaagaccgtgacattcggcgccaccgacgcgccgctcaaggccgagcagctcgagaaggacggcctggtgcagtggccgcaggtgatgggcggcatcgtgccggtcgtcaacctcgagggcgtgaagccgggcgagatggtgctggacggcgagacgctcgccaacatctatctcggcaagatcaccaagtgggatgacgccgcgatcaagaagctgaaccccagcgtcaagctgccgagcgatgcgatcgccgtggtccgccgttccgacggctcgggcacgaccttcaacttcacctattatctctccgaggccagcgccgactggaagagcaaggtcggctccaacaccgccgtcgagtggccggtcggcgtcggcgcgaaaggtaacgagggtgtgtcgggcaacatcagccagaccaagaactcgatcggctatgtcgagtacgcctatgccaagcagaacaagctgacctacaccgcgatggtcaacaaggccggcaagaccgtgcagccgaccgtcgaggccttccaggctgccgctgccaacgccgactgggccaaggctcccggctattacgtgatcctggccaaccaggccggcgacaagtcctggccgatgacggccgcgaccttcatcctgatgcacaaggagccgaccgacaaggcagcctccgccgaagcgctcaagttcttcaagtggtcgttcgaaaagggcgacaagatggccgaggagctcgactacatcccgatgcccgacagcgtcgtgaagctgatcgagaagacctggtcgtcggacatcaagagctga

SEQ ID NO: 2746 - protein, 336 aa, Bradyrhizobium sp. ORS278
MNFVKAIVAAGLVAASTSAFAADITGAGATFPFPIYSKWADAYKKETGNGLNYQSIGSGGGIKQIQAKTVTFGATDAPLKAEQLEKDGLVQWPQVMGGIVPVVNLEGVKPGEMVLDGETLANIYLGKITKWDDAAIKKLNPSVKLPSDAIAVVRRSDGSGTTFNFTYYLSEASADWKSKVGSNTAVEWPVGVGAKGNEGVSGNISQTKNSIGYVEYAYAKQNKLTYTAMVNKAGKTVQPTVEAFQAAAANADWAKAPGYYVILANQAGDKSWPMTAATFILMHKEPTDKAASAEALKFFKWSFEKGDKMAEELDYIPMPDSVVKLIEKTWSSDIKS

SEQ ID NO: 2747 - DNA, 1005 bp, Synechococcus sp. WH 7803
  CDS (1)..(1005): transl_table=11
atgcgtcgttcgtttcaagcccgagcgctcactgccattgcaggactcaccgctggcgtcagcctcgccgcctgctcctccggcggtggcggcggagaccaactcaagggcagcctgtctggggctggcgcctcgttccctgcagccatctacacccgttggttccaggaactggctccccagggcatccaagtgaactatcaatcggttggctccggagccggcgtgcgccagttccaagccggaaccgtcgacttcggagcctcagacgcaccgatgaaggcagacgacatcgccaaggtgacccgcggcgtgctgcagatcccgatgaccgccggtgccatcgccgtggcttacaacctcccgggttgcgatctgaagctcacccagcagcaactggctgacatcttcctcggcaagatcaagaactacagcgacgtgggctgtgacgacaaagcgatcaccgtggtccgtcggtccgatggctccggaaccacgtacaacttcaccaagcacctctcagccatcagtgatgcctggaaagacggtccaggaaccggcaagtccgtggcctggcccacaggcgttggtgccaaaggcaacgagggtgtcgccgctcagctgaatcagatcgacggtggtttgggttacgtggaggtggcttacgtgaaagggaagctgcaggccgctgccttggccaatgcatccggtgaacaggtaaagcccaccaacgaaagcgagagcaccgctctggcctccatcgatctgggtcccgatctgatcggaggcaatcccaatcctcccaagggctatccgatcgtgaccttcacctggatcctggcctacaaggaaggcaacgccgacaagaccgagctgctgaagaagaccttcgagttcatgctgtcggaaaagtcccagagccaggcacccgacctgggctacgtctccctgccggccgaggttgtggagaagtccaaggctgccgtggcccagatcagcgagtga

SEQ ID NO: 2748 - protein, 334 aa, Synechococcus sp. WH 7803
MRRSFQARALTAIAGLTAGVSLAACSSGGGGGDQLKGSLSGAGASFPAAIYTRWFQELAPQGIQVNYQSVGSGAGVRQFQAGTVDFGASDAPMKADDIAKVTRGVLQIPMTAGAIAVAYNLPGCDLKLTQQQLADIFLGKIKNYSDVGCDDKAITVVRRSDGSGTTYNFTKHLSAISDAWKDGPGTGKSVAWPTGVGAKGNEGVAAQLNQIDGGLGYVEVAYVKGKLQAAALANASGEQVKPTNESESTALASIDLGPDLIGGNPNPPKGYPIVTFTWILAYKEGNADKTELLKKTFEFMLSEKSQSQAPDLGYVSLPAEVVEKSKAAVAQISE

SEQ ID NO: 2749 - DNA, 1089 bp, Synechococcus sp. RCC307
  CDS (1)..(1089): transl_table=11
atgggcagcagaacaaattgccgagggttaattcaatggttgcgagcgcttaaagcgcgctttctaaaccttgcgttggtcatcattcatcgcttcatggcccgcagatttcttgcgctggcaacagccggcggcctcaccgctctcagcctcacggggtgctccttattcaccggaagtagcggtggcggcaagctcaccggagccggcgcctccttccccgctgcgatctacaaccgctggttccaacaattggctcagaagccagaaggcgtcaaggtggcctaccagtccgtgggatcaggcgccggagtgcgtcagttcattggcgaaacggtggacttcggtgccagtgacgtgccgatgaagcccgaacaaattgcgcaagtgaagcggggcgtggtgcaactgcccatgacggctggcgccattgccgtggcttacaacaagccaggctgtgatttgaaactcgatcaacaacagctggccgatgtcttcctcggaaaaatcaccaattggaaagatctgggttgcggcgaccagaagttgaccgttgttcatcgctccgatggctcaggtaccaccgccaacttcacagcccacttggccgcgatcagtcctgcctgggccaatggtccaagcaaaggcaaaacgatcaactggccaaccggtgttggcgccaaaggcaatgaaggtgtcgccgcacagttaggccaactggaaggcggcattggctacgtggaagtggcttacgtcaaaggagcactccaagcagccgccctcaccaatgcctccggcgaggtcgtgaagcccacggcagaaagtgaaagtgaggcacttgcctccattgatctgggccctgacctcacaggcagcaatcccaaccctgccaagggctatccaatcgtcacattcacctggatccttctctacaaagaaggaaacggcgacaagctcaaacctctgcagacagcgtttgaatacacgctctcccctgaggctcagcaacaggcaccagagattggctacgtgaccttgccggaggaagtggtgaccaaggccaaagaggcccttcagaccatccaatag

SEQ ID NO: 2750 - protein, 362 aa, Synechococcus sp. RCC307
MGSRTNCRGLIQWLRALKARFLNLALVIIHRFMARRFLALATAGGLTALSLTGCSLFTGSSGGGKLTGAGASFPAAIYNRWFQQLAQKPEGVKVAYQSVGSGAGVRQFIGETVDFGASDVPMKPEQIAQVKRGVVQLPMTAGAIAVAYNKPGCDLKLDQQQLADVFLGKITNWKDLGCGDQKLTVVHRSDGSGTTANFTAHLAAISPAWANGPSKGKTINWPTGVGAKGNEGVAAQLGQLEGGIGYVEVAYVKGALQAAALTNASGEVVKPTAESESEALASIDLGPDLTGSNPNPAKGYPIVTFTWILLYKEGNGDKLKPLQTAFEYTLSPEAQQQAPEIGYVTLPEEVVTKAKEALQTIQ

SEQ ID NO: 2751 - DNA, 1029 bp, Geobacter uraniireducens Rf4
  CDS (1)..(1029): transl_table=11
atgctcaacatcatccgtaaaagcattctgaccctggccatcctggcggtaaccgccatctccggccaggcatcggcagaaacgctcatcaacggcgcaggcgcaaccttcccctacccgctctactccaagtggttcgccgaatacgccaaggtcgatccgaccgtcaagttcaactaccagtccatcggctcaggcggcggcatcaagcagatcactgcccagaccgtcgatttcggcgcttccgataaattcctctccgacgcagaactgaaggctgcccccggcaagctgctccacatcccgaccgttatgggcgccgtggtcgtcacttacaacgttcccggcgtgggtaaagggctgaagctttcttccgaagatgtggctgatatctacctggggaagatcaccaagtggaacgacccgaagatcgccaacgacaaccccaagatcaagcttcccaaccagccgatcatcgttgttcaccgctctgacgggagcggcaccacgagcatcttcaccgactatctttccagcgtcagcccggaatgggcaggcaaggtgggcaagggtgcttccgtcaagtggcctatcggcctcggcggcaagggtaacgaaggggttgccggacaggtcaagaccacccagtacaccatcggttacgtggaactggcctatgccttcgaaaacaagcttcctttcgccacattgaaaaacaagagcggcaatttcgtcgagccttccatcaagtccaccagcgcagcagctgccggcgcggccaaatccatgcctgccgattaccgcatctcgctggtcaaccagccgggcaaggatgcctacccgatcgtcggcttcacctggctcctcgtctaccaggaccagaaggacaaggtaataggaaagaagctggtcgagttcctcaactgggaattgaagcatggccagaagatggccgacaagatcctctatgcgccactccctgctaacgtggcgaagatggtggaaaaaaccgtcaagagcatcaagtaa

SEQ ID NO: 2752 - protein, 342 aa, Geobacter uraniireducens Rf4
MLNIIRKSILTLAILAVTAISGQASAETLINGAGATFPYPLYSKWFAEYAKVDPTVKFNYQSIGSGGGIKQITAQTVDFGASDKFLSDAELKAAPGKLLHIPTVMGAVVVTYNVPGVGKGLKLSSEDVADIYLGKITKWNDPKIANDNPKIKLPNQPIIVVHRSDGSGTTSIFTDYLSSVSPEWAGKVGKGASVKWPIGLGGKGNEGVAGQVKTTQYTIGYVELAYAFENKLPFATLKNKSGNFVEPSIKSTSAAAAGAAKSMPADYRISLVNQPGKDAYPIVGFTWLLVYQDQKDKVIGKKLVEFLNWELKHGQKMADKILYAPLPANVAKMVEKTVKSIK

SEQ ID NO: 2753 - DNA, 1011 bp, Bradyrhizobium sp. BTAi1
  CDS (1)..(1011): transl_table=11
atgaatttcgtcaaagctatcgtcgctgccggcttggtcgccgcatcgacgtcggcattcgctgccgacatcaccggcgcgggcgcgacgttcccgttcccgatctattccaagtgggctgacgcctacaagaaggagaccggcaacggtctgaactaccagtcgatcggctccggcggcggcatcaagcagatccaggccaagaccgtgaccttcggcgccaccgacgcgccgctcaaggccgagcagctcgagaaggacggcctggtgcagtggccgatggtgatgggtggtatcgtgccggtcgtcaacctcgagggcgtgaagcctggcgagatggtgctggacggcgagacgctggccaacatctatctcggcaagatcaccaagtgggatgacgccgcgatcaagaagctgaacccgagcgtcaagctgccgagcgatgccatcgctgtggttcgccgctccgacggttcgggcacgaccttcaacttcacctactacctctccgaagtcagcgctgactggaagagcaaggtcggctccaacaccgcggtcgaatggccggtcggcgtcggcgccaagggcaatgagggcgtgtcgggcaacatcagccagaccaagaactcgatcggctatgtcgagtatgcctatgccaagcagaacaagctgacctacaccgccatggtcaacaagaccggcaagaccgtgcagccgaccgtcgaggccttccaggccgcggccgccaacgccgattgggccaaggctcccggctactatgtgattctcgccaaccagcagggcgaaaagtcctggccgatgacggccgcgaccttcatcctgatgcacaaggagccgaccgacaaggcggcctccgccgaagccatcaagttcttcaagtggtcgttcgagaagggcgacaagatggctgaggagctcgactacatcccgatgcccgacaacgtcgtgaagctgatcgagaagacctggtcctcggacatcaagagctga

SEQ ID NO: 2754 - protein, 336 aa, Bradyrhizobium sp. BTAi1
MNFVKAIVAAGLVAASTSAFAADITGAGATFPFPIYSKWADAYKKETGNGLNYQSIGSGGGIKQIQAKTVTFGATDAPLKAEQLEKDGLVQWPMVMGGIVPVVNLEGVKPGEMVLDGETLANIYLGKITKWDDAAIKKLNPSVKLPSDAIAVVRRSDGSGTTFNFTYYLSEVSADWKSKVGSNTAVEWPVGVGAKGNEGVSGNISQTKNSIGYVEYAYAKQNKLTYTAMVNKTGKTVQPTVEAFQAAAANADWAKAPGYYVILANQQGEKSWPMTAATFILMHKEPTDKAASAEAIKFFKWSFEKGDKMAEELDYIPMPDNVVKLIEKTWSSDIKS

SEQ ID NO: 2755 - DNA, 1050 bp, Sphingomonas wittichii RW1
  CDS (1)..(1050): transl_table=11
atgctcaagcatttcgtcgccgcgctgagcgctggcctggtcctcgcctcgggcatggtttccgccgcccatgccgccaacatctcgggcgcgggcgcgaccttccccgcgccgctctatgcgaaatgggcggagacctacaaggcgaccaccggcatcggcctcaactaccaggcgatcggctcgggcggcggcatcaagcagatcaaggcgaagaccgtcgatttcggcgcgtcggacaagccgctgaagccggacgaactggcggccgcaggcctctaccagttcccgaccgtgatgggcggcgtggttccgatcgtgaacctgcccggcgtcaagcccggccagatcaagatgaccggcgcggtcctcgccgacatcttcatgggcggcatccgcaagtggaacgatccgcgcatcgcgcggctcaaccccggcgtgaagctgatgccgatgccgatcaccgtcgtccatcgctcggacggctcgggcacctccttcctcttcaccacctatctggcgatgaagaacccggtctgggcgaagaaggtcggcgccagcgacgccgtgtcctggccgaccggcatcggcggcaagggcaatgacggcgtctcggccttcgtcaagcagacgatgggctcgatcggctatgtcgaatatgcctatgccaagcagaaccgggcgaccttcgtcctgctgcagaacaaggcgggccagttcgtcgctccgggcgcggccaatttcgccgccgccgcggcgggcgcgcaatgggccaaggcgccgggtaactatgtcctgctgctcgaccagccgggcccgaagacctggccgatcaccggcgcgaccttcatcctcgtctatcgcaaccaggccgatccggcgacgggcggcagcgtcctgaaattcttcgactgggcctataaggcgggcgatgcctcggcggcgcagctcgactatgtgccgctgccggcggccgtgaagaccctggtccgcaagcaatggttgaccagcgtgacggcgggccgcaagcccgtctatgttccgcgctga

SEQ ID NO: 2756 - protein, 349 aa, Sphingomonas wittichii RW1
MLKHFVAALSAGLVLASGMVSAAHAANISGAGATFPAPLYAKWAETYKATTGIGLNYQAIGSGGGIKQIKAKTVDFGASDKPLKPDELAAAGLYQFPTVMGGVVPIVNLPGVKPGQIKMTGAVLADIFMGGIRKWNDPRIARLNPGVKLMPMPITVVHRSDGSGTSFLFTTYLAMKNPVWAKKVGASDAVSWPTGIGGKGNDGVSAFVKQTMGSIGYVEYAYAKQNRATFVLLQNKAGQFVAPGAANFAAAAAGAQWAKAPGNYVLLLDQPGPKTWPITGATFILVYRNQADPATGGSVLKFFDWAYKAGDASAAQLDYVPLPAAVKTLVRKQWLTSVTAGRKPVYVPR

SEQ ID NO: 2757 - DNA, 1188 bp, Roseiflexus sp. RS-1
  CDS (1)..(1188): transl_table=11
atgtcgacgttcgtgatcacggcgcagacccaggcgcaaactcagccgacgccgactccacgaccacaggctacgccaacgcgcccccgcgcaacgccaaccccgcgcccccgacggacaccgactccacgaccacaggcggctactccaaccgctcaaccgactgctcctgcggcgtgggcgccacgtcagattagcggcgtcgtgttgcagggatcaggagcgactttcccgaaccccctctatcaggcatggatcagcgtgtacaagaatgttgttcctggggtgaccatcagttatcaggcagtggggtctggtcagggtcagcgcgacttcatccgctatctgaccgattttggcggcaccgactcggcgctaccggcggatcgcatcgctgccgaagcgccggacgcgctgcacgtgccgatggttatcggcgcagtcgtgccgacctacaacctgcctggcttgcccgccggtacagtgctgcgcttctcgccagaaacgctgagcggcatctatctgggtgaaattacacgctggaatgatccgcggatcgctgctgacaaccctggcgttgcgcttccagacctgccaatcacggttgtctatcgctcggatagctcaggtacaacgtcgatctggactgattacctgtcgaaggtgagtgaaacctggcgcactcgcgtcggcgccggtacgaccgtccgctggcccgccggtattggagcaccgggcaatgcaggcgtcgccggcacggtggttcgcacagagggcgccatcgggtatgttgaacaggcgtttgcaatcggcaaccgtttgccggtgccggccgtgaaaaacgcagcgggcaactatgtcctgcctacaccagaaaccgtctctgcggcagcggccggtgtgactattcccgaagacctgcggttctcaatcactaacccgcagggtgcaaactcgtacccgattgccgggttgacctggatcctgatccgctcacagacctacacagacgttccaaaggcgcaggcgctcaccgactttctctactggtgtctcaccgaagggcagggggctgccatccgtctcggttatgtccaactgccgacagaagtgcgcctgaaggcaatggcgcaactgaacaaagtgcgtgtccgtggcgagcaggtgtttacgacaccgccgcgctaa

SEQ ID NO: 2758 - protein, 395 aa, Roseiflexus sp. RS-1
MSTFVITAQTQAQTQPTPTPRPQATPTRPRATPTPRPRRTPTPRPQAATPTAQPTAPAAWAPRQISGVVLQGSGATFPNPLYQAWISVYKNVVPGVTISYQAVGSGQGQRDFIRYLTDFGGTDSALPADRIAAEAPDALHVPMVIGAVVPTYNLPGLPAGTVLRFSPETLSGIYLGEITRWNDPRIAADNPGVALPDLPITVVYRSDSSGTTSIWTDYLSKVSETWRTRVGAGTTVRWPAGIGAPGNAGVAGTVVRTEGAIGYVEQAFAIGNRLPVPAVKNAAGNYVLPTPETVSAAAAGVTIPEDLRFSITNPQGANSYPIAGLTWILIRSQTYTDVPKAQALTDFLYWCLTEGQGAAIRLGYVQLPTEVRLKAMAQLNKVRVRGEQVFTTPPR

SEQ ID NO: 2759 - DNA, 1308 bp, Psychrobacter sp. PRwf-1
  CDS (1)..(1308): transl_table=11
atgtgttcaatccaatacaagaccgacaaaagcgtcgtcaattacagtgatttatatcaagccgctttgctttatccgttattaagtctctgtatttcttatattttatataaaaacattttttactctttaggagagatcatgcgttattcactattagctgtcactgttgccagcatgttggccctaactgcttgtgataagaaagaagcggcaacagctgacgatacgacagcggctagctcggcagcagccagcacagcaaatacttcagaatcaacgtctgctgcagcgggtgagttcaagtcagctgaaggcattgagatgaatattaccggtgcaggtgcttctttcccgcagcctatctacatcaaatggtcagcggactacaacaaagaaaccaaaggtcaggtgaattatcagtctatcggttcatcaggcggtattaagcaaatcgtctcaaacacagtagacttcggtgcctctgatgctccaatgacgcctgaagagctagaaaaagagggcttaatccaattcccaaccgttattggtggtgtggttcctgttatcaacgttgaaggtatcaagcccggcgaactaaagctagatggcgaaacgttagccaatatctacttgggtaaaatcagcaagtggaatgatcctgcaatcgctgccttaaacccagagttgaccctgcctgacaccgcgattactacagtgtttcgctcagacggttcagggactacttttaactttacagactatctggccaaagtatcacctgaatggaaagacagcatcggtgttgataagaccgtgcagtggccaacgtcagcgacaggtgtgggcggcaagggtaatgagggcgtggccagcaatgtcagtcgtatggcaaactcaattggttatgttgaatatgcttacgctaagcaaaacaacatgtcttatgctgccatgaaaaatgcagccggcaatatcgtacagccctctgctgaaactttcgccgctgccggtgatattgattggtcaaaacaagacggtttttacaaggttattaccaactcagataccgatcaagcgtggcctatcgctgctgctacttttatcttagtgcacaaaaatccaaaaaacccacaaaaagtggccggcgtgcttaacttctttgactgggcatatacccgcggtgatgaagatgctatgagcttagactttgtacccttctcagataaagctgtggctttattcaaagctaagtggaatgaagttgtggataaagatggcaagccagtttataccccagcgcagtaa

SEQ ID NO: 2760 - protein, 435 aa, Psychrobacter sp. PRwf-1
MCSIQYKTDKSVVNYSDLYQAALLYPLLSLCISYILYKNIFYSLGEIMRYSLLAVTVASMLALTACDKKEAATADDTTAASSAAASTANTSESTSAAAGEFKSAEGIEMNITGAGASFPQPIYIKWSADYNKETKGQVNYQSIGSSGGIKQIVSNTVDFGASDAPMTPEELEKEGLIQFPTVIGGVVPVINVEGIKPGELKLDGETLANIYLGKISKWNDPAIAALNPELTLPDTAITTVFRSDGSGTTFNFTDYLAKVSPEWKDSIGVDKTVQWPTSATGVGGKGNEGVASNVSRMANSIGYVEYAYAKQNNMSYAAMKNAAGNIVQPSAETFAAAGDIDWSKQDGFYKVITNSDTDQAWPIAAATFILVHKNPKNPQKVAGVLNFFDWAYTRGDEDAMSLDFVPFSDKAVALFKAKWNEVVDKDGKPVYTPAQ

SEQ ID NO: 2761 - DNA, 1041 bp, Klebsiella pneumoniae subsp. pneumoniae MGH 78578
  CDS (1)..(1041): transl_table=11
atgaacgttatgcgtaccaccgtcgcaacagttgtcgccgcgaccttatcgatgagcgctttctctgccttcgcagcagcaagcctgactggcgcaggcgcaactttccctgcgccggtgtatgccaaatgggctgatacctatcagaaagaaaccggcaataaagtgaactaccagggtattggttcctctggtggcgttaagcagattattgccaacaccgttgatttcggtgcttctgatgctccgctggctgatgacaaactgactcaggaaggtctgttccagttccccaccgtgattggcggcgtggtactggcggttaacctgcctggcgtgaaatctggcgagctggtgctggatggcaaaaccctcggtgatatctacctgggtaaaattaaaaaatgggatgacgaagcgatcgctaagctcaacccgggcctgaagctgccgtcgcagaacatcgccgtggtccgccgcgccgatggttctggtacctccttcgttttcaccagctacctgtccaaagtgaatgaagagtggaaatcgaaaatcggcgccggctctaccgtaaactggccaaccggtttgggcggtaaaggcaacgatggtatcgccgcctttgttcagcgtctgccgggctcgattggttacgtcgaatacgcttacgctaagcaaaacaacctggcctacaccaaactagtctctgccgacggcaagccggttagcccgactgaagacaacttcgctaacgccgcaaaaggcgttgactggagcaagtctttcgctcaggacctgaccaaccagaaaggcgagaatgcatggccgatcacctcaaccaccttcatcctggtgcacaaggcgacgaacaagccggaacagaccgctgaagtgctgaagttcttcgactgggcgtataaaaacggcgggaaagaagcgaatgcgctggattacgcgacgctgccggaaagcgtggtagagcaggttcgcgcggcatggaaaaccaacgtcaaagacagcagcggtaaagcgctgtactaa

SEQ ID NO: 2762 - protein, 346 aa, Klebsiella pneumoniae subsp. pneumoniae MGH 78578
MNVMRTTVATVVAATLSMSAFSAFAAASLTGAGATFPAPVYAKWADTYQKETGNKVNYQGIGSSGGVKQIIANTVDFGASDAPLADDKLTQEGLFQFPTVIGGVVLAVNLPGVKSGELVLDGKTLGDIYLGKIKKWDDEAIAKLNPGLKLPSQNIAVVRRADGSGTSFVFTSYLSKVNEEWKSKIGAGSTVNWPTGLGGKGNDGIAAFVQRLPGSIGYVEYAYAKQNNLAYTKLVSADGKPVSPTEDNFANAAKGVDWSKSFAQDLTNQKGENAWPITSTTFILVHKATNKPEQTAEVLKFFDWAYKNGGKEANALDYATLPESVVEQVRAAWKTNVKDSSGKALY

SEQ ID NO: 2763 - DNA, 1044 bp, Janthinobacterium sp. Marseille
  CDS (1)..(1044): transl_table=11
atgcgattgaatcaatttgtcaaaaccgccatggtagctgcagtcgcagcagtggcgttctcgtccgcagtagcagctgatattacaggtgctggtgcgactttcccttaccctatttattccaaatgggctgaatcctacaaagctgcaaccggcacaggcttgaactatcaatccatcggttccggcggcggcatcaaacaaatcaaggcaaaaaccgttgatttcggcgcatccgacatgccactgaaagaagaagagctggaagccgaaggcttgctgcaattcccggcgatcatgggtggtgttgtacctatcgtcaacctggagggcgtcgccccgggtcaattgaaaatgacgccagaagttttggctaacatctacctcggcaaaatcaccaaatggaacgatgcacgtatcactgcattgaacccaggtgtaaaactgacagattccgacatcaccgttgtgcatcgttcggacggttcgggcaccaccttcctgtggaccgacttcctgtcgaaaaccaatgctgacttcaaagaaggcgtgggcgcaggtacagcagttaaatggccagcaggtgtgggcggcaaaggtaacgaaggcgttgcagctaacgttcagcgtatcaagggttcgatcggctacgtagagtacgcgtacgctaaaaagaacaaaatgtcgcacacccagttgaaaaaccgtgacggtcaattcgtccaaccagacgatgaaaccttcaaagcagctgcagctggtgctgattgggcaaaaaccccaggtatgggcgtgatcctgaccaaccaggctggtaaatcgagctggcctatcactggcgcatcgttcatcctcttgcacaaatcgcaagcatcggctgagcgcgctaaagaagtgttgaaattctttgactggtcctacaaaaacggtggcgcaatggctgctgacctggactacgttgcaatgcctgcaccagttgtgaaattggttcaggacgcctggaaagcaagtgttaaagatgcttccggcaaggctgtttggtaa

SEQ ID NO: 2764 - protein, 347 aa, Janthinobacterium sp. Marseille
MRLNQFVKTAMVAAVAAVAFSSAVAADITGAGATFPYPIYSKWAESYKAATGTGLNYQSIGSGGGIKQIKAKTVDFGASDMPLKEEELEAEGLLQFPAIMGGVVPIVNLEGVAPGQLKMTPEVLANIYLGKITKWNDARITALNPGVKLTDSDITVVHRSDGSGTTFLWTDFLSKTNADFKEGVGAGTAVKWPAGVGGKGNEGVAANVQRIKGSIGYVEYAYAKKNKMSHTQLKNRDGQFVQPDDETFKAAAAGADWAKTPGMGVILTNQAGKSSWPITGASFILLHKSQASAERAKEVLKFFDWSYKNGGAMAADLDYVAMPAPVVKLVQDAWKASVKDASGKAVW

SEQ ID NO: 2765 - DNA, 1017 bp, Nitratiruptor sp. SB155-2
  CDS (1)..(1017): transl_table=11
atgctgaaaaaagtaagcttgatagcagctgctgtaatgaatctggttagtgcggcaaatgcagacaagatcagcggagcaggagcgacatttccagccccagtctattatgaatgggcatacgattaccaaaaggccactggtgtcgaagtgaactatcaatctatcggaagtggtggcggaatcaaacagatcagcgcaagaacggtagattttggtgcaagtgacaaaccgctgaaaccaaaacaacttgatagaaagagactttaccaatttcctgcagttatcggaagcatcgtccttgcatacaatatcccgggcataggtgatatgcagctcaaacttgaaaacagagatgttgctgatatatttctaggaaaaatacaattttgggacgataaagcgatcgctgaagacaatccgggagtaaaacttcctcataagaaaattgtagtggttcatagaagtgatggcagcggaacaacgttcaactttacatactatttgagtggagtgagtgaagagtgggcaaacaatgtcggaacaggaaaagctgtagattggccggttggacttggcggaaaaggaaatgaaggggtaagtaatcttatcaaacaaacgccatacagcatcggatatgttgaatatgcatataaactaaaaaacaattttgctgctgcagttattcagacaaaaagcggaaaatgggtacaacctactgaagaaaatttcaaagcggcagctgcgcatgcgaaatggggtccaaagaaccatttctatcaggtgttggcgcttcaaccaggagataacagttatccgattgtagctggaacatttattttacttccaagagagaaaaccgaaacgaataaaaaagtgacagcattttttgactgggcattcaaacatggtgatgcagcggcgaagaaacttggatacatcccgctcccggcatctactaaagagaagattcgagagtactggaaaatacacggtatcgctcctgagagcaaatag

SEQ ID NO: 2766 - protein, 338 aa, Nitratiruptor sp. SB155-2
MLKKVSLIAAAVMNLVSAANADKISGAGATFPAPVYYEWAYDYQKATGVEVNYQSIGSGGGIKQISARTVDFGASDKPLKPKQLDRKRLYQFPAVIGSIVLAYNIPGIGDMQLKLENRDVADIFLGKIQFWDDKAIAEDNPGVKLPHKKIVVVHRSDGSGTTFNFTYYLSGVSEEWANNVGTGKAVDWPVGLGGKGNEGVSNLIKQTPYSIGYVEYAYKLKNNFAAAVIQTKSGKWVQPTEENFKAAAAHAKWGPKNHFYQVLALQPGDNSYPIVAGTFILLPREKTETNKKVTAFFDWAFKHGDAAAKKLGYIPLPASTKEKIREYWKIHGIAPESK

SEQ ID NO: 2767 - DNA, 1002 bp, Sulfurovum sp. NBC37-1
  CDS (1)..(1002): transl_table=11
atgacattcaagaaacttgtaacagcagcagtagtggcttcagtagcacttacagcggcaaatgcagatgagcttaagggaagaggggcttcattccccggaccggtatacaaagcatggacatcaggatattttgatgcgacaggtaaaaaagtgaactatacaccgacaggttccggtgacggtattaagtccattacaaaaagaatggtcgatttcggtggttcggacaaaccgcttaagcctaaaacacttaaaaagaagaagctttacatgttcccttctgtagtaggttctattgtacttgcctataatattgacggtgtcaaggacggcgaactgaagctttcccgtgctgcaatcgatgcgatctttacaggtaaagcaaaattttgggatgatgcagtcatcacaaaagaaaatgcaggtctcaagcttccacacgcacctattacaacctgtgtaagagcggacaagtcaggtacaacattcaactttacttacttccttaacaagatcaaccctgaatttaaagtcagcaagaagccgacatggaaagcaggaaaagtagtggcagggaaatcaaactccggtgtttctgcgaacattcagcaggtcaaaaactccatcggttacattgaatactcttacaagatcaaacttggtcttcctgcagcgcaggtagagaacaaagagggcaaatttatcaacccgacagtcaagtctttccaggatgcagcgaagtatgctacatggacacctgaaaatgacttctatgccgttatcggagaccctgctggtgcaacttcctatccgatcgttgcagcaacgttcatccttcttccacaggagaagacagaaaagaacaaagaggtaacagccttctttgactgggcatacaaaaacggtgacaaagcggcagctgaccttgggtatgtaccgcttccttcctcaacaaaagatcagatcagaaaatactgggaagcaaaaggcatcaagtaa

SEQ ID NO: 2768 - protein, 333 aa, Sulfurovum sp. NBC37-1
MTFKKLVTAAVVASVALTAANADELKGRGASFPGPVYKAWTSGYFDATGKKVNYTPTGSGDGIKSITKRMVDFGGSDKPLKPKTLKKKKLYMFPSVVGSIVLAYNIDGVKDGELKLSRAAIDAIFTGKAKFWDDAVITKENAGLKLPHAPITTCVRADKSGTTFNFTYFLNKINPEFKVSKKPTWKAGKVVAGKSNSGVSANIQQVKNSIGYIEYSYKIKLGLPAAQVENKEGKFINPTVKSFQDAAKYATWTPENDFYAVIGDPAGATSYPIVAATFILLPQEKTEKNKEVTAFFDWAYKNGDKAAADLGYVPLPSSTKDQIRKYWEAKGIK

SEQ ID NO: 2769 - DNA, 1017 bp, Campylobacter hominis ATCC BAA-381
  CDS (1)..(1017): transl_table=11
atgaaaaaattagcaatgttggcattagccggcgcgcttgtttcaggtgcttttgcaagcgataaaataatgggtcaaggagcaaccttcccacttcctgtatataaagactgggcaaaaatttattacaaacaaacaggaaatcaagtcacatacagcggtggcggaagcggaaaaggcataagtgcaatcaccgatagaaacggaaatttcggcggaagcgattcggctcttaaaaaagacgaacttaatgaaaaaaaattattacaattccctgcagtaatcggaagtatcgttttggcttataatatcgacggtgtgaaagatatggaattaaaacttgacgctgaagctgtagcaggaatttttagcggcaaaattacaaaatggaatgatcctgcaatagcaaaaataaatgaaaatataaaacttcctgacgccgatatcgtgccggtagtaagaagtgaatcaagtggaactacatttaattttacaagttatttaagcaaggcaaatgaagactgggcgaaaaattacggcgctgcaaaaacaataaactggggcgcgaaagtaactcctgctcaaggaaatcctttggttgcaaaaacaatcaaacaaactccgaattcaatcggctatattgaatatgcttataaagttaccgaaaatttaaatgccgctactcttaaaactgcaaacggagattgggctgagcctacagaagaaaattttgcaaaagccgcactaaattcaaatttcagtattgatgagcatttttacgatgttcttgcttacggaaaaggcgaaaaaagctatcctatcgcagctgctacatttatcttacttccaagcgacaacgcggaagacggcaaaaaagtaactaaatttttcaaatgggcatttgaaaatgacgaggctaaaaaagcggcggcgaatcttggatatttgcctcttccaaaagatacggtcgatatgattgaagaatactggaaaaaatacgatatttttccaaaataa

SEQ ID NO: 2770 - protein, 338 aa, Campylobacter hominis ATCC BAA-381
MKKLAMLALAGALVSGAFASDKIMGQGATFPLPVYKDWAKIYYKQTGNQVTYSGGGSGKGISAITDRNGNFGGSDSALKKDELNEKKLLQFPAVIGSIVLAYNIDGVKDMELKLDAEAVAGIFSGKITKWNDPAIAKINENIKLPDADIVPVVRSESSGTTFNFTSYLSKANEDWAKNYGAAKTINWGAKVTPAQGNPLVAKTIKQTPNSIGYIEYAYKVTENLNAATLKTANGDWAEPTEENFAKAALNSNFSIDEHFYDVLAYGKGEKSYPIAAATFILLPSDNAEDGKKVTKFFKWAFENDEAKKAAANLGYLPLPKDTVDMIEEYWKKYDIFPK

SEQ ID NO: 2771 - DNA, 1029 bp, Xanthobacter autotrophicus Py2
  CDS (1)..(1029): transl_table=11
atgaatcgcattcttgtctggacagctgcggcgacgctcgcggccctgtcgatgttcgcgcctccggcgcgcgccgcggaggtgcggggtgccggctccaccttcgcctatccgatcatctggaaatgggcggaggcgtttcgtgagcgcacaggccacatcgtaggatatcagtcggtgggttcgtcggccggcgtcaaccgtattaaggacggggtggtggatttcggcgcgtccgacaagccgctgaagccggaagagctggagaaatatggcctcggccagttccccatcgtgttcggtggcgtcgttccggtgttcaacgtggacggcgtggggcccggccagctccgcttcaccggcgcccttctcgccgacatctatctcggcaaggtcacgacctggtccgatcccgccatcagggccctcaatcccgacgtcaagctgcccaacgcgaagatcgtggtggtgcaccgttccgatggatctgggactacgttcaactgggtgtcctaccttgccaaggcgagcccggagtggaagcagcaggtcggcgaaggcagcgcagtcgcctggccggtggggtatggcgcgcgcggtaacgaaggggtctcgaccgaggtcaagcgggtcccgaatgccatcggctatgtcgaatacacctatgtggtgcaggtgaagctggcctatggcctcgtccagaaccgtgctggcaagttcatcgcacccagcgcggcggcgttccaggcggcggcgctgagcttcgattgggccggcgccaaggactttttcgtcgtcatcaccgattcccccgccgaggatgcctatcctattgcggcgaccaccttcgctctcatgtatcgcgagccgaaggtgccggcgaacagccaagccgccttcgagttctggcgcttcgccctgggcgagggcgagaaatttgcgtccgagctcggctatgttcccttgccgccggctctggtccagcaggtcaaggactattgggccaggaccttcaagggcggtgcctga

SEQ ID NO: 2772 - protein, 342 aa, Xanthobacter autotrophicus Py2
MNRILVWTAAATLAALSMFAPPARAAEVRGAGSTFAYPIIWKWAEAFRERTGHIVGYQSVGSSAGVNRIKDGVVDFGASDKPLKPEELEKYGLGQFPIVFGGVVPVFNVDGVGPGQLRFTGALLADIYLGKVTTWSDPAIRALNPDVKLPNAKIVVVHRSDGSGTTFNWVSYLAKASPEWKQQVGEGSAVAWPVGYGARGNEGVSTEVKRVPNAIGYVEYTYVVQVKLAYGLVQNRAGKFIAPSAAAFQAAALSFDWAGAKDFFVVITDSPAEDAYPIAATTFALMYREPKVPANSQAAFEFWRFALGEGEKFASELGYVPLPPALVQQVKDYWARTFKGGA

SEQ ID NO: 2773 - DNA, 1041 bp, Ignicoccus hospitalis KIN4/I
  CDS (1)..(1041): transl_table=11
atgaggactgcattagtagcttcgctcttgttgagccacgcggtcatagccgcttccctctacgggagcggctcgaccttcgtctatcccttcgtatccctcgcagcgtactactacaaggcagcccacgtaacgtatcaaggcgtgggctctggggccggcatagccaacttgctgaaccacctaaccgacttcgccgggagcgacgtgcctataccgaaggagaggtacgccccacttctctttgaggggaagcaagttgtacacgtaccagtagtggcgggctccgtggtagtgatatacaacgtacccgagctagggaacaaggtactcaagctggacggggaagtgctggcggaaatttacatgggtaagataaagtactgggacgaccctaggataaaggcgctccaagaccccgaggtggccgcgaagctcccccacaagccgataatagccgttcaccgctccgacgcctctggcactacagccgtcttcaccaagtacttggccaagtcttcggcggagtggaacgctaagataggttcccatttggtgataaactggcccgttgataaggtgggaaggggcatcggcgccccgaagaaccaaggagtcgccgcgaccgtcagtaagacgtcctacagcataggctacgtggagtacgcctacgcagtccaagcgaagctccccaccgccgccctgaagaacgctgagggtaacttcgtgctgcccactccggagaccataagcgccgccaccgccggcgccgcgaagcgctggatatgcgtgctccacgccccttacttctacgcagactcgctggtgctggccccgggcaaggactcctaccccatagtggcgaccccctacataatcttcttcagggactctccgaagctgaagcagatagtagacttcgtcaagtacttgctcagcgacgagcttcaaaaggcctccatcaagatgggctatgcgccgctgtccaagtcgttcaggcagcagctgctggccgagcttgaccaactgcttaggaggtaa

SEQ ID NO: 2774 - protein, 346 aa, Ignicoccus hospitalis KIN4/I
MRTALVASLLLSHAVIAASLYGSGSTFVYPFVSLAAYYYKAAHVTYQGVGSGAGIANLLNHLTDFAGSDVPIPKERYAPLLFEGKQVVHVPVVAGSVVVIYNVPELGNKVLKLDGEVLAEIYMGKIKYWDDPRIKALQDPEVAAKLPHKPIIAVHRSDASGTTAVFTKYLAKSSAEWNAKIGSHLVINWPVDKVGRGIGAPKNQGVAATVSKTSYSIGYVEYAYAVQAKLPTAALKNAEGNFVLPTPETISAATAGAAKRWICVLHAPYFYADSLVLAPGKDSYPIVATPYIIFFRDSPKLKQIVDFVKYLLSDELQKASIKMGYAPLSKSFRQQLLAELDQLLRR

SEQ ID NO: 2775 - DNA, 1041 bp, Enterobacter sakazakii ATCC BAA-894
  CDS (1)..(1041): transl_table=11
atgaaagttatgcgtaccaccgtcgcaactgttgtcgccgcgaccttatctctgagcgctttttccgctttcgcggcagcaagtctgactggcgcgggcgcaacattcccggcgccggtgtatgccaaatgggcggatacctaccagaaagaaacgggtaacaaggtaaactaccagggtatcggctcctccggtggcgttaaacaaatcattgctaacacagttgattttggtgcttctgacgcgccgctttctgacgaaaaattacagcaagaagggcttttccagttcccgaccgtgatcggcggcgtggtgctggcggttaacctgccgggcttcaagtctggcgaactggtgctggatggcaaaaccctgggcgacatctaccttggcaaaatcaagaagtgggatgacgaggctatcgccaaactgaacccgggcaaaaaactgccttctcagaatatcgccgtggtgcgccgcgctgacggttccggtacgtctttcgtcttcaccagctatcttgcgaaagtgaacgacgagtggaaatccaaaatcggctctggctctaccgttaactggccgaccggtcttggcggtaaaggtaacgacggtatcgccgcgttcgtacagcgtctgccgggctctatcggctatgtggaatacgcctacgccaagcagaataacctgacctacaccaaactggtttctgctgacggcaaaccggtcgcaccgaccgaagagagcttcgccaacgccgccaaaggcgctgactggagcaaatccttcgcgcaggacctgaccaaccagaaaggcgatgacgcgtggccaatcacctccaccaccttcattctggttcacaaagagcagaagaaacctgagcagggcgccgaagtgctgaagttcttcgactgggcctacaagtcaggcgcgaaacaggctaacgacctggattacgcctctctgccggacagcgtggttgagcaggttcgcgccgcatggaagaccaacgtgaaagacagcagcggcaaagcgctgtattga

SEQ ID NO: 2776 - protein, 346 aa, Enterobacter sakazakii ATCC BAA-894
MKVMRTTVATVVAATLSLSAFSAFAAASLTGAGATFPAPVYAKWADTYQKETGNKVNYQGIGSSGGVKQIIANTVDFGASDAPLSDEKLQQEGLFQFPTVIGGVVLAVNLPGFKSGELVLDGKTLGDIYLGKIKKWDDEAIAKLNPGKKLPSQNIAVVRRADGSGTSFVFTSYLAKVNDEWKSKIGSGSTVNWPTGLGGKGNDGIAAFVQRLPGSIGYVEYAYAKQNNLTYTKLVSADGKPVAPTEESFANAAKGADWSKSFAQDLTNQKGDDAWPITSTTFILVHKEQKKPEQGAEVLKFFDWAYKSGAKQANDLDYASLPDSVVEQVRAAWKTNVKDSSGKALY

SEQ ID NO: 2777 - DNA, 1071 bp, Citrobacter koseri ATCC BAA-895
  CDS (1)..(1071): transl_table=11
atgatttacgaaaatcttgcaggagacattatgaaagtcatgcgtaccactgtcgcaactgttgtcgccgcgaccttatccatgagcgcgttctctgctttcgcagcagcgagcctgacaggtgcaggtgcaactttccctgcgccggtgtatgccaaatgggctgatacctatcagaaagagaccggtagcaaagtaaactaccagggtatcggctcctccggtggtgtaaaacaaattacggctaacaccgttgatttcggtgcatccgacgctccgttgtctgatgaaaaactggagcaggaaggtctgttccagttcccgaccgtcattggcggcgtagtgctggcggtgaatatcccgggtctgaagtctggcgaactggtgctggatgggaaaaccctgggtgacatctacctgggtaaaattaagaagtgggatgatgaagccatcaccaaactgaatccgggtctgaaactgccttctcagaacatcgccgttgtgcgtcgtgcagatggttccggcacttctttcgttttcaccagctacctggcgaaagtgaacgaagagtggaaatctaaagtcggcgctggctctaccgttaactggccgaccggtctgggcggtaaaggtaacgacggtatcgccgcattcgtacagcgtctgccaggctctatcggctatgttgaatacgcttatgcgaagcagaacaacctggcttacaccaaattgatttcagcggatggtaaacccgtaagcccgaccgaagagagctttgctaacgccgcgaaaggcgctgactggagcacctctttcgctcaggatctgacgaaccagcaaggtgacgatgcgtggccaatcacttccaccaccttcatcctggtccacaaagagcagaagaaacctgagcagggcgctgaagtgctgaagttcttcgactgggcgtacaaaaatggcggcaaacaggcgaatgacctggattacgccagcctgccggacagcgttgttgagcaggttcgtgcagcatggaagaccaatgtgaaggacagcagcggtaaagcgctgtactaa

SEQ ID NO: 2778 - protein, 356 aa, Citrobacter koseri ATCC BAA-895
MIYENLAGDIMKVMRTTVATVVAATLSMSAFSAFAAASLTGAGATFPAPVYAKWADTYQKETGSKVNYQGIGSSGGVKQITANTVDFGASDAPLSDEKLEQEGLFQFPTVIGGVVLAVNIPGLKSGELVLDGKTLGDIYLGKIKKWDDEAITKLNPGLKLPSQNIAVVRRADGSGTSFVFTSYLAKVNEEWKSKVGAGSTVNWPTGLGGKGNDGIAAFVQRLPGSIGYVEYAYAKQNNLAYTKLISADGKPVSPTEESFANAAKGADWSTSFAQDLTNQQGDDAWPITSTTFILVHKEQKKPEQGAEVLKFFDWAYKNGGKQANDLDYASLPDSVVEQVRAAWKTNVKDSSGKALY

SEQ ID NO: 2779 - DNA, 1041 bp, Serratia proteamaculans 568
  CDS (1)..(1041): transl_table=11
atgaaactgatgcgtaccaccgtcgccagtattgtggcagcgactttctccctgaccgccgtgtccgcgttcgctgctgctagcctgaccggtgcaggtgcgacattccccgctccggtttatgccaagtgggcagattcttatcagaaagaaaccggcaacaaagttaactatcagggcatcggctcttctggtggcgtgaagcaaatcatcgccaacaccgttgactttggtgcttccgatgcgccgttgagtgacgaaaaactggctgctgatggcctgttccagttccctaccgtgatcggtggcgtggtgctggcagtaaacattccgggcatcaaatccggtgagctgaccctggacggtaaaactctgggcgatatctatctgggtaacgtgaaaaaatggaacgacccggcgatcaccaagctcaacccaggcgttaagctgccggatcagaacattgccgttgtccgtcgtgctgatggttcaggcacctcgttcgtgttcaccagctacctgtctaaagccaacgcgcagtggaaagagaaaatcggcgcaggctctaccgttaactggccaaccggtctgggcggcaagggtaacgacggtatcgcagccttcgtacaacgtctgccaggttctatcggctacgttgaatacgcttacgccaagcagaacaacctggcttacaccaagctgatttctgccgatggcaaagcggttagcccgacggaagagagcttcagcgccgctgccaaaggcgtggactggagcaagaccttcgcacaggacctgactgaccagaaaggcgacaacgcctggccaatcacctccactaccttcatcctggtgcacaaagagcagaaaaacccggctcagggcaccgaagtcctgaagttctttgactgggcgtacaaaacgggcgccaagcaggctaatgacctggattacgccactctgccgaatgaagtgatcgagcaggtgcgtgcagcatggaaaaccaacgtaaaagacagttccggtaaagcgctgtactag

SEQ ID NO: 2780 - protein, 346 aa, Serratia proteamaculans 568
MKLMRTTVASIVAATFSLTAVSAFAAASLTGAGATFPAPVYAKWADSYQKETGNKVNYQGIGSSGGVKQIIANTVDFGASDAPLSDEKLAADGLFQFPTVIGGVVLAVNIPGIKSGELTLDGKTLGDIYLGNVKKWNDPAITKLNPGVKLPDQNIAVVRRADGSGTSFVFTSYLSKANAQWKEKIGAGSTVNWPTGLGGKGNDGIAAFVQRLPGSIGYVEYAYAKQNNLAYTKLISADGKAVSPTEESFSAAAKGVDWSKTFAQDLTDQKGDNAWPITSTTFILVHKEQKNPAQGTEVLKFFDWAYKTGAKQANDLDYATLPNEVIEQVRAAWKTNVKDSSGKALY

SEQ ID NO: 2781 - DNA, 1125 bp, Frankia sp. EAN1pec
  CDS (1)..(1125): transl_table=11
atggacgaaggattgctagtgaacctaggcaagcgtcagatcgtcgcgggcctcgccgccgcggcgctgctctctctggccgcgtgtggctcggacgacaacaccgacaccgcggacgggaccgcgcccacggcctccgccggcgcgatcgactgcgccaaggggtcgatcaccgggtcggggtcctccgcgcagaagaacgcgatggacgagtgggtctcggcctaccaggacgcctgtgacggcgccaccatcaactaccagggctccggctcgtcgacgggacgccagcagttcatcgacaagcaggtcaccttcgcggggtccgactccgcactgaaggatgcccagaagaccgcggcggacgcccgctgcaccggcggcgcggccgtcgacatcccgatggtcgtcgggcccatctcgctcatctacaatcttgacggtgtcgacaagctgaacctcagcccgtcggccatcgcgaagatcttctccggtgcgatcaccaagtggaacgacccggcgatcgccgccgacaactccggcgtcagcctgccggacgctcccatccaggcggtccaccgctcggacggctcgggcacgacggacaacttcaccaagttcctcaagggcgccgcggcgtccgactggaccttcgagggcggctccgactggaccgcgccgggtggccagggcgccaagggcagtgacggtgtgacctcgaccgtcaagtccaccccgaacgcgatcggctacgtcgagctctcctacgcggagaacgccagcctgccgaccgcgctggtcggcaacgcctccgacgagttcatcgcggcgagcaccgacgccgcctcgatcggcatcagctccgccaaggtcgccgacggcgacgacctcaagctcaccttcgactacaccacggcgaccaagggtgcctacccgatctacctggccacctacgagatcgtctgcaccgccggcactcccgccgaccaggctccgctcctcaagagcttcctgacctacatcgcgtccgcggacggccaggccgcgatcggtgacctcggctacgccccgctgccggacgagatcgccacgaaggtccgcggcgtcatcgccaagatcgcctga

SEQ ID NO: 2782 - protein, 374 aa, Frankia sp. EAN1pec
MDEGLLVNLGKRQIVAGLAAAALLSLAACGSDDNTDTADGTAPTASAGAIDCAKGSITGSGSSAQKNAMDEWVSAYQDACDGATINYQGSGSSTGRQQFIDKQVTFAGSDSALKDAQKTAADARCTGGAAVDIPMVVGPISLIYNLDGVDKLNLSPSAIAKIFSGAITKWNDPAIAADNSGVSLPDAPIQAVHRSDGSGTTDNFTKFLKGAAASDWTFEGGSDWTAPGGQGAKGSDGVTSTVKSTPNAIGYVELSYAENASLPTALVGNASDEFIAASTDAASIGISSAKVADGDDLKLTFDYTTATKGAYPIYLATYEIVCTAGTPADQAPLLKSFLTYIASADGQAAIGDLGYAPLPDEIATKVRGVIAKIA

SEQ ID NO: 2783 - DNA, 1116 bp, Azorhizobium caulinodans ORS 571
  CDS (1)..(1116): transl_table=11
atgggcggtccaaagttgcgtcaggacgggaacgtcccgtggcagcacctgattggcaatggagagaaccccgtgaagctcacccatattctcggcgcagccctcgctgtggccggcaccctcgtcgccggtaacgcgtctgccctcgatttcaacggcgctggcgcgtccttcccggccccggtctatcagtcctggggtgcgaagtataaagagaagaccggcaacggcctgaactaccagtccatcggctccggcggcggtcagaaccagatcatcaaccgcaccgtggacttcggcgcctccgacgcccctgttgagggtccgaagctggcctccaacaacctgctgcagttcccggccgtgatcggctccatcgtcgccaccgtgaacctcgacggcatccagaccgagcagctcaagctgaccggcccggtcctcgccgacatctacctcggcaagatcaccaagtggaacgacaaggcgatcgccgacctcaacgccggcgtgaagctccccgaccaggcgatcgtcccggtgtatcgttcggacgcctcgggcacctcctacgtcttcacctcctacctcgctgaagtcagcgcggactggaaggccaaggtcggcgccgccacctccgtgcagtggccgacgggcgcgggcgccaagggcaacgaaggcgttgccggcaccgtgaagaacaccaagggcgccatcggctacgtcgagttcgtgtacgccgccgccaacaagctggtcgtgacccagctccagaacaaggccggcaagttcgtcgccccgacggtcccggccttcatggaagccgccgctgccgccgactgggccggctcgaaggacttcgccgcctccatgctgaacacgcccggcgccaatgcgtggccgatcgtgtccgccacctacatcctgctgccgaagaaccccaccaacgtggacgcttccaaggaagtgatgaagttcttccagtgggcctacaccaaggaaggtggcgagatcgccgagaagcttcactacatcccgctccccgaggcggtcgtgaagcgcgtcgaggaagcctggaaggctgaagtgaaggctccggacggcaagccggtgttctga

SEQ ID NO: 2784 - protein, 371 aa, Azorhizobium caulinodans ORS 571
MGGPKLRQDGNVPWQHLIGNGENPVKLTHILGAALAVAGTLVAGNASALDFNGAGASFPAPVYQSWGAKYKEKTGNGLNYQSIGSGGGQNQIINRTVDFGASDAPVEGPKLASNNLLQFPAVIGSIVATVNLDGIQTEQLKLTGPVLADIYLGKITKWNDKAIADLNAGVKLPDQAIVPVYRSDASGTSYVFTSYLAEVSADWKAKVGAATSVQWPTGAGAKGNEGVAGTVKNTKGAIGYVEFVYAAANKLVVTQLQNKAGKFVAPTVPAFMEAAAAADWAGSKDFAASMLNTPGANAWPIVSATYILLPKNPTNVDASKEVMKFFQWAYTKEGGEIAEKLHYIPLPEAVVKRVEEAWKAEVKAPDGKPVF

SEQ ID NO: 2785 - DNA, 1041 bp, Delftia acidovorans SPH-1
  CDS (1)..(1041): transl_table=11
atgaagttgtctgtgattcacattctggtggctggtgctctgtctgcgggcggtatgggccaggccctggcccagcaggaagccaccggcgccggcgccagcttccctgcgccgctgtactcgaagtgggccgccgattaccacaaggccaccggcgtgaagatcaactaccagtccgtgggctccagcgccggcatcaagcagatcgaagccaagaccgtggacttcggtgcttcggacgagccgctcaaggacgacgaactggccaagaagggcctggtgcaattccccaccgtgatcggcggcatcgtgcccgtggtcaatatcaagggcatccagcccggccagctcaagctgaccggccaggtgctgggcgacatctacctgggcaagatcaccaagtggaacgacgaggccatcaaggccctgaaccccggcgtgaccctgcctgacgccaccatcgctcccgtgcgccgtgctgacggctcgggcaccaccttcggcttcacgaactacctgtccaaggtcaatgccgagtggaaggaaaaggttggcgaaggcaaggccgtgaactggcccacgggtgccggcggcaagggcaatgaaggcgtggccgctttcgtgggccgcctgcccaactccatcggctacgtcgagtacgcctatgtcaagcaaaacaagctgacctacacgcagctgcagaccgctggcggcgccttcgtgtcgcccgacgacgccaccttcaaggccgctgccgccggtgccgactgggccaagagcttctaccagatcctgaccaaccagcccggcaaggatgcatggcccatcacctcggccacgttcatcatcatgcacaaggcccaggacaagcccgcacaggccgctgcctcgctgaagttcttcgagtgggcctacaagtccggcgacaagaccgccaccgacctggactacgtgcccatgcctgacgccgtcaagaacgtgatcttccaatcctggggtcaagtcaaggatgcctcgggtaccgcgatttccctgaagtaa

SEQ ID NO: 2786 - protein, 346 aa, Delftia acidovorans SPH-1
MKLSVIHILVAGALSAGGMGQALAQQEATGAGASFPAPLYSKWAADYHKATGVKINYQSVGSSAGIKQIEAKTVDFGASDEPLKDDELAKKGLVQFPTVIGGIVPVVNIKGIQPGQLKLTGQVLGDIYLGKITKWNDEAIKALNPGVTLPDATIAPVRRADGSGTTFGFTNYLSKVNAEWKEKVGEGKAVNWPTGAGGKGNEGVAAFVGRLPNSIGYVEYAYVKQNKLTYTQLQTAGGAFVSPDDATFKAAAAGADWAKSFYQILTNQPGKDAWPITSATFIIMHKAQDKPAQAAASLKFFEWAYKSGDKTATDLDYVPMPDAVKNVIFQSWGQVKDASGTAISLK

SEQ ID NO: 2787 - DNA, 1071 bp, Salmonella enterica subsp. arizonae serovar 62:z4,z23:--
  CDS (1)..(1071): transl_table=11
atgatttaccgaaaccgtgcaggagacattatgaaagttatgcgtaccactgtcgcaactgttgtcgccgcgaccttatcgatgagcgcgttctcttcttttgccgcagcaagcctgacaggtgccggtgcaacgtttcctgcgccggtgtatgccaaatgggcggatacctaccagaaagaaaccggtaacaaagttaattaccaggggattggctcttccggcggcgtgaaacaaattaccgcgaataccgttgattttggcgcgtccgatgcgccactgtctgatgaaaaactcaatcaggaaggcctgttccagttccctaccgtcattggcggtgttgtgttagccgttaacattccgggcctgaaatccggcgagctggtgctcgacggtaaaaccttgggcgatatctacctgggtaaaatcaagaaatgggatgacgaagtcatcaccaaactgaaccctggcgttaagttgccttctcagaacatcgccgtggtgcgtcgcgctgacggttccggtacctccttcgttttcaccagctacctggcaaaagtcaacgatgagtggaaatcgaaagtgggggcgggttctaccgtgaactggccaaccggcctgggcggtaaaggtaacgacggcatcgcggcgttcgtccagcgtctgccgggcgctatcggttatgttgaatacgcttacgctaagcagaacaacctggcctataccaaactgatttctgctgatggcaaaccagtaagtccgacggaagaaagcttctctaatgcggcgaaaggcgcagactggagcaaaaccttcgcgcaggatctgaccaaccagaaaggtgacgatgtgtggccaattacctctaccacgtttatcctggttcacaaaacgcagaaaaaacctgagcagggcgctgaagtgttgaagttctttgactgggcgtacaaaaatggcgctaaacaggcgaatgatctggattatgccagcctgccggataacgtcgttgagcagattcgtaccgcctggaagaccagcataaaagacaacagcggtaatgcgttgtattaa

SEQ ID NO: 2788 - protein, 356 aa, Salmonella enterica subsp. arizonae serovar 62:z4,z23:--
MIYRNRAGDIMKVMRTTVATVVAATLSMSAFSSFAAASLTGAGATFPAPVYAKWADTYQKETGNKVNYQGIGSSGGVKQITANTVDFGASDAPLSDEKLNQEGLFQFPTVIGGVVLAVNIPGLKSGELVLDGKTLGDIYLGKIKKWDDEVITKLNPGVKLPSQNIAVVRRADGSGTSFVFTSYLAKVNDEWKSKVGAGSTVNWPTGLGGKGNDGIAAFVQRLPGAIGYVEYAYAKQNNLAYTKLISADGKPVSPTEESFSNAAKGADWSKTFAQDLTNQKGDDVWPITSTTFILVHKTQKKPEQGAEVLKFFDWAYKNGAKQANDLDYASLPDNVVEQIRTAWKTSIKDNSGNALY

SEQ ID NO: 2789 - DNA, 1023 bp, Burkholderia multivorans ATCC 17616
  CDS (1)..(1023): transl_table=11
atgcaaaccgcgattgccggcctggctggcgcgcttttcgccgttgccgcccacgcagccgacatcacgggggcaggcagcacgttcgcgatgccgatctacacgaaatgggctgccgattatcagcagtccggcggcgcgaaggtcaactaccagggtatcggttcgtcgggcggcctgaagcagatcgtcgcgaagacggtcgatttcgccggttcggacgcaccgctgaaggatgacgaactcgcgaaggaaggcctgttccagttcccgacggtcgtcggcggcgtggtgccggtcgtcaacgtgccgggcgtgaaggccggcgaactgacgctgtcgggcccggtgctcggcgacatctatctcggcaagatcaagaagtggaacgatccggccatcgccgcgctgaacccgaaggtcaagctgccggatacggacatcgcggtcgttcgccgcgcggacggctcgggcacgagcttcatctggacgaactacctgtcgaaggtcaacggcgagtggaagtcgaagatcggtgaaggcacgacggtcaactggccgacgggtacgggcggcaagggcaacgacggcgtcgccgcgttcgtccagcgtctgccgggcgcgatcggctacgtcgagtgggcgtacgcgaagaagaacaacatgacgtacacggcgctgaagaattcgtcgggcgcggtcgtcgagccgaagaccgaaacgttcaaggccgcggccgcgagcgcgaactggtcgaagtcgttctaccagatcctgacggacgagccgggcaaggacgcatggccggtcgtcggcgcgacgttcgtgctgctgcacgcgaagcaggacaagccgggtcagggcgcggaaacgctgaagttcttcgactgggcgttcaagaacggcgagaaggcagccgacagcctcgactacatctcgctgccggcggcagtcacggccgagatccgcaagcagtggaaggtgaaggtgaccgacgcgtcgggcaagccggtcgcggagtaa

SEQ ID NO: 2790 - protein, 340 aa, Burkholderia multivorans ATCC 17616
MQTAIAGLAGALFAVAAHAADITGAGSTFAMPIYTKWAADYQQSGGAKVNYQGIGSSGGLKQIVAKTVDFAGSDAPLKDDELAKEGLFQFPTVVGGVVPVVNVPGVKAGELTLSGPVLGDIYLGKIKKWNDPAIAALNPKVKLPDTDIAVVRRADGSGTSFIWTNYLSKVNGEWKSKIGEGTTVNWPTGTGGKGNDGVAAFVQRLPGAIGYVEWAYAKKNNMTYTALKNSSGAVVEPKTETFKAAAASANWSKSFYQILTDEPGKDAWPVVGATFVLLHAKQDKPGQGAETLKFFDWAFKNGEKAADSLDYISLPAAVTAEIRKQWKVKVTDASGKPVAE

SEQ ID NO: 2791 - DNA, 1005 bp, Gluconacetobacter diazotrophicus PAl 5
  CDS (1)..(1005): transl_table=11
atgcgtcgttctgtcacagtgtttgccgccgtccttctgggaactgccccggttgccctttccgtcgcgcatgccgcgaacatcaccggtgccggctccagcttcgccgccccgatctacgaggcctggggttcggccggccgtagcgccagcggcgtcgccgtcaactaccagagcgtcgggtccagcgcgggccagaaccagatcctggccggcacggtcgatttcggcgcctcggatgccccgatggaccccgccaagctgcagaagggcgcgctgttccagttcccgacggtcatgggcggcatcgttccggtcgtgaacatcccgggcatcgccgcgaacacgctgcgcctgaccggcgaggtgctggccggcatctattcgggcgacatctcctcgtggaacgatgcgaagatcaccgccctgaacccgggcgtgaacctgccggacctgcccatcgcgacggtgcaccgcgccgacgggtcgggcacgaccttcgtgttcacgtcctacctcgcacgctcgtcgcaggcgtggcatgacggcacgggcgccggcagctcgatttcctggcccggcggtgtcggcgcgcgcggcaatgacggcgtcgcggcgtcggtccgcaacaccgaaggcggcatcggctatgtcgaatatgcctatgccagccgcaaccatatgacgacggtgcagctgaaggacaaggccggcgatttcgtgaccgccgacctggacagcttctcgcgcgccgccgccgccgccgactggaagggcgccgccaatttcgcggtcgacctgctggatacgtccggcaagggcgcgtggccgatcgtctcggcgacctacgtgctggtgccgaagcaggcgaaggatgccgcccagggcgcggccgtgcgtaaattcttcggctgggcattcgacaatggcgacggcattgcccgtggcctggactacgtcgtcctgccggccgaggtgaaggcgtcgattcgcgccgcctggtaa

SEQ ID NO: 2792 - protein, 334 aa, Gluconacetobacter diazotrophicus PAl 5
MRRSVTVFAAVLLGTAPVALSVAHAANITGAGSSFAAPIYEAWGSAGRSASGVAVNYQSVGSSAGQNQILAGTVDFGASDAPMDPAKLQKGALFQFPTVMGGIVPVVNIPGIAANTLRLTGEVLAGIYSGDISSWNDAKITALNPGVNLPDLPIATVHRADGSGTTFVFTSYLARSSQAWHDGTGAGSSISWPGGVGARGNDGVAASVRNTEGGIGYVEYAYASRNHMTTVQLKDKAGDFVTADLDSFSRAAAAADWKGAANFAVDLLDTSGKGAWPIVSATYVLVPKQAKDAAQGAAVRKFFGWAFDNGDGIARGLDYVVLPAEVKASIRAAW

SEQ ID NO: 2793 - DNA, 1110 bp, Sorangium cellulosum 'So ce 56'
  CDS (1)..(1110): transl_table=11
atggctcgaattctgctcaccctggcgatgttcctcctgaccgcggcgtgcggtcgctccgatgccccccaggaaaccggctctctccccggcgcgaagaaggacagcgcgccgcagccgaccgctgacggggacatcaccttgacgggcgcgggtgcgacgttcccgtaccctctctacacgaagtggatcgctgagttccagaaggccaactccaaggtcaagatcaactaccagtccatcggctctgggggggggatccggcagatcaccgagcggaccgtcgacttcggcgcctccgatgcgccgatgaacgaggagcagatcgggaaggccgccggcatccttcacctgccgacgtgcctgggcgcggtcgtgctgacctacaacctcgagggcgtcccgtctggcctgaagctcacgccggaggcggccgcgcacatcttcctgggcaagatcaagaagtggaacgacccggccctccagaaggagaacccggacgtgaagctccccgacaaggagatcgcgacggtccaccgctcggacggcagcgggacgaccaagatcttcgtcgactacctgagcgcggtcagcccggagtggaagagcggaccagggaccgggacaagcgtcaactggcctggcggcctcggcgccaagggcaacgacggcgtctccgccctgatcacgagcacgccggcctcgatcggctacatcgagctcgcgtacgcgatgcagaacaagctcacgttcgcctcgctcaagaacaagagcgggaagttcatcaccccgtcgctggagagcacgaccgccgcgggcgccggcgccgccgccaggatgcccgacgacctccggatctcgctcgtggatgccgagggcgaggacgcctaccccatcgccggcttcacgtatctcctcgtgtaccaggagcagaaggacctcgcgaagggcaaggtgctctccagcttcatcaagtgggcgatgcaagacggccagaagttcacgaacgacctccattacgccccgctgcccgcggcggtcatcgagaaggtcaacaagaagctcgccgcgctggtcggccctgacggcaagcccctgctcgccccatga

SEQ ID NO: 2794 - protein, 369 aa, Sorangium cellulosum 'So ce 56'
MARILLTLAMFLLTAACGRSDAPQETGSLPGAKKDSAPQPTADGDITLTGAGATFPYPLYTKWIAEFQKANSKVKINYQSIGSGGGIRQITERTVDFGASDAPMNEEQIGKAAGILHLPTCLGAVVLTYNLEGVPSGLKLTPEAAAHIFLGKIKKWNDPALQKENPDVKLPDKEIATVHRSDGSGTTKIFVDYLSAVSPEWKSGPGTGTSVNWPGGLGAKGNDGVSALITSTPASIGYIELAYAMQNKLTFASLKNKSGKFITPSLESTTAAGAGAAARMPDDLRISLVDAEGEDAYPIAGFTYLLVYQEQKDLAKGKVLSSFIKWAMQDGQKFTNDLHYAPLPAAVIEKVNKKLAALVGPDGKPLLAP

SEQ ID NO: 2795 - DNA, 1122 bp, Renibacterium salmoninarum ATCC 33209
  CDS (1)..(1122): transl_table=11
atgaaggtacttcgctacggtcgtgttgcggctgtcattgcggttggagccattgcgctcaccgcctgcggtggcaactcggtcaccaacaactcatccgccgcaggctcgtcctcgagcgccggcgtcgatgactccaaactttccggaaccattaccgctggtggatccagcgcgcaggctaacgcgcagaccgcgtggaccgctgggttcaaggccaaggcttccggagtcaccatcaactatgacaagtcgcagggttcgggcggtggcgtcactaacttcaccgctggttcgtatgacttcgctggttcggacgcttacttgagcgccgagcaggccacgaaggcacagaccgtttgcggtgctggcggcgcagtgaaccttccggtttaccttgacggcgtagcgatcgtcttcaacgtcaagggcgttgacaaacttcagctttccgctgacaccatcgccaagatcttcaagcagcaaatcaaatcttgggacgacgccgcaatcaaggctgacaacccgggcgcgactttgccggctaccgcgatcaccacggtgacccgttcggatggatctggcaccacgcagaacttcaccaactacttgagccaggttgcgccgtcggtctggactgacccggtttccaataaatggccggttgcaggctcgtccgcgcagcagggtggcgctggcgtagtcaacaccgtcaaggctggcgacggcaccatcggctacgccgaccactccgcaattggtgagctcaagtcggcatcagtcaaagccggcgacaagttcgttgctttcagtgcagacggcgtgaccaaggctatccagactggcgtgaccgcagcgcccagcgaagtcaagggcgatctgtcccagaagatcgattacaccaagctgacctccggcgatgcttacccgatcccgttgatctcttacgacatcgtctgcaccaagttcaaggacgccaagcaggctgaattggccaagggttacattggctacatcgcaagcgaagagggtcagaagatcgctgcgaagaacgctggcgccgctccgttgccgagcgagcttgccgccaagattcaggaaaccctcaagacggtttcctag

SEQ ID NO: 2796 - protein, 373 aa, Renibacterium salmoninarum ATCC 33209
MKVLRYGRVAAVIAVGAIALTACGGNSVTNNSSAAGSSSSAGVDDSKLSGTITAGGSSAQANAQTAWTAGFKAKASGVTINYDKSQGSGGGVTNFTAGSYDFAGSDAYLSAEQATKAQTVCGAGGAVNLPVYLDGVAIVFNVKGVDKLQLSADTIAKIFKQQIKSWDDAAIKADNPGATLPATAITTVTRSDGSGTTQNFTNYLSQVAPSVWTDPVSNKWPVAGSSAQQGGAGVVNTVKAGDGTIGYADHSAIGELKSASVKAGDKFVAFSADGVTKAIQTGVTAAPSEVKGDLSQKIDYTKLTSGDAYPIPLISYDIVCTKFKDAKQAELAKGYIGYIASEEGQKIAAKNAGAAPLPSELAAKIQETLKTVS

SEQ ID NO: 2797 - DNA, 1041 bp, Bordetella petrii DSM 12804
  CDS (1)..(1041): transl_table=11
atgttcaaccgtgtcttcaagcaaattaccatcggcgccgcattggccggcgccgttttcgccgtccaggccgccaacattactggcgccggcgcttcgttcccgtacccggtctacgccaagtgggcgtccgactacaaggctgccaccgacaacgccgtgaactaccagtcgatcggctcgggcggcggccagcagcaaatcaaggccaagacggtcgacttcggcgcctcggacgaccccctcaaggccgacgacctggaaaagaacggcctgctgcagttcccggccgtcattggcggcaccgtgccggtggtcaacatcgaaggcatcgagccgggccagctgaagctgtcgggccccttgttggccgacattttcctgggcaaggtcaagaagtgggacgatgccgccattaaggcgctgaaccccgaggccaagctgccttcggcggacatcatcgtggtgcaccgttccgacggctcgggcacgaccttcggctggaccaactacctgtcgaaagtctcgcccgaatggaaggaaaaggtcggcgagggcaaggccgtgaagtggcccaccgggcagggcggcaagggtaacgaaggcgtggccgcctacgtcggccagctgaagaactcaatcggctacgtcgaatacgcctacgccaagcagaacaagctggcctgggcccaattgcagaacaaagacggcaagttcgttcagcccgagcagtcggcctttgcagcggcggccgccaacgccgactggaagagcgcgcccggcatgggcgtggtgctgaccaacgagccgggcgccgaatcgtggcccgtcaccgccgccaccttcatcctggtgcacaaggtgcaggacaagcccgagcaaggccgcgccgtcctggagttcttcgactgggccttcaagaacggcaacgagtcggccgccgcgctggactacgtgccgctgcccgactcggtcacggccgaaattcgcgcagcctggggcgaaatcaagagcgccgacggcaagccggtctggaagtaa

SEQ ID NO: 2798 - protein, 346 aa, Bordetella petrii DSM 12804
MFNRVFKQITIGAALAGAVFAVQAANITGAGASFPYPVYAKWASDYKAATDNAVNYQSIGSGGGQQQIKAKTVDFGASDDPLKADDLEKNGLLQFPAVIGGTVPVVNIEGIEPGQLKLSGPLLADIFLGKVKKWDDAAIKALNPEAKLPSADIIVVHRSDGSGTTFGWTNYLSKVSPEWKEKVGEGKAVKWPTGQGGKGNEGVAAYVGQLKNSIGYVEYAYAKQNKLAWAQLQNKDGKFVQPEQSAFAAAAANADWKSAPGMGVVLTNEPGAESWPVTAATFILVHKVQDKPEQGRAVLEFFDWAFKNGNESAAALDYVPLPDSVTAEIRAAWGEIKSADGKPVWK

SEQ ID NO: 2799 - DNA, 1041 bp, Methylobacterium extorquens PA1
  CDS (1)..(1041): transl_table=11
atgaaacccttcacttacgctctggccgtcggcctcgcggccgcccagctcgcgacctcagccctggccgccgacatcaccggcgccggtgccaccttccccttccccgtctactcgaaatgggccgaggcctaccgcaaggataccggcacgggcctgaactaccagtcgatcggctcaggcggtggcatcaagcagatccaggccaagaccgtcgatttcggcgccaccgacgcgccgctgaagcccgcccagctcgagaaggacggcctcgtccagttcccgaccgtcatgggcggcgtcgtcccggtgatcaacgtcccgggcatcgaggccggcaaggtcaagctgaccggtgaactcctggccgacatctatgccggcaagatcctgaagtggtccgatccgaagatcgtcaagctcaacgacggcgtgaagctgcccgacgcgaacatcaccccggtctaccgctcggacgcctccggcacgaccaacatcttcaccacctatctctcctcggtctccgagccgtggaagaaggaattcggtgcggccaccacggtgagctggccggtcggccagggcggcaagggcaacgagggcgtgaccgccaccgtgaagcaggttccgaactcgatcggctacgtcgagtcggcctatgccaagcagaacaagctcgcctacacgctgatccagaacaaggccggcaagtatccgcagcccgatgacaaggcgttccaggccgccgccgccagcgccgactggaagtcgactccgggcttcggcatcacgctgaccaaccaggccggcgaggaagcgtggccgatcaccgccgccaccttcatcctggtccacaaggaggccgcggacgccgccaaggccggcgacgtgctgaagttcttcgactgggcctacaagaacggcgacaagctcgcgaccgaactcgactacgtgccgctgccggacaacgtcgtcggcctgatccacgaggagtggaagggcatcaagggcaaggacggcaaacccgtcttcggcatgtaa

SEQ ID NO: 2800 - protein, 346 aa, Methylobacterium extorquens PA1
MKPFTYALAVGLAAAQLATSALAADITGAGATFPFPVYSKWAEAYRKDTGTGLNYQSIGSGGGIKQIQAKTVDFGATDAPLKPAQLEKDGLVQFPTVMGGVVPVINVPGIEAGKVKLTGELLADIYAGKILKWSDPKIVKLNDGVKLPDANITPVYRSDASGTTNIFTTYLSSVSEPWKKEFGAATTVSWPVGQGGKGNEGVTATVKQVPNSIGYVESAYAKQNKLAYTLIQNKAGKYPQPDDKAFQAAAASADWKSTPGFGITLTNQAGEEAWPITAATFILVHKEAADAAKAGDVLKFFDWAYKNGDKLATELDYVPLPDNVVGLIHEEWKGIKGKDGKPVFGM

SEQ ID NO: 2801 - DNA, 1044 bp, Actinobacillus pleuropneumoniae serovar 3 str. JL03
  CDS (1)..(1044): transl_table=11
atgttattggtaaaaacagctaaaaaattcgttgttatcggactttcattaggcgtaatggcatcaagttatgctgaaacgattaccggtgcaggcgcttcatttccctatccgatttatgcgaaatgggcttcactttatgaaaaagaaacgggtaataaagtgaattatcaatctatcggttccggcggaggtcagcaacaaattatcgcaaaaacgattgatttcggtgcgtcggacgatccgatgaaagcggaattattggatcaacacaaattattacaattcccggcgattatcggcggtacggtaccggtggtgaacttaccggaatttaaagccggcgaattaaaattatccggtacggtattggcggatattttcctcggtaaaattactaaatggaatgacccggcgattaaagcgttaaacggttcattaaatttaccggataaaagtattgttgtagtacgtcgttcggacggttcgggtacaacattcggttggactaactatttatccaaagtgtcaccggaatggaaagaaaaagtcggtgaaggtaaatcggttaaatggcctaccggtcaaggcggtaaaggtaatgaaggcgtagccgcttatgtgaaacaacttaaatattccatcggttatgtcgaatatgcttatgcgaaacaaaataacttagcttgggcttcgttacaaaaccaagcgggtaaatttgtacaaccgtcacgcgaaagttttatggcggcggctgcaaatgcgcagtgggataaagcgaaaggtatgggtattgtgctaaccaatgaaagcggcgataattcatggcctgtgacggcggcaagtttcatccttgttcaccaacaggcggataatccgaccgcaaccaaagcggtgtttgacttcttcgattgggcttttgaaaaaggtaaaaatgcggcgtcggagttagattatgtgccgttaccggatgaagtcgtaacgaaaatcaaacaaaaatggcaaaacgaagtaaaagataaagacggtaaagcggttcgctaa

SEQ ID NO: 2802 - protein, 347 aa, Actinobacillus pleuropneumoniae serovar 3 str. JL03
MLLVKTAKKFVVIGLSLGVMASSYAETITGAGASFPYPIYAKWASLYEKETGNKVNYQSIGSGGGQQQIIAKTIDFGASDDPMKAELLDQHKLLQFPAIIGGTVPVVNLPEFKAGELKLSGTVLADIFLGKITKWNDPAIKALNGSLNLPDKSIVVVRRSDGSGTTFGWTNYLSKVSPEWKEKVGEGKSVKWPTGQGGKGNEGVAAYVKQLKYSIGYVEYAYAKQNNLAWASLQNQAGKFVQPSRESFMAAAANAQWDKAKGMGIVLTNESGDNSWPVTAASFILVHQQADNPTATKAVFDFFDWAFEKGKNAASELDYVPLPDEVVTKIKQKWQNEVKDKDGKAVR

SEQ ID NO: 2803 - DNA, 1131 bp, Mycobacterium abscessus
  CDS (1)..(1131): transl_table=11
atgaacctcaaggccgtgaatctcaaaagcaccggcaccacgatcttcgcggcggccgccgcggtcgctctgtccgcaagccttgccgcctgcggtagtgacaacaccaccggggcctcgtcgtccagcgccgtttccgcctcgggcgactgcgcgggtaaggccaagctgagcgcggagggctcctcggcgcagaagaacgcgttcgacatcttcgccaacgagtactcgaccgcgtgccccggcaagtcgatcaactacaaccccaccggctcgggcaagggtcgcgacaacttcatcgccggccaggtggacatcggcggctcggactcggcgctatcggaggaagaggcgggcaaggccaaggagcgctgcggcggcaacgaagcatggaacctgcccgttgtcttcggcccaatcgcgttggcgtacaacctccccggcgttgacaagctggttctgaacgcggataccgcggccaagatcttcaccggtgtcatcaccgcctggaacgaccccgcgatcgccgcgctgaacccgggtgcgaccctgccggacaccaaggtcaccccggtgtaccgcaaggacaagtccggtaccagcgagaacttcggcaagtacctcaccaccgcggccccggagagctggaccaagggcagcagcggcagctgggagggtggcgccggtgagagcgccgagaagtcctcgggcgtcgccgaaaaggtcaaggcgctgcccggagccatcacctatgtggaaaagggctacgccgacgacgtcaagctgccgtacgtccagatcgacagcggtgccggtgcggtggcgctgaccccggagaccgccgccgcgtcggtggagactgccaagttcgcgggtgagggcaatgacctcaagctcgatctggcctcgatctacgggaccaagaccgccggggcctacccgatcgtgttggccacctacgagattgtctgctccaagggttacaaggacgccgacgtcgcctccgcggtgaagtcgttcctgacggtcgcggtgaaccagggccagaaggggcttgccgatgtcggttacgcaccgctgcccgcgcagttcaagtcccgcctcgagacggccatcaaggcgctctcttag

SEQ ID NO: 2804 - protein, 376 aa, Mycobacterium abscessus
MNLKAVNLKSTGTTIFAAAAAVALSASLAACGSDNTTGASSSSAVSASGDCAGKAKLSAEGSSAQKNAFDIFANEYSTACPGKSINYNPTGSGKGRDNFIAGQVDIGGSDSALSEEEAGKAKERCGGNEAWNLPVVFGPIALAYNLPGVDKLVLNADTAAKIFTGVITAWNDPAIAALNPGATLPDTKVTPVYRKDKSGTSENFGKYLTTAAPESWTKGSSGSWEGGAGESAEKSSGVAEKVKALPGAITYVEKGYADDVKLPYVQIDSGAGAVALTPETAAASVETAKFAGEGNDLKLDLASIYGTKTAGAYPIVLATYEIVCSKGYKDADVASAVKSFLTVAVNQGQKGLADVGYAPLPAQFKSRLETAIKALS

SEQ ID NO: 2805 - DNA, 1041 bp, Escherichia coli SMS-3-5
  CDS (1)..(1041): transl_table=11
atgaaagttatgcgtaccaccgtcgcaactgttgtcgccgcgaccttatcgatgagcgctttctctgtgtttgcagaagcaagcctgacaggtgcaggtgcaaccttccctgcgccggtgtatgccaaatgggctgacacttaccagaaagaaaccggtaataaagttaactaccagggtatcggttcttccggtggcgtaaaacagattatcgcaaataccgttgatttcggtgcctctgacgcgccgctgtctgacgaaaaactggctcaggaaggcctgttccagttcccgaccgtgattggcggcgtggtgctggcggttaacattccagggctgaagtctggcgaactggtgctggatggtaaaaccctcggcgacatctacctgggcaaaatcaagaagtgggatgatgaagccatcgccaaactgaatccgggtctgaaactgccttcacagaacattgctgtagtacgccgcgcagatggctccgggacttccttcgtcttcaccagctacctggcgaaagtgaacgaagagtggaaaaacaacgttggtactggctctaccgtaaaatggccgatcggtctgggcggtaaaggtaacgacggtatcgccgcgttcgttcagcgtctgccgggtgcaattggttacgttgaatatgcttacgcgaagcagaacaacctggcgtacaccaaactgatctccgctgatggtaaaccggttagtccgaccgaagaaaacttcgctaatgcagcaaaaggcgcagactggagcaaaacattcgctcaggatctgactaaccagaaaggcgaagatgcatggcctatcacttctaccacgttcattctgatccataaagatcagaagaaacctgagcagggtgtagaagtgctgaagttcttcgactgggcgtacaaaaccggggctaaacaggctaacgacctggattatgccagcctgccggatagcgtagtggaacaggttcgcgctgcgtggaagaccaatattaaagacagtagcggcaagccgctgtactaa

SEQ ID NO: 2806 - protein, 346 aa, Escherichia coli SMS-3-5
MKVMRTTVATVVAATLSMSAFSVFAEASLTGAGATFPAPVYAKWADTYQKETGNKVNYQGIGSSGGVKQIIANTVDFGASDAPLSDEKLAQEGLFQFPTVIGGVVLAVNIPGLKSGELVLDGKTLGDIYLGKIKKWDDEAIAKLNPGLKLPSQNIAVVRRADGSGTSFVFTSYLAKVNEEWKNNVGTGSTVKWPIGLGGKGNDGIAAFVQRLPGAIGYVEYAYAKQNNLAYTKLISADGKPVSPTEENFANAAKGADWSKTFAQDLTNQKGEDAWPITSTTFILIHKDQKKPEQGVEVLKFFDWAYKTGAKQANDLDYASLPDSVVEQVRAAWKTNIKDSSGKPLY

SEQ ID NO: 2807 - DNA, 1041 bp, Methylobacterium radiotolerans JCM 2831
  CDS (1)..(1041): transl_table=11
ttgagacccttcgcttacgcgctcgccgtcggcctcgcgacggttcagctggcgtccgcggcgctcgccgccgatatcaccggcgccggcgccacgttccccttcccggtctactccaagtgggccgaggcctatcgcaaggagaccggctcgggcctcaactaccagtcgatcggctccggcggcggcatcaagcagatccaggccaagacggtcgatttcggcgccacggacgcgcccctgaaggccgagcagctgtccaaggacggcctcgtccagttcccgaccgtgatgggcggcgtcgtgccggtcgtgaacatcccggggatcgagccgggcaagctcaagctcaccggcgacgtgctggccgacatctacgccggcaagatcgcgaagtggagcgatccgcggatcgccaagctcaatgacgggctgaagctccccgacgccaacatcaccccggtctaccgctccgacgcgtcgggcacgaccaacatcttcaccacctacctgtcccaggtctccgagccctggaagaaggagtacggcgcggccacgacgatctcctggccggtgggtcagggcggcaagggcaacgagggcgtcaccgccaccgtgaagcaggtgccgaacgcgatcggctacgtcgagtcggcctacgccaagcagaacaagctctcctacgccctgctgcagaacaaggccggcaagtacccgcagcccgacgacaaggcgttccaggccgcggccgccagcgccgactggaaggccgccccgggcttcggcatctcgctgaccaaccagccgggtgaggaggcgtggccgatcacggcggcgaccttcatcctggtccacaaggacgccgccgatccggccaagtccgccgccgtgctgaagttcttcgactgggcctacaagaacggcgacaagctcgccaccgacctcgactacgtcccgctgccggacaacgtcgtcgaactgatccaccaggagtggaaggacgtgaagggcaaggacggcaagcctgtcctcaacatgtga

SEQ ID NO: 2808 - protein, 346 aa, Methylobacterium radiotolerans JCM 2831
MRPFAYALAVGLATVQLASAALAADITGAGATFPFPVYSKWAEAYRKETGSGLNYQSIGSGGGIKQIQAKTVDFGATDAPLKAEQLSKDGLVQFPTVMGGVVPVVNIPGIEPGKLKLTGDVLADIYAGKIAKWSDPRIAKLNDGLKLPDANITPVYRSDASGTTNIFTTYLSQVSEPWKKEYGAATTISWPVGQGGKGNEGVTATVKQVPNAIGYVESAYAKQNKLSYALLQNKAGKYPQPDDKAFQAAAASADWKAAPGFGISLTNQPGEEAWPITAATFILVHKDAADPAKSAAVLKFFDWAYKNGDKLATDLDYVPLPDNVVELIHQEWKDVKGKDGKPVLNM

SEQ ID NO: 2809 - DNA, 1041 bp, Methylobacterium sp. 4-46
  CDS (1)..(1041): transl_table=11
atgaaacgattcgccaccgcgctcgccatcgggctcgcgaccgcccagatcgccaccgccgccctcgcggccgacatcaccggcgccggcgccaccttcccgttcccggtctactcgaagtgggccgaggcctaccgcaaggaggccagcgtcggcctgaactaccagtcgatcggctccggcggcggcatcaagcagatccaggcccgcacggtcgatttcggcgccaccgacgcgcccctgaagggcgaggccctcgagaaggacgggctcgtgcagttcccgaccgtgatgggcggcgtcgtcccggtcgtgaacatccagggcgtgaagtcgggtgaggtgaagctcaccggcgagctcctcgccgagatctacgccggcaagatcaagaagtggtcagaccccaggatcgccaagctgaacgagagcgtgaagctccccgacgcggtgatcacgccggtctaccgctccgacgcgtccggcacgacgagcatcttcacgacctacctgtcggacgtgtcggccgattggaagaaggagttcggcgcctcgacgacgatcagctggccggccggccagggcggcaagggcaacgagggcgtcaccgccgtcgtgaagcaggtgccgaacgcgatcggctacgtcgagtacgcctacgccaagcagaacaagctgccggtggcgctgctccagaacaaggccggcaagttccccgagccgagcgacgaggccttccaggccgccgccgccaacgccgactggaagtccgccccgggcttcggcatcgcgctgaccaaccaggccggcgagaaggcgtggccgatcaccgccgccaccttcatcctggtgcccaagagccccagcgacccggcccgcgccgccgaggtgctgaagttcttctcctgggcctacaagaacggcgacaagctcgccagcgacctcgactacgtgccgctgcccgacgccgtcgtcggcctgatccaggacgagtggaagaaggtcaccggcaaggacggcaagccggtcctcggcatgtga

SEQ ID NO: 2810 - protein, 346 aa, Methylobacterium sp. 4-46
MKRFATALAIGLATAQIATAALAADITGAGATFPFPVYSKWAEAYRKEASVGLNYQSIGSGGGIKQIQARTVDFGATDAPLKGEALEKDGLVQFPTVMGGVVPVVNIQGVKSGEVKLTGELLAEIYAGKIKKWSDPRIAKLNESVKLPDAVITPVYRSDASGTTSIFTTYLSDVSADWKKEFGASTTISWPAGQGGKGNEGVTAVVKQVPNAIGYVEYAYAKQNKLPVALLQNKAGKFPEPSDEAFQAAAANADWKSAPGFGIALTNQAGEKAWPITAATFILVPKSPSDPARAAEVLKFFSWAYKNGDKLASDLDYVPLPDAVVGLIQDEWKKVTGKDGKPVLGM

SEQ ID NO: 2811 - DNA, 1095 bp, Xylella fastidiosa M12
  CDS (1)..(1095): transl_table=11
atgaaagtacattttgctggtttcactctcctttgtttatgcactgccgtaacaatcaccggctgtaaaccttccaacgataaccagtcaacaggcgtcagtcaggatgcgaacagtacgacgcccccctctgccgagcaaaccaagagtgtgaagatttcaggcgcaggtgcctcatttatatatccactgatctcgcaatggtcagccgactacaacgccgccactggcaataaaattaactatcagtcaatcggctcaggcggtggtattgcccaaatcaaagccgccacaatcgattttggttcttctgacaagccacttgacagcagcgaactgaccaaagcgggtctagggcagtttccatcggccataggcggcgtcgtgccggtggtcaatctagacaacatcgaaccaggcaaactacgccttacaggccccctgcttgcagatattttcctggggaagatcagtaagtggaatgacgcagcaatcatcagcgccaatccggggttacatcttcccgacactaaaatcaacatcgtgcatcgttccgatggctctggcacgacattcaatttcagcaactatctatcaaaagtcagcgcggaatggaaacagaaagtgggtgaaggcacttcagtgcagtggcccggaggcgtcggcggtaaaggcaacgaaggtgtagcctcatatgttcaacagattaaaggctcgatcggctacgttgaactggcgtatgcgcttcagaacaaaatgtcatatacagcactccagaacgctgctggtcaatgggtacaaccaagcgcagaaagctttgcagccgccgcatccaacgcagactggagcaatgcaaaggatttcaatttggtcatcaccaacgctactggggaaagcgcttggccaatcacagccacaaactttatattgatgcccaagcaaactaaggatgcagcgcaaagaaaagccactctagacttcttcaagtggtgctttgaaaatgggcagaaacaagccaatgaattacactacgtgccattgccaccaaatctggtgaagcaaatcgaagcttattgggcaagcgaattcaagtaa

SEQ ID NO: 2812 - protein, 364 aa, Xylella fastidiosa M12
MKVHFAGFTLLCLCTAVTITGCKPSNDNQSTGVSQDANSTTPPSAEQTKSVKISGAGASFIYPLISQWSADYNAATGNKINYQSIGSGGGIAQIKAATIDFGSSDKPLDSSELTKAGLGQFPSAIGGVVPVVNLDNIEPGKLRLTGPLLADIFLGKISKWNDAAIISANPGLHLPDTKINIVHRSDGSGTTFNFSNYLSKVSAEWKQKVGEGTSVQWPGGVGGKGNEGVASYVQQIKGSIGYVELAYALQNKMSYTALQNAAGQWVQPSAESFAAAASNADWSNAKDFNLVITNATGESAWPITATNFILMPKQTKDAAQRKATLDFFKWCFENGQKQANELHYVPLPPNLVKQIEAYWASEFK

SEQ ID NO: 2813 - DNA, 1053 bp, Leptothrix cholodnii SP-6
  CDS (1)..(1053): transl_table=11
atgagcaatgtgatcggtagcaagaggctggcttccacggtgttggctgctgcgacgctgtggtccctgtcgggtggtgtgcaagcgcagaacgtgaccggcgccggggccacgtttccggcgcccatctatgcaaaatgggccgatgctttccacaagctctccggcgcaaaggtgaattaccagtcggtggggtccggggctggcatacgccagatccaggccaagaccgtcgatttcggtgcctcggacatgcctctgagcgatgccgatctggccaaggacggtctggtgcagtttccgaccgtgatcggcggcgtggtgcccgtggtcaacatcaagggcatacagccggggcagatcaagctcaccggtgccgtgctcggcgacatctacctcggcaaggtgcgcaagtggagcgatccggcgatcactgcattgaacgctggcgttgcgcttcccgatgcgccgattgccgtcgtgcggcgggcggacggctcgggcaccagcttcatcttcaccaactacctgtcgaaggtgaatgccgagtggaagtccaaggtgggcgagggcacggccgtcaactggccgaccggtgcaggcggcaagggcaacgagggtgtctcggcgttcgtccagcgcctgcccaacgccatcggctacgtcgaatatgcctacgccaagcagggcaagatggcgtacgtgcagatgaagaacgcggcgggcaacttcgtgtcgccggacgacgccaacttcaaggcggccgccgctgcagcgaactggtcgaagtccttctatcaggtgctgaccgaacagcctggcaaggacgcctggccgctgacgggcgccaccttcatcctgatgcacaagcagcaggacaagccacagcaggcggtctccacgctgaagttcttcgactgggcttatgccagcggagacgcgatggccggcgaactcgagtacgtcgcgctgcctgaatccgtcaaggcgctggttcgcaagcagtggtccggcttcaaggacagcagcggcaaggccgtcgagtacaagtga

SEQ ID NO: 2814 - protein, 350 aa, Leptothrix cholodnii SP-6
MSNVIGSKRLASTVLAAATLWSLSGGVQAQNVTGAGATFPAPIYAKWADAFHKLSGAKVNYQSVGSGAGIRQIQAKTVDFGASDMPLSDADLAKDGLVQFPTVIGGVVPVVNIKGIQPGQIKLTGAVLGDIYLGKVRKWSDPAITALNAGVALPDAPIAVVRRADGSGTSFIFTNYLSKVNAEWKSKVGEGTAVNWPTGAGGKGNEGVSAFVQRLPNAIGYVEYAYAKQGKMAYVQMKNAAGNFVSPDDANFKAAAAAANWSKSFYQVLTEQPGKDAWPLTGATFILMHKQQDKPQQAVSTLKFFDWAYASGDAMAGELEYVALPESVKALVRKQWSGFKDSSGKAVEYK

SEQ ID NO: 2815 - DNA, 1182 bp, Thermoproteus neutrophilus V24Sta
  CDS (1)..(1182): transl_table=11
atgagggtggttttggcggcggtggtgggggcggtggcggcgttgctggcggtgggggctgtgttttttccgccgaagtgtctggcggcgtctggcggcgggggggttgcgctgggggttagggggactttggtggggggtggctcgtcttttgtggctccgcagatgtttgcctggtctagggagttctataggctgagcgggggggcggcggtggttaactaccagtctgtggggtctggggctggggttgcgcagcttctggagaggaggcttgacttcgccgcctctgacgtgcctctgccgcgggataggtacgccgccgtggggggtcgggttttccagtttcccgtggctgtgggctctatcgtggttgcctacaacgtcccggaggtggcgtatggggtgacggggaggtatctgaacctgacggctgaggttctggcgttgatctacatgggggttgttaggcagtggtgtgacgttaggattagggagctcaacccggggcttgcggataggctgccgtgtagagatatcgtggtggtgcacaggagcgacgggtctgggacaactgcggcgtttaccctcttcctctccaaggcctacccgccgtggaacagcacggtggggtgggggctggtggtgaggtggcctgtggacgcggtggggaggggggtgggggcgaaggggaacgagggggttgcgcaggcggtactgcagaacgcctactccatcggctatgtggagtacgcctactgggtgaagaaccgggggaggttcgacgaggtggggggcgtggcgtatgtgcggaacgacaacgacggcaggttctacttccccactgccgagtccgtttcggaggccgtgtcggccggccttgagaggtatttggcgaaacacggcgccccgcctggccccggcgacgactggaaccccgtttctgtggagttttccaacccgccgcggggctaccccctggtgactttcacctacgccgtggtgtggagggactactccgccgaggggtacagcggcgctggtgtgaagacgcgcctcctcaaggccttcttcaggtgggttctcacggaggggcaggggagcctggtggaggggtacatccccctccccagggaggtggccgaggtggggcttagggctgtggaaggggtgaggccgtag

SEQ ID NO: 2816 - protein, 393 aa, Thermoproteus neutrophilus V24Sta
MRVVLAAVVGAVAALLAVGAVFFPPKCLAASGGGGVALGVRGTLVGGGSSFVAPQMFAWSREFYRLSGGAAVVNYQSVGSGAGVAQLLERRLDFAASDVPLPRDRYAAVGGRVFQFPVAVGSIVVAYNVPEVAYGVTGRYLNLTAEVLALIYMGVVRQWCDVRIRELNPGLADRLPCRDIVVVHRSDGSGTTAAFTLFLSKAYPPWNSTVGWGLVVRWPVDAVGRGVGAKGNEGVAQAVLQNAYSIGYVEYAYWVKNRGRFDEVGGVAYVRNDNDGRFYFPTAESVSEAVSAGLERYLAKHGAPPGPGDDWNPVSVEFSNPPRGYPLVTFTYAVVWRDYSAEGYSGAGVKTRLLKAFFRWVLTEGQGSLVEGYIPLPREVAEVGLRAVEGVRP

SEQ ID NO: 2817 - DNA, 966 bp, Polynucleobacter necessarius subsp. necessarius STIR1
  CDS (1)..(966): transl_table=11
ttgctttggctccgcaagactggtgccggtgctacatttccttaccctgtgtatgccaagtgggcagaagcttataaagctaaaacaagctctaatttaaattaccaatccatcggatcttctggtggtattaagcagatcaaagctaaaatagtagattttggtgctactgataatccagtaaagtttgatgatttggaaaaagatggcctagttcagttcccagcaatcattggcggtgtagttccggtgattaacgtagatggtgtaaagccaggcgaaatcaaattagacggcccaacattggcagatatttttcaaggtgtcatttctgattggggtgataagcgaatcgccatcatgaatcctggtgtcaagattcctagcggtccaattactgtagttgtccgtgctgatggttcgggtacaacggcaatctttactgattacttggcgaaaactagctcaatctttaaagacgctgttggttctggtgcttcggtgaagtggccggctgcttctacagtcggcggcaagggtaatgagggtgtcgctgcaaatgtatcccgcgtaaagaactcggtgggttatgttgagtatgcctatgctaagaaaaacaagatgaccttcatctccctgaaaaataaggatggtcaatttgtagctccagatgaccttactttcgcggctgcagctgcaggcacagattgggctaagattccaggtatgggtatttttattaccaatgcatcgggcgctaaatcatggcctatcaccggggcatccttcatcttgatgcataaagatccagagagcaagtcaaatgcagctgaagtattaaaggtctttgactttgccttcaaagacagcaagaagatggctgaagatcttgactatgttccaatgccagattccactaccgactacattcgcaagaatatttggtcaaagatcaaggtgaagtga

SEQ ID NO: 2818 - protein, 321 aa, Polynucleobacter necessarius subsp. necessarius STIR1
MLWLRKTGAGATFPYPVYAKWAEAYKAKTSSNLNYQSIGSSGGIKQIKAKIVDFGATDNPVKFDDLEKDGLVQFPAIIGGVVPVINVDGVKPGEIKLDGPTLADIFQGVISDWGDKRIAIMNPGVKIPSGPITVVVRADGSGTTAIFTDYLAKTSSIFKDAVGSGASVKWPAASTVGGKGNEGVAANVSRVKNSVGYVEYAYAKKNKMTFISLKNKDGQFVAPDDLTFAAAAAGTDWAKIPGMGIFITNASGAKSWPITGASFILMHKDPESKSNAAEVLKVFDFAFKDSKKMAEDLDYVPMPDSTTDYIRKNIWSKIKVK

SEQ ID NO: 2819 - DNA, 1035 bp, Burkholderia ambifaria MC40-6
  CDS (1)..(1035): transl_table=11
atgaaattgatgcaaaccgcgattgccggcctggctggcgcgcttttcgccgttgccgcgcacgctgccgacatcacgggcgcaggtagcacgttcgccatgccgatctatacgaaatgggctgccgactaccagcagtccggcggcgcgaaggtgaactaccagggtatcggttcgtcgggcggcctgaagcagatcaatgcgaagacggtcgattttgccggttcggacgctccgctgaaggatgaagagctcgcgaaggaaggcctgttccagttcccgacggtggtcggcggcgtggtgccggtcgtcaacgtgccgggcgtgaaggccggcgaactgacgctgtcgggcccggtgctcggcgacatctacctcggcaagatcaagaagtggaacgatccggcgatcgttgcactgaacccgaaggtcaagctgccggacacggacatcgcggtcgttcgccgcgctgacggctcgggcacgagcttcatctggacgaactacctgtccaaggtgaacgacgagtggaagtcgaagatcggcgaaggcacgacggtcaactggccgacgggcacgggcggcaaaggcaacgacggcgtcgcggccttcgtgcagcgcctgccgggcgcggtcggctacgtcgagtgggcgtacgcgaagaagaacaacatggtctacaccgcgctgaagaattcgacgggcacggtggtcgagccgaagacggaaacgttcaaggccgccgcggccggcgcgaactggtcgaagtcgttctaccagatcctgacgaaccagccgggcaaggaagcatggccggtcgtcggcgcgacgttcgtgctgctgcacgcgaagcaggacaagccggagcagggcgccgaaacgctgaagttcttcagctgggcgttcaagaacggcgagaaggcggccgacagcctggactacatctcgctgccgccggcagtcgaggcggaaatccgcaagcagtggaagacgaaggtcacggacgcatcgggcaagccggtcgccgcggagtaa

SEQ ID NO: 2820 - protein, 344 aa, Burkholderia ambifaria MC40-6
MKLMQTAIAGLAGALFAVAAHAADITGAGSTFAMPIYTKWAADYQQSGGAKVNYQGIGSSGGLKQINAKTVDFAGSDAPLKDEELAKEGLFQFPTVVGGVVPVVNVPGVKAGELTLSGPVLGDIYLGKIKKWNDPAIVALNPKVKLPDTDIAVVRRADGSGTSFIWTNYLSKVNDEWKSKIGEGTTVNWPTGTGGKGNDGVAAFVQRLPGAVGYVEWAYAKKNNMVYTALKNSTGTVVEPKTETFKAAAAGANWSKSFYQILTNQPGKEAWPVVGATFVLLHAKQDKPEQGAETLKFFSWAFKNGEKAADSLDYISLPPAVEAEIRKQWKTKVTDASGKPVAAE

SEQ ID NO: 2821 - DNA, 1092 bp, Beijerinckia indica subsp. indica ATCC 9039
  CDS (1)..(1092): transl_table=11
atgaatctttcgcatctccgcatcgtcaggaggactctgctgacggcggctgtcctcgggttcaccagctcgcttcttccggcttttgcccctgttctcgattcggctaaagccgcgggaaccatcatcaccggcgcgggtgcgaccttccccttcccggtctatgccaaatgggccgaggcctatcagaaggaaaccggcatcggcatgaattatcagtcgatcggttccggcggcggcatcaagcagatcaaggcccgcacggtgaccttcggcgctaccgatgcaccgttgcaagccagtgaactcgccgaagcgggcctggtgcaatggccgcaggtcatgggcggcatcgtgcccgtggtcaatctcgacggcgtgaagccgggcgctctcgttcttgacggcgaaacgctggccaagatcttcctcggcacgatcaagacctgggatgatcccgccatcaaggctctcaatcccggcctgtctctgccttccaccgcgatcgccgttgtgcatcggtcggacggttccggcaccaccttcaacttcacggattatctgtccaaggtttccgcggactggaaggccaaggttggcgcctcgaccgccattgaatggcctgtcggcattggcgccaagggcaacgagggtgtggccaataatgtgctgcagaccaaaggctcgatcggctatgtcgaatatgcctatgcgaagcagagcagcttgacctttaccggcctcgtcaatcgcgagggcaagcaggttcagccgacatccgcctccttccaggcggcagcggccaatgccgattgggccaattcccctggtttctaccagatcctgaccaatcagcctggcgcggcctcctggccgatcacggcggcgaccttcatcctggtgccgaagcagcccacggacgagcaggccaccgctgccgcgctgaaattctttgactggtccttcgcccatggcgcgccgctggcggaacaactggattatatccccctgccggcttctgtcgtcagcctgatccagaagacctgggcggccgagatcaagggcgccaacggcaagccgctcgtcaactga

SEQ ID NO: 2822 - protein, 363 aa, Beijerinckia indica subsp. indica ATCC 9039
MNLSHLRIVRRTLLTAAVLGFTSSLLPAFAPVLDSAKAAGTIITGAGATFPFPVYAKWAEAYQKETGIGMNYQSIGSGGGIKQIKARTVTFGATDAPLQASELAEAGLVQWPQVMGGIVPVVNLDGVKPGALVLDGETLAKIFLGTIKTWDDPAIKALNPGLSLPSTAIAVVHRSDGSGTTFNFTDYLSKVSADWKAKVGASTAIEWPVGIGAKGNEGVANNVLQTKGSIGYVEYAYAKQSSLTFTGLVNREGKQVQPTSASFQAAAANADWANSPGFYQILTNQPGAASWPITAATFILVPKQPTDEQATAAALKFFDWSFAHGAPLAEQLDYIPLPASVVSLIQKTWAAEIKGANGKPLVN

SEQ ID NO: 2823 - DNA, 1032 bp, Burkholderia phymatum STM815
  CDS (1)..(1032): transl_table=11
atgaaactgatgcaaaccgcgttcgctggcatggctggcgctctctttgcgatcgcagcgcaggccgccgacatcaccggcgcgggcagcacctttgcagcaccgatctacacgaagtgggccgatgcgtaccagaagacgggcggcgggaaggttaactatcaaggcatcggctcatcgggcggcatcaagcagatcgtcgcaaagaccgtcgacttcgcgggctcggacgctccgctgaaggacgacgaactcgcgaaggaaggcctgttccagttcccgacggttgtcggcggcgtggttcccgttgtcaatgtgccgggcgtgaaggctggcgaaatcacgctgtcgggcgaagtgctcggcgacatttacctcggcaagatcaagaagtggaacgacccggcaatcgccgcactgaacccgaaggcaaagctgccggatacggacatcgccgtggtccgccgtgccgacggctcgggcacgtcgttcatctggacgaactacctgtcgaaggtcaacgcggagtggaagtcgaaggtcggcgaaggttcgacggtcagctggccgacgggtacgggcggcaagggcaacgacggcgtcgcggcattcgtgcagcgtttgccgggcgcaatcggctacgtcgagtgggcgtacgcgaagcagaaccacatgacgtacgtcgacatgaagaactcgtcgggtacggtcgtcgagccgaagacggaaacgttcaaggcagcggcagcgggcgcagactggtcgaagtcgttctaccagatcctgacgaacgagccgggcaagaacgcatggccgatcgtcggcgcgacgttcgtgctgctgcacacgacgcaggaaaagggtccgcaaggcgcggaaacgctgaagttcttcgactgggcgttcaagaacggcggccaggcggcaaacgatctggactacatctcgcttcctgaatccgtcgtgtcggaaatcaagacgcagtggaaggcaaaagtcaaggacgcatcaggcaagtcgctcgcagagtaa

SEQ ID NO: 2824 - protein, 343 aa, Burkholderia phymatum STM815
MKLMQTAFAGMAGALFAIAAQAADITGAGSTFAAPIYTKWADAYQKTGGGKVNYQGIGSSGGIKQIVAKTVDFAGSDAPLKDDELAKEGLFQFPTVVGGVVPVVNVPGVKAGEITLSGEVLGDIYLGKIKKWNDPAIAALNPKAKLPDTDIAVVRRADGSGTSFIWTNYLSKVNAEWKSKVGEGSTVSWPTGTGGKGNDGVAAFVQRLPGAIGYVEWAYAKQNHMTYVDMKNSSGTVVEPKTETFKAAAAGADWSKSFYQILTNEPGKNAWPIVGATFVLLHTTQEKGPQGAETLKFFDWAFKNGGQAANDLDYISLPESVVSEIKTQWKAKVKDASGKSLAE

SEQ ID NO: 2825 - DNA, 1032 bp, Burkholderia phymatum STM815
  CDS (1)..(1032): transl_table=11
atgagacacgcattgttcgcggcggccggcctgctcggtgcgctgtcgttttccttcgcgcacgcaaccgacgtcacgggtgcaggcagcaccttcgcggcgccggtctacacgaagtgggccgacgcctaccagaaggcgggcggcggccgcatcaactaccagggcatcggctcgtcgggcggcatcaaacaggtgctcgcaaaaaccgtcgatttcgccggttccgatgcgccgctcaaagacgacgaactcgcgaaagacgggctgttccaatttccgaccgtggtcggcggtgtggtccctgttgtcaatctgcgcgggatcaaaccgggtgggctggtgttgtccggtcccgtgctcggcgatatctacctcggcaagatcaagaagtggaacgacccgcagatcgccgcgctcaattcgggcgcgaaactgcccgacaccgacatcgccgttgtgcgccgcgcggacggctcgggcacgagcttcatctggacgcactatctcgcgcaggtgagtccggagtggaagagcaaggtgggcgaaggcacgaccgtcaactggccgacgggcacgggcggcaagggcaacgacggcgtcgcggcgttcgtgcagcggctgcctggcgcaattggctatgtggaatgggcgtacgcgaagcagaacaagatgacgtacacgtcgctgaagaacgcagcgggcgccgtcgtcgaaccgaagacggaaaccttcaaggccgcagcagcgggcgccgagtggtcgaagtcgttttatcagattcttaccaacgagccgggtaaggatgcgtggccggtggtgggcgcgaccttcgtgctcgtgcattcggcgcaggacaagccggatcacggcaaggaaaccctcaagttcttcgactgggcgttcaggaacggcagccagaccgcccaggaactcgactacatcacgctgcccgatgcagtcgtgtcggagatccgcgcgcagtggaaggccaaggtcaaggacgcgtcgggcaagccgatcgccgattga

SEQ ID NO: 2826 - protein, 343 aa, Burkholderia phymatum STM815
MRHALFAAAGLLGALSFSFAHATDVTGAGSTFAAPVYTKWADAYQKAGGGRINYQGIGSSGGIKQVLAKTVDFAGSDAPLKDDELAKDGLFQFPTVVGGVVPVVNLRGIKPGGLVLSGPVLGDIYLGKIKKWNDPQIAALNSGAKLPDTDIAVVRRADGSGTSFIWTHYLAQVSPEWKSKVGEGTTVNWPTGTGGKGNDGVAAFVQRLPGAIGYVEWAYAKQNKMTYTSLKNAAGAVVEPKTETFKAAAAGAEWSKSFYQILTNEPGKDAWPVVGATFVLVHSAQDKPDHGKETLKFFDWAFRNGSQTAQELDYITLPDAVVSEIRAQWKAKVKDASGKPIAD

SEQ ID NO: 2827 - DNA, 1095 bp, Nostoc punctiforme PCC 73102
  CDS (1)..(1095): transl_table=11
ttggaactaaagttttgtatatctgctcaacttcaatttaaacgacgggtttgcctactacccgtaatcgctatattgttgagtattgtttcttgtactgccgataataaaaaaatcaatcgtgtttctcttgttggtgctggggcaagttttcctgcgcctttgtacgaacgctggctttcagattacaaccagcaaaatcccaatgtggaaattaactatcaagctataggaagcagcgctggagtgcaacagctgattgaaggtactgtagactttgcagctagtgatgtgggaattacaaatgaacaagcaactaagataaaaaggggagtgattgctttacccatgactgctggttccatagtgctagcttacaacctcgcgtccgccccccagtcacctccagtcaatccgccaaatggtttaaagctatcacgccaagtttatgtagatatctttctcggaaaaattacgaattggaatcatccgagaatagctgtagctaatccaggcgtaaatttgcccaatctaccgattcaggttgtataccgcactgatggtagtggaactacaagtgtgttgacgcaacatctaagtgctataagtccagaatggaaaagcaaagttgcagcaggtaaagctgtagcatggccagtaggaattggtggaaagggtaacgaaggtgttactgccttagttcaacagatcccaggagctattggctatgtagaatacatctacgccaaacaaaataaacttcctgtggctgctttggaaaataaatttggtaattatattacgcccacaccagaatctgtagctcaaaccttggagttagtgaagttacctaccgataacttaattgcttttatcaacgatcctacaggttcacagtcttatcccatcgttacttatagctggcttttaacttatcagcaatatccaaacctagccaaaggtgaagcgctgaggaaatttattgattgggctttgattgaagggcaaaaatccagtttggaactcggatatattcctttatctaaaaaagttgtgcttcaagtacaatctgctgcaaacagaattgcagaataa

SEQ ID NO: 2828 - protein, 364 aa, Nostoc punctiforme PCC 73102
MELKFCISAQLQFKRRVCLLPVIAILLSIVSCTADNKKINRVSLVGAGASFPAPLYERWLSDYNQQNPNVEINYQAIGSSAGVQQLIEGTVDFAASDVGITNEQATKIKRGVIALPMTAGSIVLAYNLASAPQSPPVNPPNGLKLSRQVYVDIFLGKITNWNHPRIAVANPGVNLPNLPIQVVYRTDGSGTTSVLTQHLSAISPEWKSKVAAGKAVAWPVGIGGKGNEGVTALVQQIPGAIGYVEYIYAKQNKLPVAALENKFGNYITPTPESVAQTLELVKLPTDNLIAFINDPTGSQSYPIVTYSWLLTYQQYPNLAKGEALRKFIDWALIEGQKSSLELGYIPLSKKVVLQVQSAANRIAE

SEQ ID NO: 2829 - DNA, 1035 bp, Burkholderia phytofirmans PsJN
  CDS (1)..(1035): transl_table=11
atgagctatgtacaaaccttattggccggtgtggccggcgcttttctgacggtcgctgcgcacagcgccgatatcaccggtgccggcagcacttttgccgcgccgatttatacgaaatgggccaccgcgtatcaacgcgcgggtggcggcacggtgagctatcgcgctgtcgggtcgacggaaggcttgaaggagatcatggtcagccaggtcgatttcgccgggtcggacgcgccgctgagcgatgacgagttggcgaagaacggactggttcagtttccaaccgtaatcggcggtgtcgtgccggttatcaatctgcctggtatcaagccaggcgagttgatactctcggggcgtgtgcttggagatatctatctgggcaaaatcatcagctggaatgcgccagccatcgccgccatcaaccccacgatcaagctgcccgatacgcctatcgcggtggttcgtcggctcgacggttcaggcaccacgctgatctggacgcactttctcgcgcaggtcgacccagaatggaagagcaagatcggtgaggggacctcagtgcgctggccgcgcggaataggcggaagaggcaacgagggggttgctaccttcgtacagcatttgccgggcgcgatcggctacgttgcgtgggacttcacgaagcagaaccatatgtcgtacgtggccatggaaaatgcgtcgggtgccgtggttcagcccgggccggaaacattcaaggccgccgccgcgagcgccgactggtccagatcgatctttccgatcctgaccaatgaagcgggcgcgaatgcgtggccggttgtcggcgcgacgtatgtcctgctgcacagcacgcaggacaaaccggagcgtggcgaggaaacgctgaaatttctcgactgggcgctgacgaacggcaaccaggccgcggaggacctggactatattccgctgccgccggcagtcgcgagcgagattcgcacgcagttgcacgcgagggtaaagaatccgtcgggtaaaacagtcgcgggcgaatga

SEQ ID NO: 2830 - protein, 344 aa, Burkholderia phytofirmans PsJN
MSYVQTLLAGVAGAFLTVAAHSADITGAGSTFAAPIYTKWATAYQRAGGGTVSYRAVGSTEGLKEIMVSQVDFAGSDAPLSDDELAKNGLVQFPTVIGGVVPVINLPGIKPGELILSGRVLGDIYLGKIISWNAPAIAAINPTIKLPDTPIAVVRRLDGSGTTLIWTHFLAQVDPEWKSKIGEGTSVRWPRGIGGRGNEGVATFVQHLPGAIGYVAWDFTKQNHMSYVAMENASGAVVQPGPETFKAAAASADWSRSIFPILTNEAGANAWPVVGATYVLLHSTQDKPERGEETLKFLDWALTNGNQAAEDLDYIPLPPAVASEIRTQLHARVKNPSGKTVAGE

SEQ ID NO: 2831 - DNA, 1026 bp, Burkholderia phytofirmans PsJN
  CDS (1)..(1026): transl_table=11
atgaatctcaagcaacttacgctggttgtgtgtgcgctgtgtgccagcgccgcacacgccgccgacatcaccggtgcgggcagcaccttcgccgcgccgatctatacgaaatgggccgacgcctatcagaagaccggcggcggcaaggtcaactatcagggcatcggttcgtcgggcggcatcaagcagatcattgcgaagaccgtggatttcgcaggctcggacgccccgctcaaagacgacgaactggctaaagacgggctattccagttcccgacagtagtcggcggcgtggtgccggcaatcaacgtgccgggtgtgaaggctggcgaactggtgctgtcgggcgaggtgctcggcagcatctatctcggcaagatcaagaagtggaacgatccgacgatcgtcgcgctgaacccgaaactcaagctgccggataccgatatcgccgtggttcgccgtgcggacggctcgggcaccagctttatctggacgaactatttgtccaaggtgagcccggagtggaagtcgaaggtgggcgaaggcgccacggtgagctggccgacgggaaccggcggcaagggtaacgacggcgtggccgctttcgtgcagcgtctgccgggcgcgatcgggtacgtcgagtgggcgtatgcgaagcagaatcacatgacctatgcctcgctgaaaaacgcggcgggtacggtggtcgcaccggcaaccgacaccttcaaggcagcggcagcgggcgcggactggtcgaagtcgttctatcagattctgacgaacgagccgggcaagaacgcttggcccgtggtcggtgcgacattcgtgctattgcacacgacgcaggacaaagcttcgcaaggtgccgaaacgctgaagtttttcgattgggcgttcaagaacggcggcaaggcagcggacgatctcgactacatttcgctgccggaatccgtgacggctgaaatccgcacgcagtggaaacagaaagtgaaggacgcgtcgggcaaaccggtcgcaccgtaa

SEQ ID NO: 2832 - protein, 341 aa, Burkholderia phytofirmans PsJN
MNLKQLTLVVCALCASAAHAADITGAGSTFAAPIYTKWADAYQKTGGGKVNYQGIGSSGGIKQIIAKTVDFAGSDAPLKDDELAKDGLFQFPTVVGGVVPAINVPGVKAGELVLSGEVLGSIYLGKIKKWNDPTIVALNPKLKLPDTDIAVVRRADGSGTSFIWTNYLSKVSPEWKSKVGEGATVSWPTGTGGKGNDGVAAFVQRLPGAIGYVEWAYAKQNHMTYASLKNAAGTVVAPATDTFKAAAAGADWSKSFYQILTNEPGKNAWPVVGATFVLLHTTQDKASQGAETLKFFDWAFKNGGKAADDLDYISLPESVTAEIRTQWKQKVKDASGKPVAP

SEQ ID NO: 2833 - DNA, 1032 bp, Burkholderia phytofirmans PsJN
  CDS (1)..(1032): transl_table=11
atgaaattgatgcaaaccgtgttcgctggcgtcgctggcgcgcttttcgcgatcgcagcgcaagccgcagacatcaccggcgcgggcagcaccttcgcagcaccgatttacacgaagtgggccgactcgtatcagaagtccggcggcggcaaggtgaactatcaaggcatcggctcgtcgggcggcgtgaagcagatcgtcgcgaagaccgtcgacttcgccggttcggacgctccgctgaaagacgacgaactcgccaaggaaggcctgttccagttcccgacggtggtcggcggcgtggtgccggtcgtcaacgtgccgggcgtgaagccggctgaactgacgctgtcgggcgaagtgctgggcgacatctatctgggcaagatcaagaagtggaacgatccggcgatcgttgcgctgaacccgaaggtcaagctgccggataccgacatcgccgtggttcgccgcgccgatggttcgggcaccagcttcatctggacgaactatctgtcgaaggtcaacgcggactggaagtcgaaggtcggtgaaggttcgacggtcaactggccgacgggcacgggcggcaagggcaacgacggcgtcgcggccttcgtgcaacgtctgccgggcgcaatcggctacgtggaatgggcgtacgcgaagcaaaaccacatgacgtatgtcgcgctgaagaactcgacgggcacggtggtcgagccgaagacggacaccttcaaggcagcggcagcaggcgcggactggtcgaagtcgttctaccagatcctgacgaacgagccgggcaagaacgcatggccgatcgtcggcgcgacgttcgtgctggttcacacgacgcaagagaaggcgccgcaaggcagcgaaacgctgaagttcttcgactgggcgttcaagaacggcacgcaagccgcgaacgatctggactacatctcgctgccggattcggtcgtgtcggaaatccgcacgcaatggaagtcgaaggtgaaggacgcttcgggcaaggcaatcgccgagtaa

SEQ ID NO: 2834 - protein, 343 aa, Burkholderia phytofirmans PsJN
MKLMQTVFAGVAGALFAIAAQAADITGAGSTFAAPIYTKWADSYQKSGGGKVNYQGIGSSGGVKQIVAKTVDFAGSDAPLKDDELAKEGLFQFPTVVGGVVPVVNVPGVKPAELTLSGEVLGDIYLGKIKKWNDPAIVALNPKVKLPDTDIAVVRRADGSGTSFIWTNYLSKVNADWKSKVGEGSTVNWPTGTGGKGNDGVAAFVQRLPGAIGYVEWAYAKQNHMTYVALKNSTGTVVEPKTDTFKAAAAGADWSKSFYQILTNEPGKNAWPIVGATFVLVHTTQEKAPQGSETLKFFDWAFKNGTQAANDLDYISLPDSVVSEIRTQWKSKVKDASGKAIAE

SEQ ID NO: 2835 - DNA, 1032 bp, Ralstonia pickettii 12J
  CDS (1)..(1032): transl_table=11
atgaaactggtcaaaaccgcaatcgctggcgtggctgcgctggctttcgctggtgccgcattcgctgttgacatcactggcgcaggcgcaacgttcccggcacccgtctacaacaagtgggcggccgactacaacaaggcgacccaaaccaaggtgaactaccaaggtatcggttcgtcgggcggcatcaagcagatcaccgccaagaccgtcgacttcggcgcatcggatatgccgctgaaggacgaagagttgaacaaggatggcctgatccagttcccgactgtgatcggcggcgtggtgcccgtgatcaacctgccgggcgtgaagccgggcgagctgacgctgaacggccaattgctgggtgacatctacctgggcaagatcaagaagtggaacgatccggccatcgccaagctgaacccgaaggccaagctgccggaccaggacatcctggtggtgcgccgtgctgacggttcgggcacttcgttcatcttcacgaactacctgtcgaaggtcaatgccgagtggaagagcaaggtcggcgaaggcacgaccgtgaactggccgacgggtacgggtggcaagggcaacgaaggcgtggccgctttcgtgcagcgtctgggtggcgcagtgggctacgttgagtacgcctacgccaagcagaacaagatgacgtacgtgaacctgcagaacaaggcgggcgccgtggtgaaaccgaccgcagaagccttcaaggccgcagccgccggcgccgagtggagcaagtcgtactaccagatcctgacggacgaaccgggtaaggacgcatggccgatcgctggtgccacgttcatcctgctgcacaagacgcaagccaagccggagcagggcgctgaagtcatgaagttcttcgactgggcctacaagggtggtgacgacgccgccaagagcctggactacgtgccgctgccggacgctgtgaagaaccagatccgcgcaacgtggaagtcgagcgtgaaggatgcatcgggcaaggttgtctacaactag

SEQ ID NO: 2836 - protein, 343 aa, Ralstonia pickettii 12J
MKLVKTAIAGVAALAFAGAAFAVDITGAGATFPAPVYNKWAADYNKATQTKVNYQGIGSSGGIKQITAKTVDFGASDMPLKDEELNKDGLIQFPTVIGGVVPVINLPGVKPGELTLNGQLLGDIYLGKIKKWNDPAIAKLNPKAKLPDQDILVVRRADGSGTSFIFTNYLSKVNAEWKSKVGEGTTVNWPTGTGGKGNEGVAAFVQRLGGAVGYVEYAYAKQNKMTYVNLQNKAGAVVKPTAEAFKAAAAGAEWSKSYYQILTDEPGKDAWPIAGATFILLHKTQAKPEQGAEVMKFFDWAYKGGDDAAKSLDYVPLPDAVKNQIRATWKSSVKDASGKVVYN

SEQ ID NO: 2837 - DNA, 1020 bp, Xanthomonas campestris pv. campestris str. B100
  CDS (1)..(1020): transl_table=11
atgatctcttccatcaaatcccgtctggctgtcggcgtgctcgctgccgcactggccatgggcgcccaggctgccgatgtcaccggcgccggcgcatcgttcatttacccggtcatgtcgaagtggtcggccgactacaacaccgccaccaagaagcaggtcaactatcagtcgatcggctccggtggcggcattgcgcagatcaaggccgccagcgtggatttcggttcttccgatgccccgctcaagcccgaagagttggctgccgccggactggcgcagtttccctcggtgatcggcggcgtggtgccggtgatcaacgtgccgggcatcgctgccggtgcggtcaagctggacggcaagaccctgggcgatatcttcctgggcaaggtcaccacctggaacgatgcggccatcgttgcgctgaacccgggcgtgaagctgcccgacagcaagatcaccgtggtgcatcgctccgacggttcgggcaccagcttcaacttcaccaactacctgtccaaggtcaatccggactggaagagcaaggtcggcgaaggcacggcggtgcagtggccgaccggcattggcggcaagggcaacgaaggcgtggccgcctacgtgaagcagatcaagggcggcatcggctatgtcgagctgtcgtacgcgctgcagaacaagatggcctacaccgcgatgaagaatgcggccggcaagttcgtgcagccgtccgatgagaccttcgctgcggccgccaacagtgccgactggggcagcagcaaggacttctacctggtgatgaccaatgccgccggcgacaacgcctggccgatcaccgccaccaatttcatcctggtgcagaagaagccgaagaatccggccggcctgaagaacaccctggagttcttccgctgggtctacagcaagggcgatgcgcaggccaaggcgctggactacgtgccgctgccggacacgctggtcagccagatcgaagcctactgggccaagaccctgccccgctaa

SEQ ID NO: 2838 - protein, 339 aa, Xanthomonas campestris pv. campestris str. B100
MISSIKSRLAVGVLAAALAMGAQAADVTGAGASFIYPVMSKWSADYNTATKKQVNYQSIGSGGGIAQIKAASVDFGSSDAPLKPEELAAAGLAQFPSVIGGVVPVINVPGIAAGAVKLDGKTLGDIFLGKVTTWNDAAIVALNPGVKLPDSKITVVHRSDGSGTSFNFTNYLSKVNPDWKSKVGEGTAVQWPTGIGGKGNEGVAAYVKQIKGGIGYVELSYALQNKMAYTAMKNAAGKFVQPSDETFAAAANSADWGSSKDFYLVMTNAAGDNAWPITATNFILVQKKPKNPAGLKNTLEFFRWVYSKGDAQAKALDYVPLPDTLVSQIEAYWAKTLPR

SEQ ID NO: 2839 - DNA, 1041 bp, Erwinia tasmaniensis Et1/99
  CDS (1)..(1041): transl_table=11
atgacttcgatgcacaaaactctggctcaatgcgttgcactcactctttctctgagcgccgcctctgcgatggcggcgactaatctgaccggtgctggcggcaccttcccggccccggtttataacaagtgggcggcagagtacaacaccgccacgggcagtcaggttaactatcagggtatcggctcttccggcggcgtgaagcaaatcattgctaaaaccgtcgacttcggtgcgtcagatgccccgatgaaagaagaagacttagctaaaaatggcctgttccagtttccaacggtgatcggtggagtggtgctggcggtgaatatccccggtataaaatctggtgagctgacgctggatggtaaaaccgtgggtgatatctacctcggtacgatcaagaaatggaacgatccggcgattgccaaacttaaccctggcgtgaagctgcctgattcaaatatcaacgtggtgcgccgcgctgatggttccggtacgtcatttgtctttaccagctatctgtccaaagtgaacgaagactggagcagcaaagtcgggaaaggcagtaccgtgaactggccggtaggcctgggcggtaaggggaacgacggcgtggccgcgttcgtacagcgtctgccgggctcaatcggttatgtcgaatacgcttatgcgaagcagaacagccttgcttacaccaagctggttgatgccgacggcaaggcgatttcaccaagtgaaaaaagcttcagcgatgcggctaaaggcgctgactggagcacctcgtttgcccaggatctgacctaccagaaaggtgacaatgcgtggccaatcacctcgaccaccttcatcctggtgcataaagagcaggccaatgcagagaaaggcgcagcggtgctgaagttctttgactggggttacaaaaacggcggcaaaaccacgacggctctcgactatgcgtcactgccggattcagtggtagagcagatccgcgccgcctggaaatccaacgtgaaagacagctcaggtaacgcgttgtactaa

SEQ ID NO: 2840 - protein, 346 aa, Erwinia tasmaniensis Et1/99
MTSMHKTLAQCVALTLSLSAASAMAATNLTGAGGTFPAPVYNKWAAEYNTATGSQVNYQGIGSSGGVKQIIAKTVDFGASDAPMKEEDLAKNGLFQFPTVIGGVVLAVNIPGIKSGELTLDGKTVGDIYLGTIKKWNDPAIAKLNPGVKLPDSNINVVRRADGSGTSFVFTSYLSKVNEDWSSKVGKGSTVNWPVGLGGKGNDGVAAFVQRLPGSIGYVEYAYAKQNSLAYTKLVDADGKAISPSEKSFSDAAKGADWSTSFAQDLTYQKGDNAWPITSTTFILVHKEQANAEKGAAVLKFFDWGYKNGGKTTTALDYASLPDSVVEQIRAAWKSNVKDSSGNALY

SEQ ID NO: 2841 - DNA, 1137 bp, Xanthomonas oryzae pv. oryzae PXO99A
  CDS (46)..(1137): transl_table=11
gtgggatctgccggataccccggccaatccagcctcggagcctccatgaaactgcagtcggccagcctgaccgccctgtcccttaccatcgccatcgcccttgccgcgtgttcgcccggcaaggacgcacaatccggcgacgccgcaaagggcgcgccgaccgcaggcgctaccgccagcgacaccaagggtgctgaaatctccggcgccggcgcttccttcatctacccgctggtgtccaagtggtcggccgactacaacgccgccaccggcaacaaggtcaattaccagtcgatcggctccggcggcggcattgcgcagatcaaggccggcaccgtggatttcggctcgaccgacaagccgctggacagcgccgaactgcagcaggcaggcctgggccagttcccgtccgccatcggcggcgtggtgccggtggtcaatctggacggcatcgcaccgggcaagctgcgcctgaccggcgccctgctgggcgacatcttcctgggcaaggtcacgatgtggaacgacgcggccattgtcgcggccaacccgggcgtgaccctgccggccaccaagatcaatctggtgcatcgttcggacggttcgggcaccaccttcaacttctccaactacctgtccaaggtcagcccggagtggaagagcaaggtcggcgaaggtacctcggtgcagtggccgggcggcgtgggtggcaagggcaacgaaggcgttgcctcgtatgtgcagcagatcaagggctcgatcggttacgtcgagctggcctacgccctgcagaacaagatgccgtacacctcgctgcagaacgcagccggccagtggatcgagccgaacgcggaaagctttgccgccgccgctgccagcgccgactgggccaacgccaaggacttcaatctggtgattaccaatgctccgggcgaaaaggcgtggccgatcaccgccaccaacttcatgctgatgcacaagcagcccaaggacgcggcgcgcagcaaggcgacgctggacttcttcaagtgggcgttggaaaacggccaggcccaggccagcgaactgcattacgtgccgctgccgccggagctggtgaagcagatcgaagcctattggggcagcgagttcaagtaa

SEQ ID NO: 2842 - protein, 363 aa, Xanthomonas oryzae pv. oryzae PXO99A
MKLQSASLTALSLTIAIALAACSPGKDAQSGDAAKGAPTAGATASDTKGAEISGAGASFIYPLVSKWSADYNAATGNKVNYQSIGSGGGIAQIKAGTVDFGSTDKPLDSAELQQAGLGQFPSAIGGVVPVVNLDGIAPGKLRLTGALLGDIFLGKVTMWNDAAIVAANPGVTLPATKINLVHRSDGSGTTFNFSNYLSKVSPEWKSKVGEGTSVQWPGGVGGKGNEGVASYVQQIKGSIGYVELAYALQNKMPYTSLQNAAGQWIEPNAESFAAAAASADWANAKDFNLVITNAPGEKAWPITATNFMLMHKQPKDAARSKATLDFFKWALENGQAQASELHYVPLPPELVKQIEAYWGSEFK

SEQ ID NO: 2843 - DNA, 1020 bp, Xanthomonas oryzae pv. oryzae PXO99A
  CDS (1)..(1020): transl_table=11
atgatccactccttcaagacccgtctggccgttggcgtactcgccgcttcgctggctctgtgcgcccaggctgccgatgtcaccggcgctggcgcgtcgtttatttacccggtgatgtccaagtggtcggccgactacaacgctgccaccaagaagcaggtcaactatcaatcgatcggttcaggcggcggtattgcccagatcaaggcggccagcgtggacttcggctcgtccgatgccccgctcaagccggaagaactggccgcagccggcctggcgcagtttccctcggtgatcggcggcgtggtgccggtggtcaacgtgccgggcgtggccgccggtgcgctcaagctggacggcaagaccctgggcgacatcttcctgggcaaggtcagcacctggaacgatccggccatcgccgcgctcaatccaggcgtgaagctgccggaaggcaagatcaccgtggtgcatcgctccgacggctcgggcaccagcttcaacttcaccaactacctgtccaaggtcaatccggactggaagagcaaggtgggcgaaggcactgccgtgcagtggccgaccggtatcggcggcaagggcaacgagggcgtcgctgcctacgtgaagcagatcaagggcggcatcggctacgtcgagctgtcgtacgcgctgcagaacaagatggcctacaccgcgatgaagaatgctgccggcaagttcgtgcagccgtccgatgaaaccttcgccgccgctgccaacagcgccgattggggcagcagcaaggacttctatctggtgatgaccaatgcggcgggcgacaacgcctggccgatcacggcgaccaattttatcttggtgcagaagaagccgaagaacccgaccggcctgaaaaacacgctggacttcttccgctgggtctatagcaagggcgacgcccaggccaagcagctggactacgtaccgctgccggacgcgctggtgacccagatcgaggcctactgggccacgaatctgcccaaataa

SEQ ID NO: 2844 - protein, 339 aa, Xanthomonas oryzae pv. oryzae PXO99A
MIHSFKTRLAVGVLAASLALCAQAADVTGAGASFIYPVMSKWSADYNAATKKQVNYQSIGSGGGIAQIKAASVDFGSSDAPLKPEELAAAGLAQFPSVIGGVVPVVNVPGVAAGALKLDGKTLGDIFLGKVSTWNDPAIAALNPGVKLPEGKITVVHRSDGSGTSFNFTNYLSKVNPDWKSKVGEGTAVQWPTGIGGKGNEGVAAYVKQIKGGIGYVELSYALQNKMAYTAMKNAAGKFVQPSDETFAAAANSADWGSSKDFYLVMTNAAGDNAWPITATNFILVQKKPKNPTGLKNTLDFFRWVYSKGDAQAKQLDYVPLPDALVTQIEAYWATNLPK

SEQ ID NO: 2845 - DNA, 1041 bp, Methylobacterium populi BJ001
  CDS (1)..(1041): transl_table=11
atgaaacctttcacttacgctctggccgtcggccttgcggccgcccagcttgcgacctcggccctcgccgccgacatcaccggcgccggcgccaccttccccttcccggtctattcgaagtgggcggaagcctatcgcaaggagaccggcacgggcctgaactaccagtccatcggctcgggcggcggcatcaagcagatccaggccaagaccgtcgatttcggcgccaccgacgcgccgctgaagcccgcccagctcgaaaaggacggcctcgtccagttcccgaccgtcatgggcggcgtggtcccggtgatcaacgtcgcgggtgtcgaggccggcaaggtcaagctgaccggcgaactcctggcggacatctacgccggcaagatcctgaagtggtccgacccgaagatcgcggcgctgaacgagggcgtgaagctgcccgacgccaacatcacgccggtctaccgctcggatgcctccggcacgaccaacatcttcaccacctatctctcctccgtctccgagccgtggaagaaggaattcggcgccgccaccacggtgagctggccggtgggccagggcggcaagggcaacgagggcgtgaccgccaccgtcaagcaggttccgaactcgatcggctacgtcgagtcggcctacgccaagcagaacaagcttgcctacgcgctgatccagaacaaggccggcaagtacccgcagcccgacgacaaggcgttccaggccgctgccgccagcgccgattggaagtcgacccccggcttcggcatcacgctgaccaaccaggccggcgaggacgcttggccgatcacggccgccaccttcatcctggtccacaaggaagcggctgacgcggccaaggccggcgacgtgctgaagttcttcgactgggcctacaagaacggcgacaagctcgcgaccgaactcgactacgtcccgctgccggacaacgtcgtcggcctgatccacgacgcgtggaagggcatcaagggcaaggacgggaagcccgtcttcggaatgtaa

SEQ ID NO: 2846 - protein, 346 aa, Methylobacterium populi BJ001
MKPFTYALAVGLAAAQLATSALAADITGAGATFPFPVYSKWAEAYRKETGTGLNYQSIGSGGGIKQIQAKTVDFGATDAPLKPAQLEKDGLVQFPTVMGGVVPVINVAGVEAGKVKLTGELLADIYAGKILKWSDPKIAALNEGVKLPDANITPVYRSDASGTTNIFTTYLSSVSEPWKKEFGAATTVSWPVGQGGKGNEGVTATVKQVPNSIGYVESAYAKQNKLAYALIQNKAGKYPQPDDKAFQAAAASADWKSTPGFGITLTNQAGEDAWPITAATFILVHKEAADAAKAGDVLKFFDWAYKNGDKLATELDYVPLPDNVVGLIHDAWKGIKGKDGKPVFGM

SEQ ID NO: 2847 - DNA, 1011 bp, Sulfurihydrogenibium sp. YO3AOP1
  CDS (1)..(1011): transl_table=11
atgaaagttaaaggcttgaaaaagcttgcaatagctggaattttagcaacatctaccgcagcattagcgggaattacaattacaggtgcaggtgcaacattcccatatccaatttactctgcttgggcttatgcatatgaaaaagcaacaggaaacaaagttaactatcaatcaattggttctggtggtggtatcagacagatcgaaaacagaacagtagactttggtgcatcagacgctccattaacaccagaagaattaaaccaaaagaaattactccaattcccggcagtaatcggtggagtagttccaacttacaacctaccagaagtaaaacagcctcttaactttgacgggaaagctctctgttatatatatatgggtaaaatcactaaatggaatgacccatacttacaacaattaaaccctggcgtaaatttaccagatagaccaattacagtagttcacaggtctgatggttctggtacaacttggatctggactaactacttatcaaaagtttgtccagagtggaaagaaaaggttggatacggaacatctgttaactggccaactggtgtaggcggaaaaggaaacgaaggtgtagctaactacactaagagaatgagaggagcaataggatacgtagaatatatctatgcaaaacaaaacaatatgcctgctggaaaagttaaaaacagagaaggaaactttgttgctccatctatggaaagcttccaagcagcagctgctaacgctaaatgggacaaaaagaaacatttctacgaagtattaacagaccaaccgggtaaaaattcatacccaatatctggagctacatttattttactggcaaaagatagaccagaaaactcaaaaaaagcagttatgttctttgactgggcatttacaaaaggagatcaagaagctgcaagattaaactatatcccattaccacaaaacgtgaaagatttaatcagatcatactggaaagaaaatggattgatgtaa

SEQ ID NO: 2848 - protein, 336 aa, Sulfurihydrogenibium sp. YO3AOP1
MKVKGLKKLAIAGILATSTAALAGITITGAGATFPYPIYSAWAYAYEKATGNKVNYQSIGSGGGIRQIENRTVDFGASDAPLTPEELNQKKLLQFPAVIGGVVPTYNLPEVKQPLNFDGKALCYIYMGKITKWNDPYLQQLNPGVNLPDRPITVVHRSDGSGTTWIWTNYLSKVCPEWKEKVGYGTSVNWPTGVGGKGNEGVANYTKRMRGAIGYVEYIYAKQNNMPAGKVKNREGNFVAPSMESFQAAAANAKWDKKKHFYEVLTDQPGKNSYPISGATFILLAKDRPENSKKAVMFFDWAFTKGDQEAARLNYIPLPQNVKDLIRSYWKENGLM

SEQ ID NO: 2849 - DNA, 1032 bp, Burkholderia multivorans ATCC 17616
  CDS (1)..(1032): transl_table=11
atgaaattgatgcaaaccgcgattgccggcctggctggcgcgcttttcgccgttgccgcccacgcagccgacatcacgggggcaggcagcacgttcgcgatgccgatctacacgaaatgggctgccgattatcagcagtccggcggcgcgaaggtcaactaccagggtatcggttcgtcgggcggcctgaagcagatcgtcgcgaagacggtcgatttcgccggttcggacgcaccgctgaaggatgacgaactcgcgaaggaaggcctgttccagttcccgacggtcgtcggcggcgtggtgccggtcgtcaacgtgccgggcgtgaaggccggcgaactgacgctgtcgggcccggtgctcggcgacatctatctcggcaagatcaagaagtggaacgatccggccatcgccgcgctgaacccgaaggtcaagctgccggatacggacatcgcggtcgttcgccgcgcggacggctcgggcacgagcttcatctggacgaactacctgtcgaaggtcaacggcgagtggaagtcgaagatcggtgaaggcacgacggtcaactggccgacgggtacgggcggcaagggcaacgacggcgtcgccgcgttcgtccagcgtctgccgggcgcgatcggctacgtcgagtgggcgtacgcgaagaagaacaacatgacgtacacggcgctgaagaattcgtcgggcgcggtcgtcgagccgaagaccgaaacgttcaaggccgcggccgcgagcgcgaactggtcgaagtcgttctaccagatcctgacggacgagccgggcaaggacgcatggccggtcgtcggcgcgacgttcgtgctgctgcacgcgaagcaggacaagccgggtcagggcgcggaaacgctgaagttcttcgactgggcgttcaagaacggcgagaaggcagccgacagcctcgactacatctcgctgccggcggcagtcacggccgagatccgcaagcagtggaaggtgaaggtgaccgacgcgtcgggcaagccggtcgcggagtaa

SEQ ID NO: 2850 - protein, 343 aa, Burkholderia multivorans ATCC 17616
MKLMQTAIAGLAGALFAVAAHAADITGAGSTFAMPIYTKWAADYQQSGGAKVNYQGIGSSGGLKQIVAKTVDFAGSDAPLKDDELAKEGLFQFPTVVGGVVPVVNVPGVKAGELTLSGPVLGDIYLGKIKKWNDPAIAALNPKVKLPDTDIAVVRRADGSGTSFIWTNYLSKVNGEWKSKIGEGTTVNWPTGTGGKGNDGVAAFVQRLPGAIGYVEWAYAKKNNMTYTALKNSSGAVVEPKTETFKAAAASANWSKSFYQILTDEPGKDAWPVVGATFVLLHAKQDKPGQGAETLKFFDWAFKNGEKAADSLDYISLPAAVTAEIRKQWKVKVTDASGKPVAE

SEQ ID NO: 2851 - DNA, 1044 bp, Actinobacillus pleuropneumoniae serovar 7 str. AP76
  CDS (1)..(1044): transl_table=11
atgttattggtaaaagcagctaaaaaattcgttgtaatcgggctttcattaggcgtaatggcatcaagttatgctgaaacgattaccggtgcaggcgcttcattcccctatccgatttatgcgaaatgggcttcactttatgaaaaagaaacgggtaataaagtgaattatcaatctatcggttccggcggcggtcagcaacaaattattgccaaaacgattgatttcggtgcgtcggacgacccgatgaaagcggaattattggatcaacataaattgttacaattcccggcaattatcggcggtacggtaccggtggtaaatttaccggaatttaaagcgggtgaattaaaattatccggtacggtattggcggatattttcctcggtaaaattaccaaatggaatgacccggcgattaaagcgttaaacgcatcgttaaatttaccggataaaagtattgttgtagtacgtcgttcggacggttcgggtacaacattcggttggactaactatttatcaaaagtgtcgccggaatggaaagaaaaagtcggtgaaggtaaatcggttaaatggcctaccggtcaaggtggtaaaggtaatgaaggtgtagccgcttatgtgaaacaacttaaatattctatcggttatgtcgaatatgcctatgcgaaacaaaataacttagcttgggcttctttacaaaaccaagcgggtaaatttgtacaaccgtcacgcgaaagttttatggcggcggctgcaaatgcgcagtgggataaagcgaaaggtatgggcattatgcttaccaatgaaagcggcgataattcatggcctgtgacggcggcaagtttcatccttgttcaccaacaggcggataatccgaccgcaaccaaagcggtgtttgacttcttcgattgggcttttgaaaaaggtaaaaatgcggcgtcggagttagattatgtgccgttaccggatgaagtcgtaacgaaaatcaaacaaaaatggcaaaacgaagtaaaagataaagacggtaaagcggttcgctaa

SEQ ID NO: 2852 - protein, 347 aa, Actinobacillus pleuropneumoniae serovar 7 str. AP76
MLLVKAAKKFVVIGLSLGVMASSYAETITGAGASFPYPIYAKWASLYEKETGNKVNYQSIGSGGGQQQIIAKTIDFGASDDPMKAELLDQHKLLQFPAIIGGTVPVVNLPEFKAGELKLSGTVLADIFLGKITKWNDPAIKALNASLNLPDKSIVVVRRSDGSGTTFGWTNYLSKVSPEWKEKVGEGKSVKWPTGQGGKGNEGVAAYVKQLKYSIGYVEYAYAKQNNLAWASLQNQAGKFVQPSRESFMAAAANAQWDKAKGMGIMLTNESGDNSWPVTAASFILVHQQADNPTATKAVFDFFDWAFEKGKNAASELDYVPLPDEVVTKIKQKWQNEVKDKDGKAVR

SEQ ID NO: 2853 - DNA, 1089 bp, Stenotrophomonas maltophilia K279a
  CDS (1)..(1089): transl_table=11
atgaaactgcactcggccggcctcgccgccctttccctggccatcgccctgggcctgtcggcctgcggtggcgacaagcaggccgcgcagcagccggctgccggcgctgccgctgcccccgccgctgccggtgccaaggtgaccgccgaagtgtccggcgcgggcgcgtccttcatcttcccgctggtctccaagtggtcggctgactacaacgccagcaccggcgccaagatcaactaccagtcgatcggctccggcggcggcatcgcccagatcaaggctgggaccgtcgacttcggttcgtccgacaagccgctgagcagcgaggagctggcccaggccggcctggcgcagttcccgtcggccatcggcggcgtggtgccggtggtcaacatcgaaggcctggaagccggcaagctgcgcctgagcggcgccctgctggccgacatcttcctgggcaaggtcaagacctggaacgacccggcgatcgtcgccgccaacccgggcgtgaagctgccggacggcaagatcaccctggtccaccgttcggatggttcgggcaccaccttcaacttctccaactacctgtccaaggtcagcccggagtggaagagcaaggtcggtgaaggcacctcggtgcagtggccggacggcgtcggtggcaagggcaatgaaggcgttgcgtcctacgtgaagcagatcaagggctcgatcggctacgtcgaactggcttatgccctgcagaacggcatgccgtataccgccatgcagaacgccgccggcaactgggtcgagccgagcgcggaaaccttcgccgctgcggccgccagcgccgactgggccagcgccaaggacttcaacttggtcatcaccaacgccccgggcgagcaggcgtggccgatcaccgccaccaacttcatgctgatgcagaagcagccgaaggacgccaagcgcaaccaggacaccctggccttcttcaagtgggccttcgagaacggccaggcccaggccaacgagctgcactacgtgccgctgccggccgaactggtcaagcagatcgaggcctactgggcgaccgacctgaagtga

SEQ ID NO: 2854 - protein, 362 aa, Stenotrophomonas maltophilia K279a
MKLHSAGLAALSLAIALGLSACGGDKQAAQQPAAGAAAAPAAAGAKVTAEVSGAGASFIFPLVSKWSADYNASTGAKINYQSIGSGGGIAQIKAGTVDFGSSDKPLSSEELAQAGLAQFPSAIGGVVPVVNIEGLEAGKLRLSGALLADIFLGKVKTWNDPAIVAANPGVKLPDGKITLVHRSDGSGTTFNFSNYLSKVSPEWKSKVGEGTSVQWPDGVGGKGNEGVASYVKQIKGSIGYVELAYALQNGMPYTAMQNAAGNWVEPSAETFAAAAASADWASAKDFNLVITNAPGEQAWPITATNFMLMQKQPKDAKRNQDTLAFFKWAFENGQAQANELHYVPLPAELVKQIEAYWATDLK

SEQ ID NO: 2855 - DNA, 1017 bp, Stenotrophomonas maltophilia K279a
  CDS (1)..(1017): transl_table=11
atgatccacgccttcaagtcgcgcgccgctgtcgccatcctggccgcatcgtccgtgttcgccgccaacgccgccgatatcaccggcgcgggcgcatcgttcatctacccggtcatgtccaagtggtcggccgactacagcaccgcaaccggcaacaaggtcaactaccagtccatcggttccggcggcggcattgcccagatcaaggccaagaccgttgatttcggctcctccgacgcgccgctgaagccggaagacctggctgctgcgggcctggcgcagttcccgtcggtgatcggcggcgtggtgccggtggtcaacgtggccggcatcgcgccgggcgcgctgaagctggacggcgcggtgctggccaacatcttcctgggcaagatcaagacctggaacgacccggccatcgccgcgctgaacccgggcgtgaccctgcccaacgccaaggtcaccgtcgtgcatcgttcggacggctcgggcaccaccttcaacttcgtcaattacctgtccaaggtcagcccggagtggaagagctcggtcggtgaaggcacctcggtgcagtggccggccggcatcggcggcaagggcaacgaaggtgttgccgcctatgtgaagcagatcaagggcggcatcggctatgtcgaactgtcctacgcgctgcagaacaagctctcctacaccgcgatgaagaatgccgccggcaagttcgtgcagccgagcgacgcctcgttcgcagccgctgccgccagcgccgactgggccaacgcccgcgacttctacctggtgatgaccaacgcgccgggcgccgagtcctggccgatcaccgccaccaacttcatcctggtgcagaagacgccgaagaatgctgccaatggcaaggcgacccaggagttcttccgctgggtctacaagaatggcgacgcccaggcccgccagctggactacgtgccgctgccggacagcctggtccgccagatcgagacctactggtcgcagaacctgaagtaa

SEQ ID NO: 2856 - protein, 338 aa, Stenotrophomonas maltophilia K279a
MIHAFKSRAAVAILAASSVFAANAADITGAGASFIYPVMSKWSADYSTATGNKVNYQSIGSGGGIAQIKAKTVDFGSSDAPLKPEDLAAAGLAQFPSVIGGVVPVVNVAGIAPGALKLDGAVLANIFLGKIKTWNDPAIAALNPGVTLPNAKVTVVHRSDGSGTTFNFVNYLSKVSPEWKSSVGEGTSVQWPAGIGGKGNEGVAAYVKQIKGGIGYVELSYALQNKLSYTAMKNAAGKFVQPSDASFAAAAASADWANARDFYLVMTNAPGAESWPITATNFILVQKTPKNAANGKATQEFFRWVYKNGDAQARQLDYVPLPDSLVRQIETYWSQNLK

SEQ ID NO: 2857 - DNA, 1011 bp, Rhodopseudomonas palustris TIE-1
  CDS (1)..(1011): transl_table=11
atgaatttcatcaaggcaatcgtcgcggccggtatggttgcggcgtcgacctcggccttcgccgccgacatcacgggcgctggcgccaccttcccgtacccggtctactcgaagtgggcggacacctataagaaggacaccggcaacggtctgaactaccagtcgatcggttcgggcgccggcatcaagcagatcattgccaagaccgtgacgttcggcgcaaccgacgcgccgttgaagccggagcagctcgagaaggaaggcctggtgcagtggccgatggtgatgggcgccatcgtgccggtcgtgaacctcgaaggcgtgaagccgggtgagatggtgctcgacggcgagaccctggccaacatctacatcggcaagatcaccaagtgggacgacccggcgatcaagaagctgaacccgaaggtcagcctgccgagcgacgcgatcaccgtggttcgccgctccgacggttcgggcaccaccttcaacttcaccgactacctgtccaaggtcagcgctgactggaagaccaaggttggttcgggcaccgcggtcgagtggccggtcggcgtcggcgccaagggcaacgaaggcgttgccggcaacgtcggtcagaccaagaattcgatcggctacgtcgaatacgcctacgccaagcagaacaagctgacctacaccggcctggtgaacagcgctggcaagactgttcagccgacgattgcggccttccaggctgccgcggcgaatgccgattgggccaaggctccgggctactacctgatcctgaccaaccagccgggcgaagcctcgtggccgatcaccgccgcgaccttcatcctgatgcacaaggagccggtcgacaaggtggcttccagcgaagccgtgaagttcttcaagtgggcgttcgagaagggcggcaaggctgccgaagagctggactacatcccgatgccggaaccggtcgtcaagctgatcgagaagacctgggccgcggacatcaagagctga

SEQ ID NO: 2858 - protein, 336 aa, Rhodopseudomonas palustris TIE-1
MNFIKAIVAAGMVAASTSAFAADITGAGATFPYPVYSKWADTYKKDTGNGLNYQSIGSGAGIKQIIAKTVTFGATDAPLKPEQLEKEGLVQWPMVMGAIVPVVNLEGVKPGEMVLDGETLANIYIGKITKWDDPAIKKLNPKVSLPSDAITVVRRSDGSGTTFNFTDYLSKVSADWKTKVGSGTAVEWPVGVGAKGNEGVAGNVGQTKNSIGYVEYAYAKQNKLTYTGLVNSAGKTVQPTIAAFQAAAANADWAKAPGYYLILTNQPGEASWPITAATFILMHKEPVDKVASSEAVKFFKWAFEKGGKAAEELDYIPMPEPVVKLIEKTWAADIKS

SEQ ID NO: 2859 - DNA, 1032 bp, Cupriavidus taiwanensis
  CDS (1)..(1032): transl_table=11
atgaagctggtcaagactgccgtggcaggcatcgtttcgatggtggtagcgggtactgcgttcgcggcggaaattaccggtgcaggcgcttccttcccggcgcccgtgtattccaagtgggccgacgcatataacaaggcaacgggcaacaaggtcaactatcaatccatcggctcgtcgggcggcatcaagcagattggcgccaagacggtcgatttcggcgcctcggacgcgccgctgaaggacgaggacctgaacaagcagggcctggtccagttcccgacggtgatcggcggcgtggtgccggtgatcaacctgcagggcgtgaagccgggcgagctgaccatcaccggcgaagtgctggccaacatctacctgggcaagatcaagaagtgggatgatcccgcgatcaaggcgctgaacccgcaagccaagctgccgaaccaggacatcttgccggtgcgccgcgccgacggttcgggcaccacgttcatcttcaccaactacctgtccaaggtcagcccggactggaagagctcggtgggcgagggcaccacggtcaactggccgggcggcggcaccggcggcaagggcaacgagggcgtggccgccttcgtgcagcgcctgaacggcgccatcggctatgtcgagtatgcctacgccaagcagaacaagatgacccacgtgaacatgaagaacgcgtcgggtgcggtggtcaagccgggtgacgacgccttcaaggccgccgccgccggcgcggactggagcaagagctactaccagatcctgaccaaccagccgggcaaggacgcctggccgatcgccggcgccaccttcatcctggtccacaagaaccaggaaaagccggcgcagggcgcggaagtgctgaagttcttcgactgggcctacaagagcggcgccagcatggccgcagatctggactacgtgccgctgccggaaaacgtggtcaaccagatccgttcgacctggaagaccagcgtcaaggacgcttcgggcaaggcgctgtactga

SEQ ID NO: 2860 - protein, 343 aa, Cupriavidus taiwanensis
MKLVKTAVAGIVSMVVAGTAFAAEITGAGASFPAPVYSKWADAYNKATGNKVNYQSIGSSGGIKQIGAKTVDFGASDAPLKDEDLNKQGLVQFPTVIGGVVPVINLQGVKPGELTITGEVLANIYLGKIKKWDDPAIKALNPQAKLPNQDILPVRRADGSGTTFIFTNYLSKVSPDWKSSVGEGTTVNWPGGGTGGKGNEGVAAFVQRLNGAIGYVEYAYAKQNKMTHVNMKNASGAVVKPGDDAFKAAAAGADWSKSYYQILTNQPGKDAWPIAGATFILVHKNQEKPAQGAEVLKFFDWAYKSGASMAADLDYVPLPENVVNQIRSTWKTSVKDASGKALY

SEQ ID NO: 2861 - DNA, 1089 bp, Stenotrophomonas maltophilia R551-3
  CDS (1)..(1089): transl_table=11
atgaaactgcactcggccggcctcgccgccctttccctggccatcgccctgggcctgtcggcctgcggtggcgacaagcaggccgcgcagcagccggctgccgacggtgccgccgccccggccgctgccggtgccaaggtgaccgccgaagtgtccggcgccggcgcttccttcatcttcccgctggtgtccaagtggtcggctgactacaacgccagcaccggcgccaagatcaactaccagtcgatcggctccggtggcggcatcgcccagatcaaggccggcaccgtcgacttcggttcctccgacaagcccctgagcagcgaagagctggcccaggccggcctggcgcagttcccgtccgccatcggcggcgtggtgccggtggtcaacatcgaaggcctggaaggcggcaagctgcgcctcagcggcgccctgctggccgacatcttcctgggcaaggtcaagacctggaacgacccggccatcgtcgccgccaacccgggcgtgaagctgccggacggcaagatcaccctggtccaccgttcggacggttcgggcaccaccttcaacttctccaactacctgtccaaggtcagcccggagtggaagaccaaggtcggcgaaggcacctcggtgcagtggccggacggcgtcggtggcaagggcaatgaaggcgtcgcttcgtacgtgaagcagatcaagggctcgatcggctacgtcgaactggcctatgccctgcagaacggcatgccgtacaccgccatgcagaacgccgccggcaactgggtcgagccgagcgcggaaaccttcgccgctgcggccgccagcgccgactgggccagcgccaaggacttcaacctggtcatcaccaacgccccgggcgagcaggcgtggccgatcaccgccaccaacttcatgctgatgcagaagcagccgaaggacgccaagcgcaaccaggacaccctggccttcttcaagtgggccttcgagaacggccagacccaggccaacgagctgcactacgtgccgctgccggccgacctggtcaagcagatcgaggcctactgggcgactgacctgaagtga

SEQ ID NO: 2862 - protein, 362 aa, Stenotrophomonas maltophilia R551-3
MKLHSAGLAALSLAIALGLSACGGDKQAAQQPAADGAAAPAAAGAKVTAEVSGAGASFIFPLVSKWSADYNASTGAKINYQSIGSGGGIAQIKAGTVDFGSSDKPLSSEELAQAGLAQFPSAIGGVVPVVNIEGLEGGKLRLSGALLADIFLGKVKTWNDPAIVAANPGVKLPDGKITLVHRSDGSGTTFNFSNYLSKVSPEWKTKVGEGTSVQWPDGVGGKGNEGVASYVKQIKGSIGYVELAYALQNGMPYTAMQNAAGNWVEPSAETFAAAAASADWASAKDFNLVITNAPGEQAWPITATNFMLMQKQPKDAKRNQDTLAFFKWAFENGQTQANELHYVPLPADLVKQIEAYWATDLK

SEQ ID NO: 2863 - DNA, 1017 bp, Stenotrophomonas maltophilia R551-3
  CDS (1)..(1017): transl_table=11
atgatccacgccttcaagtcgcgcgttgccgttgccgtcttcgcagcgtcgtccgtgttcgccgccaacgccgctgaaatcaccggcgcgggcgcctcgttcatctacccggtgatgtcgaagtggtcggccgactacaacgccgccaccagcaacaaggtcaactaccagtcgatcggttccggtggtggtatcgcccagatcaaggccaagaccgttgatttcggctcctccgacgccccgctgaagccggaagaactggccgctgcgggcctggcccagttcccgtcggtgatcggcggcgtggtgccggtggtcaatgttgccggcatcgccccgggcgcgctgaagctggacggcaccgtgctggccaacatcttcctgggcaagatcaagacctggaacgacccggccatcgccgcactgaacccgggcgtgaccctgccgagcgccaagatcaccgtcgtgcaccgttcggatggttcgggcaccaccttcaacttcgtcaactacctgtccaaggtcagcccggagtggaagagctcggtcggtgaaggcacctcggtccagtggccggccggcatcggcggcaagggcaacgaaggcgttgccgcttacgtgaagcagatcaagggcggcatcggctacgtcgaactgtcctacgcgctgcagaacaagctgtcgtacaccgcgatgaagaatgccgccggccgcttcgtgcagccgagcgacgcctcgttcgccgccgctgctgccagcgccgactgggccagcgccaaggacttctacctggtgatgaccaacgccccgggcgccgagtcctggccgatcaccgcaaccaacttcatcctggtgcacaagaagccgaagaaccctgccaacggcaaggccacccaggagttcttccgctgggtctacaagagcggcgacgcccaggcccgccagctggactacgtgccgctgccggacagcctggtgcgccagatcgagacctactggacgcagaacctgaagtaa

SEQ ID NO: 2864 - protein, 338 aa, Stenotrophomonas maltophilia R551-3
MIHAFKSRVAVAVFAASSVFAANAAEITGAGASFIYPVMSKWSADYNAATSNKVNYQSIGSGGGIAQIKAKTVDFGSSDAPLKPEELAAAGLAQFPSVIGGVVPVVNVAGIAPGALKLDGTVLANIFLGKIKTWNDPAIAALNPGVTLPSAKITVVHRSDGSGTTFNFVNYLSKVSPEWKSSVGEGTSVQWPAGIGGKGNEGVAAYVKQIKGGIGYVELSYALQNKLSYTAMKNAAGRFVQPSDASFAAAAASADWASAKDFYLVMTNAPGAESWPITATNFILVHKKPKNPANGKATQEFFRWVYKSGDAQARQLDYVPLPDSLVRQIETYWTQNLK

SEQ ID NO: 2865 - DNA, 1041 bp, Salmonella enterica subsp. enterica serovar Heidelberg str. SL476
  CDS (1)..(1041): transl_table=11
atgaaagttatgcgtaccactgtcgcaactgttgtcgccgcgaccttatcgatgagcgcgttctctgcctttgcagcagcaagcctgacaggtgccggtgcaacgtttcctgcgccggtgtatgccaaatgggcggatacctaccagaaagaaaccggtaacaaagtcaattaccaggggataggctcttccggcggcgtgaaacaaatcaccgcgaataccgttgattttggcgcttccgatgcgccgctgtctgacgaaaaactggatcaggaaggcctgttccagtttccgacggtgatcggcggcgtggtgctggcggtgaatattccaggcctcaaatccggcgaactggtgctggatggtaaaacgctgggtgacatctacctcggtaaaatcaagaagtgggatgatgaagccatcactaaactgaacccaggcgtgaagctgccttctcagaacatcgctgtggtgcgtcgcgctgacggttccggtacctccttcgttttcaccagttacctggcgaaagtcaacgacgagtggaaatcgaaagtgggcgcgggttctaccgtgaactggccaaccggtctgggcggtaaaggtaacgacggcatcgcggcatttgtacagcgtctgccaggcgctattggctacgttgaatacgcttacgctaagcagaacaacctggcctacaccaaactggtttctgccgacggcaaaccggtaagcccgacggaagagagcttctctaatgcggcgaaaggcgcagactggagcaaaaccttcgcgcaggatctgaccaaccagaaaggtgacgatgtgtggccaatcacttccaccacgtttatcctggtccacaaagcgcagaagaaacctgagcagggtgctgaagtgttgaagttcttcgactgggcctacaaaaatggcgctaagcaggcgaatgatctggactacgccagcctgccggataacgttgttgagcaggttcgtaccgcctggaagaccagtataaaagacagcaacggtaaagcactgtattaa

SEQ ID NO: 2866 - protein, 346 aa, Salmonella enterica subsp. enterica serovar Heidelberg str. SL476
MKVMRTTVATVVAATLSMSAFSAFAAASLTGAGATFPAPVYAKWADTYQKETGNKVNYQGIGSSGGVKQITANTVDFGASDAPLSDEKLDQEGLFQFPTVIGGVVLAVNIPGLKSGELVLDGKTLGDIYLGKIKKWDDEAITKLNPGVKLPSQNIAVVRRADGSGTSFVFTSYLAKVNDEWKSKVGAGSTVNWPTGLGGKGNDGIAAFVQRLPGAIGYVEYAYAKQNNLAYTKLVSADGKPVSPTEESFSNAAKGADWSKTFAQDLTNQKGDDVWPITSTTFILVHKAQKKPEQGAEVLKFFDWAYKNGAKQANDLDYASLPDNVVEQVRTAWKTSIKDSNGKALY

SEQ ID NO: 2867 - DNA, 1035 bp, Burkholderia cenocepacia PC184
  CDS (1)..(1035): transl_table=11
atgaaattgatgcaaaccgcgattgccggcctggctggcgcgcttttcgccgtcgccgcccacgctgccgacatcacgggcgcaggtagcacgttcgcgatgccgatctatacgaaatgggctgccgactaccagcagtccggcggttcgaaggtcaactaccagggcatcggctcgtcgggcggcctgaagcagatcgtcgcgaagacggtcgactttgccggttcggacgcaccgctgaaggatgaagaactcgcgaaggaaggcctgttccagttcccgacggtggtcggcggcgtggtgccggtcgtcaacgtgccgggcgtgaaggccggcgaactgacgctgtcgggcccggtgctcggcgacatctacctcggcaagatcaagaagtggaacgacccggcgatcgccgcgctgaacccgaaggtcaagctgccggatacggacatcgcggtggtccgccgcgctgacggctcgggcacgagcttcatctggacgaactacctgtcgaaggtcaacgacgagtggaagtcgaagatcggcgaaggcacgacggtcaactggccgacgggcacgggcggcaagggcaacgacggcgtcgcggccttcgtgcagcgcctgccgggcgcgatcggctatgtcgagtgggcgtacgcgaagaagaacaacatgacctacactgccctgaagaactcgacgggcacggtggtcgaaccgaagacggaaacgttcaaggccgcggcagccggtgcgaactggtcgaagtcgttctaccagatcctgacgaaccagccgggcaaggaagcttggccggtcgtcggcgcgacgttcgtgctgctgcacgcgaagcaggacaagccggagcagggcgcggaaacgctgaagttcttcagctgggcgttcaagaacggcgagaaggccgccgacagcctcgactacatctcgctgccggcgtcggtcgagacggaaatccgcaaacagtggaagacgaaggtgacggacgcttcgggcaagccggtcgccgccgagtaa

SEQ ID NO: 2868 - protein, 344 aa, Burkholderia cenocepacia PC184
MKLMQTAIAGLAGALFAVAAHAADITGAGSTFAMPIYTKWAADYQQSGGSKVNYQGIGSSGGLKQIVAKTVDFAGSDAPLKDEELAKEGLFQFPTVVGGVVPVVNVPGVKAGELTLSGPVLGDIYLGKIKKWNDPAIAALNPKVKLPDTDIAVVRRADGSGTSFIWTNYLSKVNDEWKSKIGEGTTVNWPTGTGGKGNDGVAAFVQRLPGAIGYVEWAYAKKNNMTYTALKNSTGTVVEPKTETFKAAAAGANWSKSFYQILTNQPGKEAWPVVGATFVLLHAKQDKPEQGAETLKFFSWAFKNGEKAADSLDYISLPASVETEIRKQWKTKVTDASGKPVAAE

SEQ ID NO: 2869 - DNA, 1035 bp, Burkholderia dolosa AUO158
  CDS (1)..(1035): transl_table=11
atgaaattgatgcaaaccgcgattgccggcctggctggcgcgatcttcgccgttgccgcgcacgctgccgacatcacgggcgcaggcagcacgttcgcgatgccgatctacacgaaatgggctgcggactaccagcagtccggcggcgcgaaggtcaactatcaaggtatcggatcgtcgggcggcctgaagcagatcgtcgcgaagacggtcgattttgccggttcggatgcgccgctgaaggatgacgagctcgcgaaggaaggcctgttccagtttccgacggtcgtgggcggtgtggtgcccgtcgtcaacgtgccgggcgtgaaggccggcgaactgacgctgtcgggcccggtgctcggcgacatctacctcggcaagatcaagaagtggaacgatccggcgatcgttgcgctgaacccgaagctgaagctgccggacacggacatcgccgtggtccgccgcgctgacggctcgggcacgagcttcatctggacgaactacctgtcgaaggtcaacgacgagtggaagtcgaagatcggcgaaggcacgacggtgaactggccgacgggcacgggcggcaagggcaacgacggcgtcgcggcattcgtgcagcgcctgccgggcgcgatcggctacgtcgagtgggcgtatgcgaagaagaacaacatggtctataccgcgctgaagaactcgacgggcacggtggtcgagccgaagaccgaaacgttcaaggctgcggccgcaggcgcgaactggtcgaagtcgttctaccagatcctgacgaaccagccgggcaaggacgcatggccggtcgtcggtgcgacgttcgtgctgctgcacgcgaagcaggacaagccggagcagggcgccgaaacgctgaagttcttcagctgggcgttcaagaacggcgagaaggcggccgacagcctcgactacatctcgctgccggcggcggtcgaagcggaaatccgcaagcagtggaaggtgaaggtgaccgacgcatcgggcaagccggtcgccgcggagtaa

SEQ ID NO: 2870 - protein, 344 aa, Burkholderia dolosa AUO158
MKLMQTAIAGLAGAIFAVAAHAADITGAGSTFAMPIYTKWAADYQQSGGAKVNYQGIGSSGGLKQIVAKTVDFAGSDAPLKDDELAKEGLFQFPTVVGGVVPVVNVPGVKAGELTLSGPVLGDIYLGKIKKWNDPAIVALNPKLKLPDTDIAVVRRADGSGTSFIWTNYLSKVNDEWKSKIGEGTTVNWPTGTGGKGNDGVAAFVQRLPGAIGYVEWAYAKKNNMVYTALKNSTGTVVEPKTETFKAAAAGANWSKSFYQILTNQPGKDAWPVVGATFVLLHAKQDKPEQGAETLKFFSWAFKNGEKAADSLDYISLPAAVEAEIRKQWKVKVTDASGKPVAAE

SEQ ID NO: 2871 - DNA, 1011 bp, Hydrogenobaculum sp. Y04AAS1
  CDS (1)..(1011): transl_table=11
atgaagttaaaacaagttttagcggtagctgtttttgctggtagcattcaaggagctatggcttggactataacaggagctggttctacatttatcgaacctgctatgcaaagatgggctcttcactttaagcaagccaccggaaaccatgtaaactaccaaggtataggttctggcggtggtatactccaagctacaaaaagaacgatagattttggtgcatctgatgctccgttaaaaccagcagagttgaaggaaaggggccttattcagtggccagatgctataggtggtgtggtaatgggttataacataccaggtgttggaaactatcaacttcacctcgccggtaagcaaatatgcgatatttatatgggtaagataagatattgggatgacccaaggataaaagccacaaacccaaaattaaatttaccccacgtaccgatcacaccggttcacagagctgatggttctggtaccacttggatattcacaaactatcttacaaaagtatgtccagcttgggcacaaaagatagggtttaacacctctgtaccatggccggtgggtataggtggtaaaggttctgagggtgtgacaaactatataatgagagttagaggtgctataggttatgtagaatacgcttatttcaagcaaaaccacttcaacgttgcagtcttagaaaacaaggctggttggtgggttgctccaactatgcaaaccatgatagctgctgctaaacaagcaaattggaacgaagctattaaacaagatttttatatggagcttccaaaccctccaggtaaagactcttatcctatagaaggtccgacatttatattgcttccaaaaggcaaagctaccaactcttacgtgttgcagtactatacatgggtctttaaccatggtgatgctgatttgagagctcttgattacattacacttccagattttgtcaaaaaggatataatggcctcttggaaaaagcatggcttaagctggtaa

SEQ ID NO: 2872 - protein, 336 aa, Hydrogenobaculum sp. Y04AAS1
MKLKQVLAVAVFAGSIQGAMAWTITGAGSTFIEPAMQRWALHFKQATGNHVNYQGIGSGGGILQATKRTIDFGASDAPLKPAELKERGLIQWPDAIGGVVMGYNIPGVGNYQLHLAGKQICDIYMGKIRYWDDPRIKATNPKLNLPHVPITPVHRADGSGTTWIFTNYLTKVCPAWAQKIGFNTSVPWPVGIGGKGSEGVTNYIMRVRGAIGYVEYAYFKQNHFNVAVLENKAGWWVAPTMQTMIAAAKQANWNEAIKQDFYMELPNPPGKDSYPIEGPTFILLPKGKATNSYVLQYYTWVFNHGDADLRALDYITLPDFVKKDIMASWKKHGLSW

SEQ ID NO: 2873 - DNA, 1032 bp, Geobacter bemidjiensis Bem
  CDS (1)..(1032): transl_table=11
atgattcagcagataaaaaaagcattcctggcgctggccctcgtggcgactgtgggcgccgccgcaggtcaggcatccgcggaaaccctcattaacggcgcaggcgccaccttcccgtatcccctttactccaagtggttcagcgagtacgccaaagtggacaagagcgttaagttcaactaccaatccatcggcagcggcggcggcatcaagcagatcaccgctcagaccgtcgatttcggcgccagcgataaattcctctccgatcaggaactgagcgcggccccgggcaagctccttcacatcccgaccgtcatgggtgccgtcgtagtcacctacaacgttccgggggtaccctccggcatcaagctcaactccgaagacgtagccaacatctacctcggtaagatcaccatgtggaacgacaagaggatcgccgacgacaacaaggggatcaacctcccggccaagccgatcatcgtcgtccaccgctccgacggcagcggcaccaccagcatctttacggactacctgaccggggtcaacgcggagtgggcgaagaaggtcggcaagggcgcttccgtcaagtggccggtaggtctgggcggcaagggtaacgaaggcgttgcgggacagatcaagaccaccccgtacaccatcggctacgtcgaactcgcctacgccttcgaaaacaagcttcccttcgcgtccctgaaaaacggcgccggcgtcttcgtggcaccgtccatcaagtccaccagcgccgcggcggcagcagcgctgaagaatatgcccgccgactaccgcatctcgctggtgaaccagcccggcaaggacgcctacccggtggtcggcttcacctggctcctcgtttatgagaagcagaaggatgctgtcaagggcaagaagctggtcgagttccttaactggagcatgaccaaagggcagaagatggcgtcccccatgctgtacgcgccgcttccgaacagcgtggtgaagatggttcagaagacgatcaagaccatcaagtaa

SEQ ID NO: 2874 - protein, 343 aa, Geobacter bemidjiensis Bem
MIQQIKKAFLALALVATVGAAAGQASAETLINGAGATFPYPLYSKWFSEYAKVDKSVKFNYQSIGSGGGIKQITAQTVDFGASDKFLSDQELSAAPGKLLHIPTVMGAVVVTYNVPGVPSGIKLNSEDVANIYLGKITMWNDKRIADDNKGINLPAKPIIVVHRSDGSGTTSIFTDYLTGVNAEWAKKVGKGASVKWPVGLGGKGNEGVAGQIKTTPYTIGYVELAYAFENKLPFASLKNGAGVFVAPSIKSTSAAAAAALKNMPADYRISLVNQPGKDAYPVVGFTWLLVYEKQKDAVKGKKLVEFLNWSMTKGQKMASPMLYAPLPNSVVKMVQKTIKTIK

SEQ ID NO: 2875 - DNA, 1053 bp, Geobacter bemidjiensis Bem
  CDS (1)..(1053): transl_table=11
atgtggaacagacttgtcaaaaacatcctcgcattagccctagccatctcggccgcatccggttcggcctacgctgaaactgcgctcaccggggccggcgccactttcccccatcccctctacagcaagtggttcagggactatcaggcagaagatcccggcgtgaccttccgctacgacgcgcaggggagcggcgagggtatcaggaggatcctggcccgcgaggtcgacttcggcgcatccgacaagtttctctccgacgaagaactgaataaagcgcccggcaagctgctgcacatccctaccgtgatgggcgccgtcgccgtcacctacaatatccccggaatcggttccgacctgaaactcacgccgcaggcgcttgccgggatctacctcgggaaggtcaccaaatggaacgacccgctcatcgccagggagaacgccaagctcaagctccccgctgaggatatcgtcgccgtgcaccgctcagacgccagcggcaccactagcatctttaccgactacctgagctcggtggacccatcctggtcaagcgggatcggcaagggaacgaccgtggcctggcctgcgggaatcggggcgaaggggagcagtgcggtggtgaagaagataaaggaggttccctacagcatcggctacgtggagatcgcctacgcgctggagaacgagctgaatgcggcggcgctgaagaaccgggccggtaagttcgtcaggccgaccatgctctccacgagagccgcggccgttcagggaatgaaaaatcacaagatgaaaaaggatgtggaattggactaccgcctgtccctggtgaaccagccgggcaaggacgcctaccctatcgtcgggctcacctggctgctggtgtaccgtgaccagcaggacccggtcaaggggaggaagctggtcgagttccttacctggcagctgaaaaaggccgagaagatgacttccacgctgcactacaccccgctccccgacacctggtccgcccaggtggaaaaaaccatcaggagcatcgctgtaccgcagtaa

SEQ ID NO: 2876 - protein, 350 aa, Geobacter bemidjiensis Bem
MWNRLVKNILALALAISAASGSAYAETALTGAGATFPHPLYSKWFRDYQAEDPGVTFRYDAQGSGEGIRRILAREVDFGASDKFLSDEELNKAPGKLLHIPTVMGAVAVTYNIPGIGSDLKLTPQALAGIYLGKVTKWNDPLIARENAKLKLPAEDIVAVHRSDASGTTSIFTDYLSSVDPSWSSGIGKGTTVAWPAGIGAKGSSAVVKKIKEVPYSIGYVEIAYALENELNAAALKNRAGKFVRPTMLSTRAAAVQGMKNHKMKKDVELDYRLSLVNQPGKDAYPIVGLTWLLVYRDQQDPVKGRKLVEFLTWQLKKAEKMTSTLHYTPLPDTWSAQVEKTIRSIAVPQ

SEQ ID NO: 2877 - DNA, 1029 bp, Geobacter bemidjiensis Bem
  CDS (1)..(1029): transl_table=11
atgatcaagagcattaaaaaagcattcctgaccttggccctgatggcagcatttggtaccgcagcgcaggcatccgccgagaccctcatcaacggcgccggcgccaccttcccgtacccgctttactccaagtggttcaccgagtacgccaaggtggataaagcggtgaagttcaactatcagtccatcggcagcggcggcggcatcaagcagatcagcgcgcagaccgtcgacttcggcgcgagcgacaagttcctctccgaccaggagctcaatgcagctccgggcaagctgatccacatcccgaccgtcatgggcgccgtggtagtgacctacaacgtcccgggcgtggttagcgggctgaaactcaactccgaggacgtcgccaacatctacctcggtaagatcaccatgtggaacgacccgaggatcgccgacgacaacaagggggtgaacctcccggccaagccgatcatcgtcgtgcaccgctccgatgggtccggcaccaccagcatcttcaccgactacctgaacgggatgaaccgcgaatgggcgcagaaggtcggcaagggcgcttcggtgaagtggccggttggccttggcggcaagggtaacgagggtgtcgcggggcaggtgaagaccaccccgtattccatcggctacgtcgaactcgcctacgcctttgagaacaaactcccctacgcttcgctcaagaacaaggccggcgtcttcgtcgaaccctccatcaagtccaccagtgcggcagccgccgcagccgtcaaggacatgccggctgattatcgcatctccctggtgaatcagccgggcaaggacgcctatcccgtggtcggatttacctggctcttggtgtacgagcaccagaaggatgcagccaaagggaagcagatggtcgagttcttgaactgggccatgaccaaggggcagaagatggccgccccgatgctctacgcgccgctgccggagagcgtcgtgaaaatggtgcagaaaaccatcaagaccatcaaatag

SEQ ID NO: 2878 - protein, 342 aa, Geobacter bemidjiensis Bem
MIKSIKKAFLTLALMAAFGTAAQASAETLINGAGATFPYPLYSKWFTEYAKVDKAVKFNYQSIGSGGGIKQISAQTVDFGASDKFLSDQELNAAPGKLIHIPTVMGAVVVTYNVPGVVSGLKLNSEDVANIYLGKITMWNDPRIADDNKGVNLPAKPIIVVHRSDGSGTTSIFTDYLNGMNREWAQKVGKGASVKWPVGLGGKGNEGVAGQVKTTPYSIGYVELAYAFENKLPYASLKNKAGVFVEPSIKSTSAAAAAAVKDMPADYRISLVNQPGKDAYPVVGFTWLLVYEHQKDAAKGKQMVEFLNWAMTKGQKMAAPMLYAPLPESVVKMVQKTIKTIK

SEQ ID NO: 2879 - DNA, 1041 bp, Proteus mirabilis HI4320
  CDS (1)..(1041): transl_table=11
atgaaactgatgcgtaccaccctgaccagtgtcattgccgctgcactttcaatgacggctctttctgcacaggcaacgacctcactgactggtgctggcgcaacgttccctgctccagtttatgcaaaatgggcagatagctatcaaaaagaaactggcaacaaagttaactaccaaggcataggctcttctggtggtgtaaaacagatcattgctaatactgtcgattttggtgcttctgatgcaccattagctgatgaaaaactcaaggctgacggtttattccaatttccaactgtcatcggtggtgtggtgatggcagtcaatatctcaggtattaaatccggtgagcttgtcttagacggtgagactatcgggaatatctacttaggcaagatccaaaaatggaatgatcctgctatagctaaactaaatccaaaactcaatctacctgaccaaaacattgctgttgttcgtcgtgctgatggttcaggcacatcattcgtttttactagctacttatctaaagtaaatagcgcatggaaagatgaagtaggcgcaggctctaccgttaaatggcctacaggcttaggtggtaagggaaatgatggcatcgcagcctttgttcaacgtctaccaggctcaattggttatgttgaatacgcttacgcaaaacaaaacaatcttgcatatactcaattagtcactgcagatggcgaagttattcctcctactgccgatagttttagcgcagcagcgagaaaaattgattggagtaagagctttgcacaagacctaacgaatcaaaaaggcgaaaatgcctggccaattacttctactaccttcattttagtgcatcaaacgcaaaaagatgcggctaaaggaaaagaagtactgaatttctttaactgggcatatgaaaaaggcaatgatgaagcgaaaaatcttgattacgccgtattgccaaaagaagtggtagaacaaattcgtgccgcttggaaaacaagcatcaaagacagtaatggtaaaccaatttactaa

SEQ ID NO: 2880 - protein, 346 aa, Proteus mirabilis HI4320
MKLMRTTLTSVIAAALSMTALSAQATTSLTGAGATFPAPVYAKWADSYQKETGNKVNYQGIGSSGGVKQIIANTVDFGASDAPLADEKLKADGLFQFPTVIGGVVMAVNISGIKSGELVLDGETIGNIYLGKIQKWNDPAIAKLNPKLNLPDQNIAVVRRADGSGTSFVFTSYLSKVNSAWKDEVGAGSTVKWPTGLGGKGNDGIAAFVQRLPGSIGYVEYAYAKQNNLAYTQLVTADGEVIPPTADSFSAAARKIDWSKSFAQDLTNQKGENAWPITSTTFILVHQTQKDAAKGKEVLNFFNWAYEKGNDEAKNLDYAVLPKEVVEQIRAAWKTSIKDSNGKPIY

SEQ ID NO: 2881 - DNA, 1041 bp, Mannheimia haemolytica PHL213
  CDS (1)..(1041): transl_table=11
atgattgccaaacgatttaaactacttaccgttttaggcatttctttttcactttctgtcgcagcaaatgctcaaaccatcacaggagccggtgcttctttcccttatcctatctacgccaaatgggcaggtttatatgaaaaagagaccggtaataaaatcaattaccaatctatcggttccggtggcggtcagcaacaaattattgccaaaacaattgatttcggtgcttctgatgacccgatgaaaggcgaaacattagcagaacacaaacttttgcaatttcccgccatcattgggggaactgtaccggttgtcaatattcctgaacttaaatcgggcgaactgaaactgtccggtaaagttcttgccgatatattcctaggcaaaattacacaatggaacgatccggcaattgtcgcacttaatcaagatatcgccctgccggcaaaaacaattttagtcgtacgccgctcagacggttcaggcacaactttcggttggacaaactatctttctaaagtctctgccgaatggaaggagaaagtcggcgaaggaaaatcggtgaaatggccggtcggacaaggcggaaaaggaaatgaaggtgtcgcagcttatgtgaaacagctcaagtattctattggttacgtagaatatgcctatgctaaacaaaatgctctggcttgggtttctatgcaaaatgcagatggtaaatttgttcagccttcccgtgaaacgtttgctgctgccgctgctaacgccgattggagccaaacagccggtatgggcgttattttaaccaacgaagcgggagaaaaagcctggccgattaccgccgccagttttatcttgattcatcaacatagcgacaaaccagagcaaactaaaggggtatttaaattcttcgactgggcatttaagcacggtaaagatgcggctgccgaactggattatgtgcctctaccggataatgtagtagagaaaatccaaactcaatggaaaacggaagttaaagatggacaaggaaattcgctctactaa

SEQ ID NO: 2882 - protein, 346 aa, Mannheimia haemolytica PHL213
MIAKRFKLLTVLGISFSLSVAANAQTITGAGASFPYPIYAKWAGLYEKETGNKINYQSIGSGGGQQQIIAKTIDFGASDDPMKGETLAEHKLLQFPAIIGGTVPVVNIPELKSGELKLSGKVLADIFLGKITQWNDPAIVALNQDIALPAKTILVVRRSDGSGTTFGWTNYLSKVSAEWKEKVGEGKSVKWPVGQGGKGNEGVAAYVKQLKYSIGYVEYAYAKQNALAWVSMQNADGKFVQPSRETFAAAAANADWSQTAGMGVILTNEAGEKAWPITAASFILIHQHSDKPEQTKGVFKFFDWAFKHGKDAAAELDYVPLPDNVVEKIQTQWKTEVKDGQGNSLY

SEQ ID NO: 2883 - DNA, 1026 bp, Oligotropha carboxidovorans OM5
  CDS (1)..(1026): transl_table=11
atgaatttcttcaaaaccatcgtcgctgccggcttcgttgccgcctcggcgtccgccttttcgctcccggcgatggcggctgacatcaccggtgcgggcgcgaccttcccgttcccggtctattcgaaatgggccgatgcctacaagaaagagacgggcaacggcctgaactatcaatcgatcggctcgggcgccggcatcaagcagatcctcgccaagaccgtgaccttcggcgcgaccgacgcgccgctcaaggccgatagactcgataaggacggcctcctgcagtggccgatggtgatgggcgcgatcgttcccgtcgtgaacgtcgagggcgtgaagtcgggtgaactcgttctttcgggcgaagtgcttggtgacatctatctcggcaaggtcaccaagtggaacgacccggcgattgccaagctcaatccgaacctgaagcttccctccgatgcgatcgcggtggtgcgtcgctccgacggttcgggcacctcgttcaacttcaccgactatctgtccaaggccaatgccgaatggaagtccaaggtcggttcgggcactgccgtcgagtggccggtgggtgtcggcgccaagggcaacgaaggtgttgccggtaatgtcggtcagaccaagaactcgatcggttatgtcgagtatgcttatgccaagcagaacaagctgacccacgtggcgctgatcaacaaggccggcaagaccgtgcagccgaccattgcgtcgttccaggctgcggccgccaacgccgactgggcgcatgcaccgggctactacgtgatcctgaccgaccagccgggtgagacctcctggccgatcactgcggcgaccttcatcctgatgtacaaggagccggccgataaggcggcgtccgccgaagccatcaagttcttcaagtgggcgttcgagaagggcggcaagatggccgaggagctcgactacatcccgatgccggactcggtcgtgaagcagatcgagaagacctggacctccgagatcaagagctga

SEQ ID NO: 2884 - protein, 341 aa, Oligotropha carboxidovorans OM5
MNFFKTIVAAGFVAASASAFSLPAMAADITGAGATFPFPVYSKWADAYKKETGNGLNYQSIGSGAGIKQILAKTVTFGATDAPLKADRLDKDGLLQWPMVMGAIVPVVNVEGVKSGELVLSGEVLGDIYLGKVTKWNDPAIAKLNPNLKLPSDAIAVVRRSDGSGTSFNFTDYLSKANAEWKSKVGSGTAVEWPVGVGAKGNEGVAGNVGQTKNSIGYVEYAYAKQNKLTHVALINKAGKTVQPTIASFQAAAANADWAHAPGYYVILTDQPGETSWPITAATFILMYKEPADKAASAEAIKFFKWAFEKGGKMAEELDYIPMPDSVVKQIEKTWTSEIKS

SEQ ID NO: 2885 - DNA, 1020 bp, Acidithiobacillus ferrooxidans ATCC 53993
  CDS (1)..(1020): transl_table=11
atgaagatcaagggtgtggcttttgtgttgggggtgatgagcctgggtgtggcagggctggcgcaggcggaaaccatttccgccgcaggcggcacagccatttatcccgtcctgtccaaatgggcggaaacttacaaacagaaaaccggcatcatggtgaattatcaggccatcggttccggtggcgggattgcccaaatcaaggccaaaaccgtcgctttcgccaacagcgacatgcctctccagcctgaatatctcaacaaagaccagctcgtccagtttccggctgtgattattggcattacccccgtcgtgaatgtccccggtataaagcccggtgaactgaccttcaacggcgccgtactcaccggtatttatctgggcaagatcaagaaatggaacgacgcggccattgccgacctcaataagggcgttcatctgccggatatgaatatcacggtggtccatcgttctgacggttccggaaccaccttcaactttaccaattatctggccaaggtcagcccggaatggaagcaacgggtgggcgataacacggctgtttcctggcccgtcggtgtgggtggcaagggcaatgcgggcgtcgccgcatatgtacagcggattcctggagccatcggctacgtggaatatgcctacgccaaggaaaatcacatggcttacggcaaaatgatcaatgctgcgggcaaggtggtggcccctgatctggctactttccaggccgccgcggcaaatgcggattttaccaaggtagaggatttctacgtgattctcaccaaccagccgggtgcccagagttggcccatttccgctgcgacttacatcctgatgcgccaggatgcccataagacggtcaatgcgggagtcctgaagtttgcacgctggttcctgacagccccgcaggcgcaagcggaagccaggggcctggattatgtgccattaccaaaaactacggtgacgcagattgaggcgtactggaaaaggaatctgggccagtga

SEQ ID NO: 2886 - protein, 339 aa, Acidithiobacillus ferrooxidans ATCC 53993
MKIKGVAFVLGVMSLGVAGLAQAETISAAGGTAIYPVLSKWAETYKQKTGIMVNYQAIGSGGGIAQIKAKTVAFANSDMPLQPEYLNKDQLVQFPAVIIGITPVVNVPGIKPGELTFNGAVLTGIYLGKIKKWNDAAIADLNKGVHLPDMNITVVHRSDGSGTTFNFTNYLAKVSPEWKQRVGDNTAVSWPVGVGGKGNAGVAAYVQRIPGAIGYVEYAYAKENHMAYGKMINAAGKVVAPDLATFQAAAANADFTKVEDFYVILTNQPGAQSWPISAATYILMRQDAHKTVNAGVLKFARWFLTAPQAQAEARGLDYVPLPKTTVTQIEAYWKRNLGQ

SEQ ID NO: 2887 - DNA, 1035 bp, Burkholderia cenocepacia J2315
  CDS (1)..(1035): transl_table=11
atgaaattgatgcaaaccgcgattgccggcctggctggcgcgcttttcgccgtcgccgcccacgctgccgacatcacgggcgcaggcagcacgttcgcgatgccgatctatacgaaatgggccgcggactaccagcagtccggcggttcgaaggtcaactaccagggcatcggctcgtcgggcggcctgaagcagatcgtcgcgaagacggtcgattttgccggttcggacgcaccgctgaaggatgaagagctcgcgaaggaaggcctgttccagttcccgacggtggtcggcggcgtggtgccggtcgtcaacgtgccgggcgtgaaggccggcgaactgacgctgtcgggcccggtgctcggcgacatctacctcggcaagatcaagaagtggaacgacccggcgatcgccgcgctgaacccgaaggtcaagctgccggatacggacatcgccgtggtccgccgcgctgacggttcgggcacgagcttcatctggacgaactacctgtcgaaggtcaacgacgagtggaagtcgaagatcggcgaaggcacgacggtcaactggccgacgggcacgggcggcaagggcaacgacggcgtcgcggccttcgtgcagcgtctgccgggcgcgatcggctacgtcgagtgggcgtacgcgaagaagaacaacatgacctacacggccctgaagaattcgacgggcacggtggtcgagccgaagacggaaacgttcaaggccgcggcagccggcgcgaactggtcgaagtcgttctaccagatcctgacgaaccagccgggcaaggaagcatggccggtcgtcggcgcgacgttcgtgctgctgcacgcgaagcaggacaagccggagcagggcgcggaaacgctgaagttcttcagctgggcgttcaagaacggcgagaaggctgccgacagcctcgactacatctcgctgccggcgacggtcgagacggaaatccgcaagcagtggaagacgaaggtgacggacgcttcgggcaagccggtcgccgccgagtaa

SEQ ID NO: 2888 - protein, 344 aa, Burkholderia cenocepacia J2315
MKLMQTAIAGLAGALFAVAAHAADITGAGSTFAMPIYTKWAADYQQSGGSKVNYQGIGSSGGLKQIVAKTVDFAGSDAPLKDEELAKEGLFQFPTVVGGVVPVVNVPGVKAGELTLSGPVLGDIYLGKIKKWNDPAIAALNPKVKLPDTDIAVVRRADGSGTSFIWTNYLSKVNDEWKSKIGEGTTVNWPTGTGGKGNDGVAAFVQRLPGAIGYVEWAYAKKNNMTYTALKNSTGTVVEPKTETFKAAAAGANWSKSFYQILTNQPGKEAWPVVGATFVLLHAKQDKPEQGAETLKFFSWAFKNGEKAADSLDYISLPATVETEIRKQWKTKVTDASGKPVAAE

SEQ ID NO: 2889 - DNA, 1041 bp, Klebsiella pneumoniae 342
  CDS (1)..(1041): transl_table=11
atgaacgttatgcgtaccaccgtcgcaacagttgtcgccgcgaccttatcgatgagcgctttctctgccttcgcagcagcaagcctgactggcgcaggcgcaactttccctgcgccggtgtatgccaaatgggctgacacctatcagaaagaaaccggcaataaagtgaactaccagggtattggttcctctggtggcgttaagcagattattgccaacaccgttgatttcggtgcttctgatgctccgctggctgatgacaaactgacccaggaaggtctgttccagttcccgaccgtgattggcggcgtggtactggcggttaacctgcctggcgtgaaatccggcgaactggtgctggatggcaaaaccctcggtgatatctacctgggtaaaattaaaaaatgggatgacgcagcgatcgctaaactcaacccgggcctgaagctgccgtcgcagaacatcgccgtggttcgccgcgccgatggttccggtacctccttcgtcttcaccagctacctgtccaaagtgaatgaagagtggaaatcgaaaatcggcgccggctctaccgttaactggccaaccggcctgggcggtaaaggcaacgacggtatcgccgcctttgttcagcgtctgccgggctcgattggttacgttgaatacgcttacgccaagcaaaacaacctcgcgtataccaagctggtctctgccgacggcaagccggttagcccgactgaagacaacttcgctaacgccgcaaaaggcgttgactggagcaagtctttcgctcaggacctgaccaaccagaaaggcgaaaatgcatggccgatcacctcaaccaccttcatcctggtgcataaggcgaccaacaagccggaacagaccgctgaagtgctgaagttcttcgactgggcgtataaaaacggcgggaaagaagcgaatgcgctggattacgcgacgctgccggaaagcgtggtagagcaggttcgcgcggcatggaaaaccaacgtcaaagacagcagcggtaaagcgctgtactaa

SEQ ID NO: 2890 - protein, 346 aa, Klebsiella pneumoniae 342
MNVMRTTVATVVAATLSMSAFSAFAAASLTGAGATFPAPVYAKWADTYQKETGNKVNYQGIGSSGGVKQIIANTVDFGASDAPLADDKLTQEGLFQFPTVIGGVVLAVNLPGVKSGELVLDGKTLGDIYLGKIKKWDDAAIAKLNPGLKLPSQNIAVVRRADGSGTSFVFTSYLSKVNEEWKSKIGAGSTVNWPTGLGGKGNDGIAAFVQRLPGSIGYVEYAYAKQNNLAYTKLVSADGKPVSPTEDNFANAAKGVDWSKSFAQDLTNQKGENAWPITSTTFILVHKATNKPEQTAEVLKFFDWAYKNGGKEANALDYATLPESVVEQVRAAWKTNVKDSSGKALY

SEQ ID NO: 2891 - DNA, 1032 bp, Thermodesulfovibrio yellowstonii DSM 11347
  CDS (1)..(1032): transl_table=11
atgaaatgtttaaaaagtctaactttaagtaagttttttattgtaattgcagtaatgtttattctgttaagcttctctatatcttcttttgctcaaatgctcaatggcgcaggtgcatcttttccctatcctctttattcaagttgggctgccgcttatcataaggaaacaggtatccaaattaattatcaatcaattggttcaggtggtggaataagacagattactgaaagaactgttcattttggtgcttcagacttacctcttaaacctgaagagcttgaaaaagcaggacttattcagttccctgctgcaataggtggagttgttcctataatcaatgtccctgagattaaaggtaaaaaaattaccttagatggaattacactcgcagagatatttctcggagaaattacaaaatggaatgaccctaaaattaaagcattaaatccaaaaattaatttacccgatcaacctattactgtggttcataggtcagacggctcaggaaccacttccatatttactcattatttaagtagcgtatccaaaaaatgggctgaccaaattggttatggaacttctgtaaactggaaaactggtttaggaggaaaaggaaatgaaggtgttgcaaactatgttaaaagaactccttactcaattggatatgtagaatttgcttatgctgtccagaacagattagacactgcaaaaatgaaaaattctgctggacagattgttgaagccaattttgaaagttttgccaatgcagcagcttctgctcatcttgatgcaaaaaatcatttctatgcatggatgacaaatgcaccaggcaaaaaagcttggcctatcacaggtgcaacttatattctgcttgcaagagaaaaaaatgatgttaataaatccgtcataaaattctttgactgggcatttaaaaatggtgataacactgcaaaaaaacttgattatgtcccactgcctcaaaatgtaaaagacaaaataagagcatactggggactttatatcaaataa

SEQ ID NO: 2892 - protein, 343 aa, Thermodesulfovibrio yellowstonii DSM 11347
MKCLKSLTLSKFFIVIAVMFILLSFSISSFAQMLNGAGASFPYPLYSSWAAAYHKETGIQINYQSIGSGGGIRQITERTVHFGASDLPLKPEELEKAGLIQFPAAIGGVVPIINVPEIKGKKITLDGITLAEIFLGEITKWNDPKIKALNPKINLPDQPITVVHRSDGSGTTSIFTHYLSSVSKKWADQIGYGTSVNWKTGLGGKGNEGVANYVKRTPYSIGYVEFAYAVQNRLDTAKMKNSAGQIVEANFESFANAAASAHLDAKNHFYAWMTNAPGKKAWPITGATYILLAREKNDVNKSVIKFFDWAFKNGDNTAKKLDYVPLPQNVKDKIRAYWGLYIK

SEQ ID NO: 2893 - DNA, 1011 bp, Thermodesulfovibrio yellowstonii DSM 11347
  CDS (1)..(1011): transl_table=11
atgattaaaacaaaattggctttattggttttattgtttattttattaagcttctctatctcttcttctgctgaaatgattaatggcgcaggtgcaaccttcccctatcctctttattcaagttgggctgccgcttacaataaagccacaggaattaaggttaactatcaatcaattggttcaggtggtggaataagacagattactgaaagaactgttcattttggtgcatctgatatggcattgaaacctgaggaaattgaaaaatcaaaacttcttcagttccctgcggtaataggtggagttgtaccaattgtaaatattccaggagtctcttctaatgcattggttcttgatggaactacaatgtgcgaaatatttcttggtgaaatcaagcaatggaatgaccctaaaattaaagcacttaatcccaaactaaatctaccagcaaagcccatcacagttgttcatcgctccgacggttctggaacaactgctatatttactcattatcttagcagtgcatgtaaaaaatgggcaaataatgttggatacggaacttcagtaagctggaaaacaggacttggtggtaagggtaatgaaggagtagctaactatgtaaaaagaactccctattcaattggttatgttgagtttgcctatgcaaaacagaataaactctctgtagtaaggcttaaaaattctgctggacagattgttgctccagactttgaaagttttgcagaagcagcagcttctgctcatcttgatgcaaaaaatcatttctatgcctggatgacaaatgcaccaggcaaaaaagcttggcctattacaggtgcaacttatattctgcttgcaagggaaaaaaatgatgtcaataaatccgtcataaaattctttgactgggcatttcaaaatggtgacaacactgcaaaaaaacttgattatgtcccgctgcccaagaatttaaaagataaaataagaacatactggaaatcttatataaaataa

SEQ ID NO: 2894 - protein, 336 aa, Thermodesulfovibrio yellowstonii DSM 11347
MIKTKLALLVLLFILLSFSISSSAEMINGAGATFPYPLYSSWAAAYNKATGIKVNYQSIGSGGGIRQITERTVHFGASDMALKPEEIEKSKLLQFPAVIGGVVPIVNIPGVSSNALVLDGTTMCEIFLGEIKQWNDPKIKALNPKLNLPAKPITVVHRSDGSGTTAIFTHYLSSACKKWANNVGYGTSVSWKTGLGGKGNEGVANYVKRTPYSIGYVEFAYAKQNKLSVVRLKNSAGQIVAPDFESFAEAAASAHLDAKNHFYAWMTNAPGKKAWPITGATYILLAREKNDVNKSVIKFFDWAFQNGDNTAKKLDYVPLPKNLKDKIRTYWKSYIK

SEQ ID NO: 2895 - DNA, 1029 bp, Dictyoglomus thermophilum H-6-12
  CDS (1)..(1029): transl_table=11
atgagaaaatggattctattgcttatgattcttcttctttcctctgtatccttaggacaacaagtaatcatcaatggtgctggtgctacttttccttatcctctatattcaagatggttttacgagtttgagagagagacagggataaagataaattatcaatcggtaggtagtggtgctggtattcaacaggcaaaagcaggtactgtagattttggggctactgatgctcctcttcctggaaaagaacaagaagagtcaaagcttattatgattcctactgtggcaggaagtgttgctattgtatacaatcttcctaacgtagagaagggattgaaattgtcgagggaggttattgcagatatatatcttggaaagattaaaaaatgggatgatcctaaaataaaggcattaaataaagatattaatcttcctagcattcctattgtggtggcaagaaggtctgatggtagtggtactactgctatttttacaaattttttgtctgcagtaagctctgaatggaaggaaaaggtgggagctggcacatctgtgaattggcctgtaggtatcggaggaaaaggaaatgaaggagtagctggaatagttaagaatactattggcgctattggttatgtagagtttgcctatgcagttcaaaataagttaagttatgctcaaataaagaataagtatgggagctttgtagaaccttcgatagatactgtaaagtatgcagcatctttctttaaactgcctgaggattttgcagtctatatagtagatgcgccaggaaaaaatagttatcccatagcaggatacactttcttgcttcttaagagagaatatcaggatctcgaaaaggcaaaggcaattgtaaaattcataagatgggcctatgaaaaaggagataaatatgctgaggagcttctttatgtacctctccctgataatgtgaaaaaattggccttaaagaaattagatctgataacctatcaaggaaagaaagtagtagatcttttaaagtaa

SEQ ID NO: 2896 - protein, 342 aa, Dictyoglomus thermophilum H-6-12
MRKWILLLMILLLSSVSLGQQVIINGAGATFPYPLYSRWFYEFERETGIKINYQSVGSGAGIQQAKAGTVDFGATDAPLPGKEQEESKLIMIPTVAGSVAIVYNLPNVEKGLKLSREVIADIYLGKIKKWDDPKIKALNKDINLPSIPIVVARRSDGSGTTAIFTNFLSAVSSEWKEKVGAGTSVNWPVGIGGKGNEGVAGIVKNTIGAIGYVEFAYAVQNKLSYAQIKNKYGSFVEPSIDTVKYAASFFKLPEDFAVYIVDAPGKNSYPIAGYTFLLLKREYQDLEKAKAIVKFIRWAYEKGDKYAEELLYVPLPDNVKKLALKKLDLITYQGKKVVDLLK

SEQ ID NO: 2897 - DNA, 1032 bp, Ralstonia solanacearum MolK2
  CDS (1)..(1032): transl_table=11
atgaaactggtcaagaccgcgatcgcgggcgttatttcgctggctttcgctggtgttgcgttcgccgccgacatcaccggtgctggcgcgaccttcccggcacccgtctacaacaagtgggccgatgcttatcagaaggccactggcgccaaggtgaactaccaaggcatcggctcgtccggcggtatcaagcagatcaccgccaagaccgtcgatttcggcgcctcggacatgccgctcaaggatgacgagctgaacaaggacggcctgctgcagttcccgaccgtgatcggcggcgtggtgccggtgatcaacctgccgggcgtgaaggcgggcgagctggtcctgacgggccaggtgctgggtgacatctacctgggcaaggtcaagaaatggaacgatccggcgatcgccaagctgaacccgaaggccaagctgccggaccaggacatcctggtggtgcgccgcgccgacggttcgggcacctcgttcatcttcacgaactatctgtcgaaggtgaacgccgagtggaagggcaaggtcggtgaaggcacgaccgtgaactggccgaccggcacgggcggcaagggcaacgagggcgtggccgccttcgtgcagcgcctgggcggtgcgatcggctacgtggaatacgcctacgccaagcagaaccacatgacccatgtgaacctgcagaacgcatcgggcgccgtggtgcagccgaccagcgacgcgttcaaggccgccgcggccggtgccgactggaacaagtcgttctaccagatcctgaccaaccagccgggcaaggacgcatggccgatcgccggcgctacctttatcctggtgcacaagactcaggacaagccggcccagggcaccgaagtcctgaagttcttcgactgggcctacaagaacggtggcaaggatgcctccgccctggactacgtgccgctgccggatcaggtgttgaaccagatccgcgccacctggaaatcgggtgtgaaggacgctgcgggcaagccgatctacaactga

SEQ ID NO: 2898 - protein, 343 aa, Ralstonia solanacearum MolK2
MKLVKTAIAGVISLAFAGVAFAADITGAGATFPAPVYNKWADAYQKATGAKVNYQGIGSSGGIKQITAKTVDFGASDMPLKDDELNKDGLLQFPTVIGGVVPVINLPGVKAGELVLTGQVLGDIYLGKVKKWNDPAIAKLNPKAKLPDQDILVVRRADGSGTSFIFTNYLSKVNAEWKGKVGEGTTVNWPTGTGGKGNEGVAAFVQRLGGAIGYVEYAYAKQNHMTHVNLQNASGAVVQPTSDAFKAAAAGADWNKSFYQILTNQPGKDAWPIAGATFILVHKTQDKPAQGTEVLKFFDWAYKNGGKDASALDYVPLPDQVLNQIRATWKSGVKDAAGKPIYN

SEQ ID NO: 2899 - DNA, 1044 bp, Methylocella silvestris BL2
  CDS (1)..(1044): transl_table=11
atgaattttccgttcctgcgatcagcgatcgtggcggccgtcgtcggtcttgccgtcgctcccgtcgcggcggccgatatcaccggcgccggcgcgaccttcccctatccgatctacgccaaatgggccgcagcctataagacggagaccggcaacggcctgaactatcagtcgatcggctcaggcggcggcatcaagcagatcaaggcgaacacggtcaccttcggcgccaccgacgcgcctttgaaggccgacgaactttcgaccgacggccttgcgcaatggccgatggtcatcggcggcattgttcccgtcatcaatctcgagggaatcagcgataatcagctgacgctcgacgggcaaacgctggccaacatcttcctcggaaccgtgaagacctgggacgatgcggcgatccagaagctcaatcccggcgtcaagctgccggcgaccgcgatcgccattgtgcatcgctcggacggctccggcaccaccttcaacttcaccaattatctgtccaaggtttcgccggactggaaggcgaaggtcggcgaggcgaccgccgtggaatggcccgcgggcattggcgcgaaaggcaatgaaggcgtcgccaacaacgtgatccagaccaagggcgcgatcggctatgtcgaatacgcctacgccaagcagaacaagatggtgacgacgaagctcgtcaatcaggccgggaccgccgtcgccccgaccgtgccggccttccaggccgccgccgccaacgccgattgggcgcatgcgccgggctattaccagatcctgaccgaccagccgggcgcgcagtcctggccgatcacggctgcgaccttcatactgatgcacaagcagccaacggaccccgtcgccgccggcgaggcgctgaagttcttctcctgggccttcaacaagggaaccaaggcggccgaggagctggactatatcccgctgcccgagccgctcatcaagctcgtccgggcgacctgggccgcggacatcaagggacccgacggcaaggcgctgatcaactga

SEQ ID NO: 2900 - protein, 347 aa, Methylocella silvestris BL2
MNFPFLRSAIVAAVVGLAVAPVAAADITGAGATFPYPIYAKWAAAYKTETGNGLNYQSIGSGGGIKQIKANTVTFGATDAPLKADELSTDGLAQWPMVIGGIVPVINLEGISDNQLTLDGQTLANIFLGTVKTWDDAAIQKLNPGVKLPATAIAIVHRSDGSGTTFNFTNYLSKVSPDWKAKVGEATAVEWPAGIGAKGNEGVANNVIQTKGAIGYVEYAYAKQNKMVTTKLVNQAGTAVAPTVPAFQAAAANADWAHAPGYYQILTDQPGAQSWPITAATFILMHKQPTDPVAAGEALKFFSWAFNKGTKAAEELDYIPLPEPLIKLVRATWAADIKGPDGKALIN

SEQ ID NO: 2901 - DNA, 1155 bp, Cyanothece sp. PCC 8801
  CDS (1)..(1155): transl_table=11
atgttaaaagtgctttcattccaacgctcatcgcgtttaatatcttctctatcaatacttgctttaaccgtaactttaggagcgtgcggtggcggtcaacaaaccaccgatcaggctgccactgagcaaggcggcgacaccgcatcagcccccgccgaaaaacctccccttaaaggaaatgttgccctaactggtgcgggagcatcttttccggctcctttatatcaaaactggtttgtccagcttaatagtgaaattcctgaacttcaagttaactatcagtccgtgggcagtggggcaggggtagaacaattcaccgccggaaccgtagactttggggcgagtgatgtggccatgaaagatgacgaaatcgccaaggttagtaaaggcgtattattattacccatgaccgccggaagtatcgtatttgcctacaatttacccggtgtagaaggactcaagctgtctagagatgtttatgttggcatcatgaaaggggagatcactaaatggaatgatcccaaaattgccgccgagaaccccgatctaacattacctgataagcccattaccgttgtacaccgttctgatggtagtggaaccaccggagtcttcaccaagcatttaagtgccattaacccggactgggaaaagagtatcggtgaaggaaaaagtgtagaatggccgaccagtaaaggcaaattccttgggggtaaagggaatgaaggtgtaaccgccgctatccaacaaaatgagggcgcgatcggttacgttgaatacggctatgctaagaacaataatttagctatggctgccattcaaaacaaagccggaaaattcattgaacccaacgatgaaagcgcagcagccacgttagatgcggttgtcttaccagaaaatctacgggaatttattaccgatcctgaaggggaaaattcctatcccattgtcacctacacttggattatggccaataagcaatacgatgatccccaaaaagcgatcgccgtagaagccatgattcaatatggcctcaccaaaggtcaagagtctgcctcagcgttgggttatgttcctttaccccaaagcgtcagagagaaggtggccgcggcagccgatcaaattacccctgactacaccattaaactgaactaa

SEQ ID NO: 2902 - protein, 384 aa, Cyanothece sp. PCC 8801
MLKVLSFQRSSRLISSLSILALTVTLGACGGGQQTTDQAATEQGGDTASAPAEKPPLKGNVALTGAGASFPAPLYQNWFVQLNSEIPELQVNYQSVGSGAGVEQFTAGTVDFGASDVAMKDDEIAKVSKGVLLLPMTAGSIVFAYNLPGVEGLKLSRDVYVGIMKGEITKWNDPKIAAENPDLTLPDKPITVVHRSDGSGTTGVFTKHLSAINPDWEKSIGEGKSVEWPTSKGKFLGGKGNEGVTAAIQQNEGAIGYVEYGYAKNNNLAMAAIQNKAGKFIEPNDESAAATLDAVVLPENLREFITDPEGENSYPIVTYTWIMANKQYDDPQKAIAVEAMIQYGLTKGQESASALGYVPLPQSVREKVAAAADQITPDYTIKLN

SEQ ID NO: 2903 - DNA, 1185 bp, Cyanothece sp. PCC 7424
  CDS (1)..(1185): transl_table=11
atgtctaatcaaaaaactttaatcaaagtgccgtctcgtgtcgtcagttcgatatctatactcgcgttaagcctaaatttagtggcctgtggtggagcaggtaataatacagcaactaatggagatgcaggaacgggaacaggaacagaacagggaacagaagcgactgggggagaatccttagcccagaaattagccttggctcaacccgtcagtgtaaccggtgcgggagcatctttccccgctcctttatatcaaaactggtttgtacaattaaaccaagaagtgccagacttacgggttgactatcaatccgtcggaagtggtgcaggggttgaacagtttatccaaggtacggtaaactttgcagctagtgacgtagcgatgaccgatgaagagatcgctaaagttcaaagaggcgtgttaatgttgcccatgaccgccggggcgatcgtattagcttataatatccccggagttgaaggggaacttaaattatcccgtgatgtttataccaatattttgctaggcaatattactaactggaacgatcccgctattgcggaagctaaccccgatttacaactgccggatctccccattactgtagtgcatcgggctgatggaagcggaacaaccggagtctttaccaaacatttaagcgccattagtccagagtggaaagagaccattggagaagggaaaaccgtagaatggccgaaaaaagggaaattcatcggcgctaaaggaaatgaaggggtaacggcttccattcaacagaatcaaggagcgatcggttatgttgaatatggttacgccaagaacaataacttaccaatggccgctttagaaaatcaagccggacaattcattaaaccgacagaagaatcggaaatggcgactttagactccgtaaccttacccgaagatttacgggcatttattaccgatccagagggagacaattcttatcccatcgtcacgtacacctggttattaacttacaagcaatatgacgatcctcaaattgctaaagggatagaaggaatgattgagtatggactgacaaccggtcaagaatcgagtgcagaactcggttatattcccctacctccaagcgtgagagaaaaagtagcggcggcggctgaccaaattagcccagattaccaaattactgtcgaataa

SEQ ID NO: 2904 - protein, 394 aa, Cyanothece sp. PCC 7424
MSNQKTLIKVPSRVVSSISILALSLNLVACGGAGNNTATNGDAGTGTGTEQGTEATGGESLAQKLALAQPVSVTGAGASFPAPLYQNWFVQLNQEVPDLRVDYQSVGSGAGVEQFIQGTVNFAASDVAMTDEEIAKVQRGVLMLPMTAGAIVLAYNIPGVEGELKLSRDVYTNILLGNITNWNDPAIAEANPDLQLPDLPITVVHRADGSGTTGVFTKHLSAISPEWKETIGEGKTVEWPKKGKFIGAKGNEGVTASIQQNQGAIGYVEYGYAKNNNLPMAALENQAGQFIKPTEESEMATLDSVTLPEDLRAFITDPEGDNSYPIVTYTWLLTYKQYDDPQIAKGIEGMIEYGLTTGQESSAELGYIPLPPSVREKVAAAADQISPDYQITVE

SEQ ID NO: 2905 - DNA, 1041 bp, Escherichia fergusonii ATCC 35469
  CDS (1)..(1041): transl_table=11
atgaaagttatgcgtaccaccgtcgcaacttttgtcgccgcgaccttatcgatgagcgctttctctgtgtttgcagaagcaagcctgacaggtgcaggtgcaaccttccctgcgccggtgtatgccaaatgggctgacacttaccagaaagaaaccggtaataaagttaactaccagggtatcggttcttccggcggcgtaaaacagattatcgccaataccgttgattttggtgcctctgacgcgccgctgtctgacgaaaaactggctcaggaaggtctgttccagttcccgaccgtaattggcggcgtggtgctggcggttaacattccggggctaaaatctggcgaactggtgctggatggtaaaacccttggcgacatctacctgggcaaaatcaaaaagtgggatgatgaagccatcgccaaactgaatccgggtctgaaactgccttcacagaacattgctgtagtgcgccgtgcagatggctccgggacatcctttgtcttcaccagctatctggcgaaagtgaacgaagagtggaaaaacaacgtcggtactggctctaccgtaaaatggccgattggtctgggtggtaaaggaaacgacggtatcgccgcgttcgttcagcgtctgccgggtgcaattggttatgttgaatatgcttacgctaagcagaacaacctggcgtacaccaaactgatctccgctgatggtaaacctgtttcgccgaccgaagaaaactttgccaatgcggcaaaaggcgcagactggagcaaaacattcgctcaggatctgaccaaccagaaaggcgaagatgcgtggcctattacctctaccacgttcattcttgtccacaaagatcagaagaaaccagagcagggcacagaagtgctgaaattcttcgactgggcgtataaaaccggggctaaacaggcgaacgacctggattacgccagcctgccggatagcgtagttgaacaggttcgcgctgcgtggaagaccaatattaaagacagtagcggcaagccgctgtactaa

SEQ ID NO: 2906 - protein, 346 aa, Escherichia fergusonii ATCC 35469
MKVMRTTVATFVAATLSMSAFSVFAEASLTGAGATFPAPVYAKWADTYQKETGNKVNYQGIGSSGGVKQIIANTVDFGASDAPLSDEKLAQEGLFQFPTVIGGVVLAVNIPGLKSGELVLDGKTLGDIYLGKIKKWDDEAIAKLNPGLKLPSQNIAVVRRADGSGTSFVFTSYLAKVNEEWKNNVGTGSTVKWPIGLGGKGNDGIAAFVQRLPGAIGYVEYAYAKQNNLAYTKLISADGKPVSPTEENFANAAKGADWSKTFAQDLTNQKGEDAWPITSTTFILVHKDQKKPEQGTEVLKFFDWAYKTGAKQANDLDYASLPDSVVEQVRAAWKTNIKDSSGKPLY

SEQ ID NO: 2907 - DNA, 1041 bp, Escherichia coli IAI39
  CDS (1)..(1041): transl_table=11
atgaaagttatgcgtaccaccgtcgcaactgttgtcgccgcgaccttatcgatgagtgctttctctgtgtttgcagaagcaagcctaacaggtgcaggtgcaaccttccctgcgccggtgtatgccaaatgggctgacacttaccagaaagaaaccggtaataaagttaactaccagggtatcggttcttccggtggcgtaaaacagattatcgctaataccgttgattttggtgcctctgacgcgccgctgtctgatgaaaaattggctcaggaaggcctgttccagttcccgaccgtgattggcggcgtggtgctgactgttaacattccagggctgaagtctggcgaactggtgctggatggtaaaaccctcggcgacatctacctgggcaaaatcaaaaagtgggatgatgaagccatcgccaaactgaatccgggtctgaaactgccttcacagaacattgctgtcgtgcgccgtgcagatggctccgggacatcctttgtcttcaccagctacctggcgaaagtgaacgaagagtggaaaaacaacgttggtactggctctaccgtaaaatggccgatcggtctgggcggtaaaggtaacgacggtatcgccgcgttcgttcagcgtctgccgggtgcaattggttacgttgaatatgcttacgcgaagcagaacaacctggcgtacaccaagctgatctccgctgatggtaaaccggttagtccgaccgaagaaaacttcgctaatgcagcaaaaggcgcagactggagcaaaacattcgctcaggatctgaccaaccaaaaaggcgaagatgcatggcctattacctctaccacgttcattctgatccataaagatcagaagaaaccagaacaaggcaccgaagtgctgaagttcttcgactgggcatacaaaaccggggctaaacaggcgaacgacctggattatgccagcctgccggatagcgtagttgaacaggttcgcgctgcgtggaagaccaatattaaagacagtagcggcaagccgctgtactaa

SEQ ID NO: 2908 - protein, 346 aa, Escherichia coli IAI39
MKVMRTTVATVVAATLSMSAFSVFAEASLTGAGATFPAPVYAKWADTYQKETGNKVNYQGIGSSGGVKQIIANTVDFGASDAPLSDEKLAQEGLFQFPTVIGGVVLTVNIPGLKSGELVLDGKTLGDIYLGKIKKWDDEAIAKLNPGLKLPSQNIAVVRRADGSGTSFVFTSYLAKVNEEWKNNVGTGSTVKWPIGLGGKGNDGIAAFVQRLPGAIGYVEYAYAKQNNLAYTKLISADGKPVSPTEENFANAAKGADWSKTFAQDLTNQKGEDAWPITSTTFILIHKDQKKPEQGTEVLKFFDWAYKTGAKQANDLDYASLPDSVVEQVRAAWKTNIKDSSGKPLY

SEQ ID NO: 2909 - DNA, 1041 bp, Escherichia coli UMN026
  CDS (1)..(1041): transl_table=11
atgaaagttatgcgtaccaccgtcgcaactgttgtcgccgcgaccttatcgatgagtgctttctctgtgtttgcagaagcaagcctgacaggcgcaggtgcaaccttccctgcgccggtgtatgccaaatgggctgacacttaccagaaagaaaccggtaataaagttaactaccagggtatcggttcttccggtggcgtaaaacagattatcgctaataccgttgattttggtgcctctgacgcgccgctgtctgacgaaaaactggctcaggaaggtttgttccagttcccgaccgtgattggcggcgtggtactggcggttaacattccagggttgaagtctggcgagctggtgctggatggtaaaacccttggtgacatctacctcggcaaaatcaagaagtgggatgatgaagccatcaccaaactgaatccaggcttaaaactgccgtcacagaacattgctgtagtacgccgcgcagatggctccgggacgtccttcgtcttcaccagctacctggcgaaagtgaacgaagagtggaaaaacaacgttggtacgggatctaccgtaaaatggccgattggtctgggcggtaaaggtaacgacggtatcgccgcgttcgttcagcgtctgccaggtgcaattggttacgttgaatatgcttacgctaagcagaacaacctggcgtataccaaattgatctccgctgatggtaaacctgttttgccgaccgaagaaaacttcgctaatgcagcaaaaggcgcagactggagcaaaaccttcgctcaggatctgaccaaccagaaaggcgaagatgcgtggcctattacctctaccacgttcattctgatccacaaagatcagaagaaaccagaacaaggcacagaagtgctgaagttcttcgactgggcatacaaaaccggggctaaacaggcgaacgacctggattacgccagcctgccggatagcgtagtggaacaggttcgcgctgcgtggaagaccaatattaaagacagtagcggcaagccgctgtactaa

SEQ ID NO: 2910 - protein, 346 aa, Escherichia coli UMN026
MKVMRTTVATVVAATLSMSAFSVFAEASLTGAGATFPAPVYAKWADTYQKETGNKVNYQGIGSSGGVKQIIANTVDFGASDAPLSDEKLAQEGLFQFPTVIGGVVLAVNIPGLKSGELVLDGKTLGDIYLGKIKKWDDEAITKLNPGLKLPSQNIAVVRRADGSGTSFVFTSYLAKVNEEWKNNVGTGSTVKWPIGLGGKGNDGIAAFVQRLPGAIGYVEYAYAKQNNLAYTKLISADGKPVLPTEENFANAAKGADWSKTFAQDLTNQKGEDAWPITSTTFILIHKDQKKPEQGTEVLKFFDWAYKTGAKQANDLDYASLPDSVVEQVRAAWKTNIKDSSGKPLY

SEQ ID NO: 2911 - DNA, 1041 bp, Pectobacterium atrosepticum SCRI1043
  CDS (1)..(1041): transl_table=11
atgaaactgatgcgtaccactcttgccagtgttgttgcggcaaccttttctttgacggcattttctgcttttgctgctgctaacctcaccggtgccggtgcgacattcccagcgcctgtttatgctaaatgggctgactcctatcaaaaagaaaccggcaataaagttaactatcaaggaatcggttcttctggcggtgtaaaacagattatcgctaaaacggtagactttggtgcttctgatgcgccgctggctgacgacaaattagcacaggatggtttattccagttcccaaccgttatcggtggcgtggtactggcagtgaacgttcctggtatcaaatctggtgaattgacgctggatggtaaaacactgggtgatatctacctgggtaaaatcaaaaaatggaacgacccggcgattaccaagctgaacccgaatgccaagctgccggatcaggatattgctgtggttcgtcgtgctgacggttctggtacttctttcgtgttcaccagctatctggcgaaagtgaacccagaatggaaagagaagattggtgctggttctactgtgaactggccgaccggtctgggcggtaaaggtaacgatggtatcgcggcgttcgtacagcgtctgcctggttctatcggttacgtagaatatgcgtatgccaagcagaacaacctggcttacaccaaactgatttctgccgatggcaaagcggttagcccgactggcgcaagtttcagcaacgcggccaaagagatcgactggagcaagtctttcgctcaggatctgactaaccagaaaggcgctgatgcatggccgatcacgtcaaccacgttcatcctggttcataccaaacaggaaaaacctgagcagggcgctgaagtgttgaaattcttcgactgggcgttcaagaaaggcggtgagcaagcagaagcactggattacgccacactgccaaaagaagtgactgagcaaatccgtgctgcctggaaaactcaggtcaaagacagcagcggtaaagcactgtactga

SEQ ID NO: 2912 - protein, 346 aa, Pectobacterium atrosepticum SCRI1043
MKLMRTTLASVVAATFSLTAFSAFAAANLTGAGATFPAPVYAKWADSYQKETGNKVNYQGIGSSGGVKQIIAKTVDFGASDAPLADDKLAQDGLFQFPTVIGGVVLAVNVPGIKSGELTLDGKTLGDIYLGKIKKWNDPAITKLNPNAKLPDQDIAVVRRADGSGTSFVFTSYLAKVNPEWKEKIGAGSTVNWPTGLGGKGNDGIAAFVQRLPGSIGYVEYAYAKQNNLAYTKLISADGKAVSPTGASFSNAAKEIDWSKSFAQDLTNQKGADAWPITSTTFILVHTKQEKPEQGAEVLKFFDWAFKKGGEQAEALDYATLPKEVTEQIRAAWKTQVKDSSGKALY

SEQ ID NO: 2913 - DNA, 1095 bp, Leifsonia xyli subsp. xyli str. CTCB07
  CDS (1)..(1095): transl_table=11
atgaaactgaagcgccttggcgttcccgtggccctcctggccgcggccgctctttccctcaccgcctgcgcagccaacgaaggcagcagcccggcggccacctcggcgaagccgtcgaatctctccggcaccctcaacggcatcggctcttccgcccagggagccgcccagaccgtctggatcgccggcttccagcaggacaacccgaaggcgaccgtcaactacgacccgcaaggctccggcgccggtcgcaagagtttcatcgcgggcgcaaccgacttcgccggctcggacgccgcgctcaacgacaccgagctctcctccacgttcgcgggttgcgccgcaggcagcaaggccatcgacctgccagtctacgtctccccgatcgcgatcgcgtacaacatcgacggtgtgaaggacctcaagctcgacgccgccaccatcgcgggcatcttctcgggcaagatcgccacttgggacgacgcgaagatcaaggggctgaacgcggacgcctcgctcccgtccgccccgatcactgtcgtacaccgttccgacgactcgggcaccacgcagaacttcaccgactacctcgcagcgaacgcgcccgacgtgtggaccgctcccgcgtcgcagacgttcccgttccagatcggtgacgcggcgaagggcacctcgggcgtcgcagaagccacgaagaacgccaagaactcgatcacctacatcgacgagtcgggctcggccggcctgtccatcgcacagctgaaggtcggcgacagcttcgaaaagatcagcgccgatggcgcagccgctgtggtcgccgcctccccgatcgccgctggccgcggcagcaacgacctcgccatcaagatcgaccgcaaggacaccgccaagggagcctggccgctggtcctcgtctcgtacgtcatcgcctgccaggagtacaaggactccgccaaggccgatctggtgaagggctacatcgactacttggtctccggccacgcccagaaggccgccgcaaagcaggccggctccgctccgctcgcgagcgatctctccgacaaggtctccaaggccgtcgccagcatcaagtaa

SEQ ID NO: 2914 - protein, 364 aa, Leifsonia xyli subsp. xyli str. CTCB07
MKLKRLGVPVALLAAAALSLTACAANEGSSPAATSAKPSNLSGTLNGIGSSAQGAAQTVWIAGFQQDNPKATVNYDPQGSGAGRKSFIAGATDFAGSDAALNDTELSSTFAGCAAGSKAIDLPVYVSPIAIAYNIDGVKDLKLDAATIAGIFSGKIATWDDAKIKGLNADASLPSAPITVVHRSDDSGTTQNFTDYLAANAPDVWTAPASQTFPFQIGDAAKGTSGVAEATKNAKNSITYIDESGSAGLSIAQLKVGDSFEKISADGAAAVVAASPIAAGRGSNDLAIKIDRKDTAKGAWPLVLVSYVIACQEYKDSAKADLVKGYIDYLVSGHAQKAAAKQAGSAPLASDLSDKVSKAVASIK

SEQ ID NO: 2915 - DNA, 1029 bp, Burkholderia pseudomallei K96243
  CDS (1)..(1029): transl_table=11
atgaaattgatgcaaaccgcgttcgccggtctcgccggcgcgcttttcgcggtcgccgcacacgccgacatcacgggcgcgggcagcaccttcgccatgccgatttacacgaaatgggcagccgactatcagcagtcgggcggcgcgaaggtcaactatcagggcatcggctcgtcgggcggcctcaagcagatcgtcgcgaagacggtcgatttcgccggctcggatgcgccgctcaaggatgacgagctcgcgaaggaaggcctgttccagttcccgacggtggtcggcggcgtcgtgcccgtcatcaacgtgccgggcgtgaaggcgggcgaactgacgctgtcgggcgcggtgctcggcgacatctatctcggcaagatcaagaagtggaacgatccggccatcgcggcgctgaacccgaaggtcaagctgccggatacggacatcgcggtcgtgcgccgcgcggacggctcgggcacgagcttcatctggacgaattacctgtcgaaggtcaacgacgagtggaagtcgaaggtcggcgaaggcacgacggtcaactggccgaccggcacgggcggcaagggcaacgacggcgtcgcggcgttcgtgcagcgtctgccgggcgcgatcggctatgtcgagtgggcgtacgcgaagaagaacaacatggtctacaccgcgctgaagaactcgacgggcacggtggtcgagccgaagacggagacgttcaaggcggctgccgccggcgcgaactggtcgaagtcgttctaccagatcctgacgaaccagccgggcaaggaagcgtggccggtcgtcggcgcgacgttcgtgctgctgcacgcgaagcaggacaagccggcacagggcgcggaaacgctgaagttcttcgactgggcgttcaagaacggcgcgaaggcggcggacgatctggattacatctcgctgccggcgtcggtcgagacggaaatccgcaagcagtggaaggtgaaggtgacggacgcggccggcaaggcggtggccgagtaa

SEQ ID NO: 2916 - protein, 342 aa, Burkholderia pseudomallei K96243
MKLMQTAFAGLAGALFAVAAHADITGAGSTFAMPIYTKWAADYQQSGGAKVNYQGIGSSGGLKQIVAKTVDFAGSDAPLKDDELAKEGLFQFPTVVGGVVPVINVPGVKAGELTLSGAVLGDIYLGKIKKWNDPAIAALNPKVKLPDTDIAVVRRADGSGTSFIWTNYLSKVNDEWKSKVGEGTTVNWPTGTGGKGNDGVAAFVQRLPGAIGYVEWAYAKKNNMVYTALKNSTGTVVEPKTETFKAAAAGANWSKSFYQILTNQPGKEAWPVVGATFVLLHAKQDKPAQGAETLKFFDWAFKNGAKAADDLDYISLPASVETEIRKQWKVKVTDAAGKAVAE

SEQ ID NO: 2917 - DNA, 1113 bp, Nocardia farcinica IFM 10152
  CDS (1)..(1113): transl_table=11
atgaatttcaagcgcagcagcgccctggtgggtgctctggccgtcgtcgccatgcctctcgccgcctgtggcagtgacgacaacaccagcggtgacaccagcaacgcggccaacagcagcgtcgcctgcggcggcaaggagtcgctgaaggccagcggcgcctcctcccagaagaacgcgatggagcgcttcatcgccgcctacgaagccaactgcgacggctacaccctcaactacacctccagcggctccggcgcgggcgtcaacgagttcctcggcggccagaccgacttcggtggctcggactccccgctcagccagtccaagggcgagcctgccaaggcccaggaacgctgcggcgccccggcctggaacctgccgaccgtgttcggccccatcgccatcacctacaacatcgacggcgtgaccgacctcgtgctggacggcccgaccgcggcgaagatcttcaacggcaccatcaagacctgggacgcccccgagatcaaggcgctgaacccgaacgcgcagctgcccgccgcgccgatcgcggtgatcttccgctccgacgagtcgggtaccaccgacaacttccagctctacctggacgcggcctcgggcggcgcctggggcaagggcggcggcaagaccttcaacggcggtgtcggtgagggcgccaagggcaacgagggcacctcggccgcgatcaagaacaccaagaactcgatcacctacaacgagtggtccttcgccaagtcgcagaacctctcggtcgcccagatcgtcacctcggccgggccggagccggtgaagctctcggtcgagaccgcgggcaaggccatcgacggcgtgaagatcaagggcgagggcaacgacctggtcctcgacaccagctcgttctaccagccgaccgtggcgggctcctacccgatcatgatggcgacctacgagatcgtgtgctcgaagtacgccgatgccgccaccggccaggccgtcaaggcgttcctgacctcggcggtgaccaacgggcagaacggcctggaggacaacgggtacatcccgatccccgagcagttcaagacccggctgaccacggcgatcaacgccatctcctga

SEQ ID NO: 2918 - protein, 370 aa, Nocardia farcinica IFM 10152
MNFKRSSALVGALAVVAMPLAACGSDDNTSGDTSNAANSSVACGGKESLKASGASSQKNAMERFIAAYEANCDGYTLNYTSSGSGAGVNEFLGGQTDFGGSDSPLSQSKGEPAKAQERCGAPAWNLPTVFGPIAITYNIDGVTDLVLDGPTAAKIFNGTIKTWDAPEIKALNPNAQLPAAPIAVIFRSDESGTTDNFQLYLDAASGGAWGKGGGKTFNGGVGEGAKGNEGTSAAIKNTKNSITYNEWSFAKSQNLSVAQIVTSAGPEPVKLSVETAGKAIDGVKIKGEGNDLVLDTSSFYQPTVAGSYPIMMATYEIVCSKYADAATGQAVKAFLTSAVTNGQNGLEDNGYIPIPEQFKTRLTTAINAIS

SEQ ID NO: 2919 - DNA, 1041 bp, Salmonella enterica subsp. enterica serovar Paratyphi A str. ATCC 9150
  CDS (1)..(1041): transl_table=11
atgaaagttatgcgtaccactgtcgcaactgttgtcgccgcgaccttatcgatgagcgcgttctctgcctttgcagcagcaagcctgacaggtgccggtgcaacgtttcctgcgccggtgtatgccaaatgggcggatacctaccagaaagaaaccggtaacaaagtcaattaccaggggataggctcttccggcggcgtgaaacaaatcaccgcgaataccgttgattttggcgcttccgatgcgccgctgtctgacgaaaaactgaatcaggaaggcctgttccagttcccgacggtgatcggcggcgtggtgctggcggtgaatattccaggcctcaaatccggcgaactggtgctggatggtaaaacactgggtgacatctacctcggtaaaatcaaaaagtgggatgatgaagccatcaccaaactgaacccaggcgtgaagctgccttctcagaacatcgctgtggtgcgtcgcgctgacggttccggtacttccttcgtgttcaccagttacctggcgaaagtcaacgacgagtggaaatcgaaagtgggcgcgggttctaccgtgaactggccaaccggtctgggcggtaaaggtaacgacggcatcgcggcatttgtacagcgtctgccaggcgctattggctacgttgaatacgcttatgccaagcagaacaacctggcctacaccaaactggtttctgccgacggcaaaccggtaagcccgacggaagagagcttctctaatgcggcgaaaggcgctgactggagcaaaaccttcgcgcaggatctgaccaaccagaaaggtgacgatgtgtggccaatcacctccaccacctttatcctggtccacaaagcgcagaagaaacctgagcagggtgctgaagtgttgaagttcttcgactgggcctacaaaaatggcgctaaacaggcgaatgatctggactacgccagcctgccggataacgttgttgagcaggttcgtaccgcctggaagaccagcataaaagacagcaacggtaaggcgctgtattaa

SEQ ID NO: 2920 - protein, 346 aa, Salmonella enterica subsp. enterica serovar Paratyphi A str. ATCC 9150
MKVMRTTVATVVAATLSMSAFSAFAAASLTGAGATFPAPVYAKWADTYQKETGNKVNYQGIGSSGGVKQITANTVDFGASDAPLSDEKLNQEGLFQFPTVIGGVVLAVNIPGLKSGELVLDGKTLGDIYLGKIKKWDDEAITKLNPGVKLPSQNIAVVRRADGSGTSFVFTSYLAKVNDEWKSKVGAGSTVNWPTGLGGKGNDGIAAFVQRLPGAIGYVEYAYAKQNNLAYTKLVSADGKPVSPTEESFSNAAKGADWSKTFAQDLTNQKGDDVWPITSTTFILVHKAQKKPEQGAEVLKFFDWAYKNGAKQANDLDYASLPDNVVEQVRTAWKTSIKDSNGKALY

SEQ ID NO: 2921 - DNA, 1041 bp, Zymomonas mobilis subsp. mobilis ZM4
  CDS (1)..(1041): transl_table=11
atggttaagaaaatagctgcccttgttggtttcgtcagcctttttggcagcacggcctatgcaacgactatttccggtgcaggcgcaacatttccagcacctgtttatggaaaatgggccaattcctatcgcaaccagacgggtgctgttatcaattatcagcctattggttccggtggcggtattaagcaaattaaagcctctaccgttgatttcggagcgtctgacaagcctttgaaaaccgaagagctttcaaaagatggtctttatcagttcccgaccgtgatgggaggcattgtgcctatcattaacttgccgggtttgcggtcaggtcgcttgcatttaacaggcagcattcttgccgatatttatcttggtaaaattacccgttggaatgacccgcggatcgcgtctatcaacccgtggttaaaattaccgccagtaccgattacggtggtgcatcgcgcggatggttccggcacgtccttccagtttacgtcttatctgtcgctgaaaagtcctgaatggacctcccgcgtcggtgccagcgatgccgtgcaatggccgattggtcttggtggtaaaggcaatgatggggtagccgcctttgttaaacagacaatcggttcaatcggctatgtcgaatatgcctatacccgtcaaagcacggtgccttatgctttgattgccaatcgtgacggtcgcttcccgcatccttccactgaaagtttcaaagccgcctcggcttctgcggattggacgcatgcagctgggaataatatttcccttctggatcagaagggcgctgaaagctggccaatcgtttcaacgacctatattcttttacatcgcacccccagcaaacctgaaaccacggctgaaatcctaaaattctttgattggggatatcagaatggcgatcaggatgctttatctcttgactatgcgccattaccgaaagaagtgaagacgttcatccgccagcaatggggatcgaacattcaagttaacgggaaagccgtctataacgctgcccgctag

SEQ ID NO: 2922 - protein, 346 aa, Zymomonas mobilis subsp. mobilis ZM4
MVKKIAALVGFVSLFGSTAYATTISGAGATFPAPVYGKWANSYRNQTGAVINYQPIGSGGGIKQIKASTVDFGASDKPLKTEELSKDGLYQFPTVMGGIVPIINLPGLRSGRLHLTGSILADIYLGKITRWNDPRIASINPWLKLPPVPITVVHRADGSGTSFQFTSYLSLKSPEWTSRVGASDAVQWPIGLGGKGNDGVAAFVKQTIGSIGYVEYAYTRQSTVPYALIANRDGRFPHPSTESFKAASASADWTHAAGNNISLLDQKGAESWPIVSTTYILLHRTPSKPETTAEILKFFDWGYQNGDQDALSLDYAPLPKEVKTFIRQQWGSNIQVNGKAVYNAAR

SEQ ID NO: 2923 - DNA, 1029 bp, Gluconobacter oxydans 621H
  CDS (1)..(1029): transl_table=11
atgatcaagagcagagctccgctattcggtcttctcgtcgccacggcccttggcacggctgccatgaccccgttcgtgtcgtcggcgcaggctgcggacatcacgggcgcagggtccagcttcgccgcaccgatctatggtgcgtggggcacggcggccaagagccaggccggtatcgccgtgaactaccagagcgtgggctccagcgccggtcaggatcaggtcattgcccgcacggttgactttggtgcctccgacaagccgatgagcggtgatcgtctggccaaggaaaagctgtaccagttcccaaccgtcatgagcggtatcgtggtcgtggcgaacgtgccgggtattgctccgggccagctccgtctcgatggcccgacgctggccggtctgtatgacggcgagatcacgacctgggatgacgaccgcatcaaggccctgaacccgggtctgaagctgccggatacggatgtcgcgccgatccaccgtgcggatggttcgggcacgagctacgtcttcacgtcctatctgtcgcaggtttccccgacctggaagcagaagcttggtgccggcacgtccatcgcctggccgggtggttcgggtgcacgtggcaatgacggcattgccgccatggtgcgtcagacggaaggtggcgtgggttacgtcgagtattcctatgccgcgcagaaccacctgaacatcgcccagatgaagaaccacagcggtgccttcgttgccccgacgctggccagcttcgcggaagccgccaaggctgctgactgggcccatgccgatcactatgcggtgaacctgctggacacggatggcgcatcgtcctggccgatcgtgacggcaacgttcgttctggtgccggttgatgccgcccagaaggagtccggcaaggctgtgcgcaacttctttacgtggggttttcagcatggtgacgcggacaatgcccgcctcgactatgtcggtctgccgcagaacgtgaagacggacattctggccaactggccgaagtaa

SEQ ID NO: 2924 - protein, 342 aa, Gluconobacter oxydans 621H
MIKSRAPLFGLLVATALGTAAMTPFVSSAQAADITGAGSSFAAPIYGAWGTAAKSQAGIAVNYQSVGSSAGQDQVIARTVDFGASDKPMSGDRLAKEKLYQFPTVMSGIVVVANVPGIAPGQLRLDGPTLAGLYDGEITTWDDDRIKALNPGLKLPDTDVAPIHRADGSGTSYVFTSYLSQVSPTWKQKLGAGTSIAWPGGSGARGNDGIAAMVRQTEGGVGYVEYSYAAQNHLNIAQMKNHSGAFVAPTLASFAEAAKAADWAHADHYAVNLLDTDGASSWPIVTATFVLVPVDAAQKESGKAVRNFFTWGFQHGDADNARLDYVGLPQNVKTDILANWPK

SEQ ID NO: 2925 - DNA, 1119 bp, Xanthomonas oryzae pv. oryzae KACC10331
  CDS (1)..(1119): transl_table=11
atggctttgtcatttctcagacaccgcatggtcatgtcgttacactgcaatggcaccactgcgggacgttcttcatcccttcactccaggagctgttccgtgatccactccttcaagacccgtctggccgttggcgtactcgccgcttcgctggctctgtgcgcccaggctgccgatgtcaccggcgctggcgcgtcgtttatttacccggtgatgtccaagtggtcggccgactacaacgctgccaccaagaagcaggtcaactatcaatcgatcggttcaggcggcggtattgcccagatcaaggcggccagcgtggacttcggctcgtccgatgccccgctcaagccggaagaactggccgcagccggcctggcgcagtttccctcggtgatcggcggcgtggtgccggtggtcaacgtgccgggcgtggccgccggtgcgctcaagctggacggcaagaccctgggcgacatcttcctgggcaaggtcagcacctggaacgatccggccatcgccgcgctcaatccaggcgtgaagctgccggaaggcaagatcaccgtggtgcatcgctccgacggctcgggcaccagcttcaacttcaccaactacctgtccaaggtcaatccggactggaagagcaaggtgggcgaaggcactgccgtgcagtggccgaccggtatcggcggcaagggcaacgagggcgtcgctgcctacgtgaagcagatcaagggcggcatcggctacgtcgagctgtcgtacgcgctgcagaacaagatggcctacaccgcgatgaagaatgctgccggcaagttcgtgcagccgtccgatgaaaccttcgccgccgctgccaacagcgccgattggggcagcagcaaggacttctatctggtgatgaccaatgcggcgggcgacaacgcctggccgatcacggcgaccaattttatcttggtgcagaagaagccgaagaacccgaccggcctgaaaaacacgctggacttcttccgctgggtctatagcaagggcgacgcccaggccaagcagctggactacgtaccgctgccggacgcgctggtgacccagatcgaggcctactgggccacgaatctgcccaaataa

SEQ ID NO: 2926 - protein, 372 aa, Xanthomonas oryzae pv. oryzae KACC10331
MALSFLRHRMVMSLHCNGTTAGRSSSLHSRSCSVIHSFKTRLAVGVLAASLALCAQAADVTGAGASFIYPVMSKWSADYNAATKKQVNYQSIGSGGGIAQIKAASVDFGSSDAPLKPEELAAAGLAQFPSVIGGVVPVVNVPGVAAGALKLDGKTLGDIFLGKVSTWNDPAIAALNPGVKLPEGKITVVHRSDGSGTSFNFTNYLSKVNPDWKSKVGEGTAVQWPTGIGGKGNEGVAAYVKQIKGGIGYVELSYALQNKMAYTAMKNAAGKFVQPSDETFAAAANSADWGSSKDFYLVMTNAAGDNAWPITATNFILVQKKPKNPTGLKNTLDFFRWVYSKGDAQAKQLDYVPLPDALVTQIEAYWATNLPK

SEQ ID NO: 2927 - DNA, 1137 bp, Xanthomonas oryzae pv. oryzae KACC10331; identical to SEQ ID NO: 2841
  CDS (1)..(1137): transl_table=11

SEQ ID NO: 2928 - protein, 378 aa, Xanthomonas oryzae pv. oryzae KACC10331
MGSAGYPGQSSLGASMKLQSASLTALSLTIAIALAACSPGKDAQSGDAAKGAPTAGATASDTKGAEISGAGASFIYPLVSKWSADYNAATGNKVNYQSIGSGGGIAQIKAGTVDFGSTDKPLDSAELQQAGLGQFPSAIGGVVPVVNLDGIAPGKLRLTGALLGDIFLGKVTMWNDAAIVAANPGVTLPATKINLVHRSDGSGTTFNFSNYLSKVSPEWKSKVGEGTSVQWPGGVGGKGNEGVASYVQQIKGSIGYVELAYALQNKMPYTSLQNAAGQWIEPNAESFAAAAASADWANAKDFNLVITNAPGEKAWPITATNFMLMHKQPKDAARSKATLDFFKWALENGQAQASELHYVPLPPELVKQIEAYWGSEFK

SEQ ID NO: 2929 - DNA, 1041 bp, Salmonella enterica subsp. enterica serovar Choleraesuis str. SC-B67
  CDS (1)..(1041): transl_table=11
atgaaagttatgcgtaccactgtcgcaactgttgtcgccgcgaccttatcgatgagcgcgttctctgcctttgcagcagcaagcctgacaggtgccggtgcaacgtttcctgcgccggtgtatgccaaatgggcggatacctaccagaaagaaaccggtaacaaagtcaattaccaggggataggctcttccggcggcgtgaaacaaatcaccgcgaataccgttgattttggcgcttccgatgcgccgctgtctgacgaaaaactgaatcaggaaggcctgttccagtttccgacggtgatcggcggcgtggtgctggcggtgaatattccaggcctcaaatccggtgaactggtgctggatggtaaaacgctgggtgacatctacctcggtaaaatcaagaagtgggatgatgaagccatcaccaaactgaacccaggcgtgaagctgccttctcagaacatcgctgtggtgcgtcgcgctgacggttccggtacctccttcgtgttcaccagttacctggcgaaagtcaacgacgagtggaaatcgaaagtgggcgcgggttctaccgtgaactggccaaccggtctgggcggtaaaggtaacgacggcatcgcggcatttgtacagcgtctgccaggcgctatcggctacgttgaatacgcttacgctaagcagaacaacctggcctacaccaaactggtttctgccgacggcaagccggtaagcccgacggaagatagcttctctaatgcggcgaaaggcgcagactggagcaaaaccttcgcgcaggatctgaccaaccagaaaggtgacgatgtgtggccaatcacctccaccacctttatcttggtccacaaagcgcagaagaaacctgagcagggtgctgaagtgctgaagttcttcgactgggcctacaaaaatggcgctaaacaggcgaatgatctggactacgccagcctgccggataacgttgttgagcaggttcgtaccgcctggaagaccagtataaaagacagcaacggtaaggcgctgtattaa

SEQ ID NO: 2930 - protein, 346 aa, Salmonella enterica subsp. enterica serovar Choleraesuis str. SC-B67
MKVMRTTVATVVAATLSMSAFSAFAAASLTGAGATFPAPVYAKWADTYQKETGNKVNYQGIGSSGGVKQITANTVDFGASDAPLSDEKLNQEGLFQFPTVIGGVVLAVNIPGLKSGELVLDGKTLGDIYLGKIKKWDDEAITKLNPGVKLPSQNIAVVRRADGSGTSFVFTSYLAKVNDEWKSKVGAGSTVNWPTGLGGKGNDGIAAFVQRLPGAIGYVEYAYAKQNNLAYTKLVSADGKPVSPTEDSFSNAAKGADWSKTFAQDLTNQKGDDVWPITSTTFILVHKAQKKPEQGAEVLKFFDWAYKNGAKQANDLDYASLPDNVVEQVRTAWKTSIKDSNGKALY

SEQ ID NO: 2931 - DNA, 1020 bp, Haemophilus influenzae 86-028NP
  CDS (1)..(1020): transl_table=11
atgtttatgcataaaatgaaaaaaaatcttattatcgttttaaccttaggtacgttaccttttgctcaagctaatagcatcactggtgctggagcgtctttcccttatccaatttatgcgaagtgggcatctttatatgagaaagaaactgggaataaagttaattatcaatccatcggttcgggcggcggacaacagcaaattattgcaaaaacggttgattttggtgcctctgacgatccaatgaaatccgaattattacaacaacaccaactagtccaattccctgcggttatcggtggtatagtgcctgttgttaatttgcctgaaattaaacctggtaaattaaagttatcaggtaagctgttagcagaaatcttccttggtaagattaaaaaatggaacgatcctgacttagttgcattaaatccaacgcttcctttaccaaataaaaacattattgtgattcatcgttcagacggctctggaacaacatttggcttcactaattatctatctaaagtttcgaacgattggaaaaatcaagttggtgaaggtaaatcagtgaagtggttaacaggtcaaggtggaaaggggaatgagggagttgcttcttatgttcgccaaatgaaatacagcattggttatgtagagtatgcctatgccaaacaaaatcagcttgcttggatttcattacaaaatcaagcagggcaatttgtacagccttctaatgaaagtttcatggcagctgcaagtcacgcaaaatggcacgaaaaggcgggaatgggtgttatattaaccaatgaaacgggggaaaaatcttggccaattacggcggcgagttttattttattaaataaatattctgacaatcctgaaacaactaaaaatgtattagccttttttgattgggcattctcaagagggcaagatgcggcaactgaattagattatgtgccaattccagctgatgtggtgtctaccattaaaagtcaatggaaaacagagctaaaacaataa

SEQ ID NO: 2932 - protein, 339 aa, Haemophilus influenzae 86-028NP
MFMHKMKKNLIIVLTLGTLPFAQANSITGAGASFPYPIYAKWASLYEKETGNKVNYQSIGSGGGQQQIIAKTVDFGASDDPMKSELLQQHQLVQFPAVIGGIVPVVNLPEIKPGKLKLSGKLLAEIFLGKIKKWNDPDLVALNPTLPLPNKNIIVIHRSDGSGTTFGFTNYLSKVSNDWKNQVGEGKSVKWLTGQGGKGNEGVASYVRQMKYSIGYVEYAYAKQNQLAWISLQNQAGQFVQPSNESFMAAASHAKWHEKAGMGVILTNETGEKSWPITAASFILLNKYSDNPETTKNVLAFFDWAFSRGQDAATELDYVPIPADVVSTIKSQWKTELKQ

SEQ ID NO: 2933 - DNA, 1020 bp, Pseudomonas syringae pv. phaseolicola 1448A
  CDS (1)..(1020): transl_table=11
atgatactgctgactaaaaaacgcttgtcgcttctgatcgcttcgctgtgcctcagcggtgtggcccatgcgactgatgtcacaggtgctggttcgagtttcgtctacccggttatttcagcgtggtcccaggactacagcaaaaccaaggataaccgtatcaactatcagtccatcggttcgggcggcggtattgcccagatcaaggcagcgactgttgacttcggtgcatccgacgcccctatgtccgctgaggacctgcaggctggcggtctaagtcagttcccgagcgtcatcggcggtatcgtgccgatcgtcaacgtcgaaggcgttgaaagtggcgagctgaagctggacggcccaaccatcgccaagatcttcatgggcgacatcaagaagtggaacgacccggcaatcactgccctgaactcgggcgtgaagctgcctgatactgcgatcaccgttgttcaccgctcggacggttcgggtaccacttacaacttcaccaactacctgagcaaagtcagcccggagtggaacgagaagctgaagttcggttcgaccgtgcagtggccagccggtgtgggcggcaagggtaacgaaggtgtttctgcctacgtgaaacagatcaagggttcgatcggttacgttgagtactcctacgcgacgaccaacaagttgtcttacacccagttgaaaaacgctgccggcaaattcatcaagccagacgccaaggcttttgctgccgctgctgacactgccgactgggcgagcgccaaagacttcaacctgatcatgaccaacgcgccgggtgaggctgcatggccgatcaccgcgaccacctggatcatcatgtacaagaaagccaagaacgaagagaaaagcgcagccgctttcgacttcttcaaatggtcgctggaaaacggccagaaacaggccgagaaactggaatatgtagcattgccgaaatcgctggttgaacgcgtggaaagctactggaaaacggaattcaccaagtaa

SEQ ID NO: 2934 - protein, 339 aa, Pseudomonas syringae pv. phaseolicola 1448A
MILLTKKRLSLLIASLCLSGVAHATDVTGAGSSFVYPVISAWSQDYSKTKDNRINYQSIGSGGGIAQIKAATVDFGASDAPMSAEDLQAGGLSQFPSVIGGIVPIVNVEGVESGELKLDGPTIAKIFMGDIKKWNDPAITALNSGVKLPDTAITVVHRSDGSGTTYNFTNYLSKVSPEWNEKLKFGSTVQWPAGVGGKGNEGVSAYVKQIKGSIGYVEYSYATTNKLSYTQLKNAAGKFIKPDAKAFAAAADTADWASAKDFNLIMTNAPGEAAWPITATTWIIMYKKAKNEEKSAAAFDFFKWSLENGQKQAEKLEYVALPKSLVERVESYWKTEFTK

SEQ ID NO: 2935 - DNA, 1056 bp, Dechloromonas aromatica RCB
  CDS (1)..(1056): transl_table=11
atgcaatctccaatgtccagagcagcactgctagccgccgcgttgtttttatacgccagcaccctcatcgccgcagaaccgatgaccggtgccgggtcgtctgccgcctacccgatctacaagctgtgggcggatcaactgaaacgtgaaggcggtttcgtgctgaactacgatcccgtcggctcatcggccggggtcgagagagctcgcgcccgtcaggccgatttcggcgccacggatgtcgcactcaaaagtgagcaactggccaaggacaaccttatcctctttccaacggtcatcaccggcgcagttcccgtcatcaacctgcccaagatggaaaaaccgcttgttctggacggccccacgctggccagaatcttcctgggggaaattgagcactgggatgcacctgagatccgcgccttgaatcccggcctgagccttcccgcaaaaccgatagtcgcggtcgtccgcagcgatggctctggcaccacttacaactttgccgattatctggccaaggtcagtccggcatggaaacagaagatgggcgttgccacgaacctcaaatggccagcctcgttcacgtcggtcaagggcagcaagggcgttgccgaagcagtgaaatcgacgcccgggagcatcagttacgtggattacaactacgtactggattacaagctcacgggggcagccatgaagaatgcggacggcgccatcgtcgaagccgggccttacaccttccgtgaagcgcttgcccagagcgtctggaagcaaaccggcgacttcactcagacgctgaccaatcagaccgggaaaagcagctggcccatcacgatgggcacttttatcgtcatgccccgagtctccaacaatccggaacggaccatccaggtcacccgtttcttcaccgaggcattcatgcgcggtgacgaccttgcgaaacaggccaacttcgtccgcctgccgtcgatcatccaggggaaagccttccgggtgatttcggaaatcgtcgatgcaaagggcgttcccatcggcataaacagcctccgataa

SEQ ID NO: 2936 - protein, 351 aa, Dechloromonas aromatica RCB
MQSPMSRAALLAAALFLYASTLIAAEPMTGAGSSAAYPIYKLWADQLKREGGFVLNYDPVGSSAGVERARARQADFGATDVALKSEQLAKDNLILFPTVITGAVPVINLPKMEKPLVLDGPTLARIFLGEIEHWDAPEIRALNPGLSLPAKPIVAVVRSDGSGTTYNFADYLAKVSPAWKQKMGVATNLKWPASFTSVKGSKGVAEAVKSTPGSISYVDYNYVLDYKLTGAAMKNADGAIVEAGPYTFREALAQSVWKQTGDFTQTLTNQTGKSSWPITMGTFIVMPRVSNNPERTIQVTRFFTEAFMRGDDLAKQANFVRLPSIIQGKAFRVISEIVDAKGVPIGINSLR

SEQ ID NO: 2937 - DNA, 1032 bp, Ralstonia eutropha JMP134
  CDS (1)..(1032): transl_table=11
atgaagctggtcaagactgccgtggcaggcatcgtttcgatggtcgtagcgggtactgcgttcgcggcggaaattaccggtgcaggcgcttccttcccggcgcccgtctattccaagtgggccgacgcataccaaaaagcaacgggcaacaaggtcaactatcaatccatcggctcgtcgggcggcatcaagcagattggcgccaagacggtcgatttcggcgcttcggatgccccgctgaaggacgaagatctgaacaagcagggtctggtccagttcccgactgtgatcggcggcgtggtgccggtgatcaacctgcaaggtgtgaagccgggcgacctgaccatcacgggcgaagtgctggccaatatctacctgggcaagatcaagaagtgggacgatccggccatcaaggcactgaacccgcacgccaagctgccgaaccaggacatcctgccggtgcgccgcgctgacggttcgggcaccaccttcatcttcacgaactacctgtcgaaggtcagccccgaatggcagaagtcggtgggcgaaggcaccaccgtcaactggccgggcggtggcacgggcggcaagggcaacgaaggcgttgccgctttcgtgcagcgtctgaatggcgcgatcggctacgtcgagtacgcctacgccaagcagaacaagatgacgcacgtgaacatgaagaacgcggccggcgccgtggttcagcccggtgacgacgccttcaaggctgccgccgccggtgcggactggagcaagagctactaccagatcctgacgaaccagccgggcaaggcggcatggccgatcgccggcgcgaccttcatcctggtccacaagaaccaggaaaaggctgcgcaaggcgcggaagtgctgaagttcttcgactgggcctacaagagcggcaccaacatggccgccgacctggactacgtgccgctgccggatgcggtcgtgaaccagattcgcacgacctggaagacgagcgttaaggacgcgtcgggcaaggcgctgtactaa

SEQ ID NO: 2938 - protein, 343 aa, Ralstonia eutropha JMP134
MKLVKTAVAGIVSMVVAGTAFAAEITGAGASFPAPVYSKWADAYQKATGNKVNYQSIGSSGGIKQIGAKTVDFGASDAPLKDEDLNKQGLVQFPTVIGGVVPVINLQGVKPGDLTITGEVLANIYLGKIKKWDDPAIKALNPHAKLPNQDILPVRRADGSGTTFIFTNYLSKVSPEWQKSVGEGTTVNWPGGGTGGKGNEGVAAFVQRLNGAIGYVEYAYAKQNKMTHVNMKNAAGAVVQPGDDAFKAAAAGADWSKSYYQILTNQPGKAAWPIAGATFILVHKNQEKAAQGAEVLKFFDWAYKSGTNMAADLDYVPLPDAVVNQIRTTWKTSVKDASGKALY

SEQ ID NO: 2939 - DNA, 1041 bp, Shigella sonnei Ss046
  CDS (1)..(1041): transl_table=11
atgaaagttatgcgtaccaccgtcgcaactgttgtcgccgcgaccttatcgatgagcgctttctctgtgtttgcagaagcaagcctgacaggtgcaggtgcaaccttccctgcgccggtgtatgccaaatgggctgacacttaccagaaagaaatcggtaataaagttaactaccagggtatcggttcttccggtggcgtaaaacagattatcgctaataccgttgattttggtgcctctgactcgccgctgtctgacgaaaaactggctcaggaaggtctgttccagttcccgaccgtgattggcggcgtggtgctggcggttaacattccagggctgaagtctggcgaactggtgctggatggtaaaaccctcggcgacatctacctgggcaaaatcaagaagtgggatgatgaaaccatcgccaaactgaatccgggtctgaaactgccttcacaaaacattgctgtagtacgccgcgcagatggctccgggactaccttcgtcttcaccagctacctggcgaaagtgaacgaagagtggaaaaacaacgttggtactggctctaccgtaaaatggccgatcggtctgggcggtaaaggtaacgacggtatcgccgcgttcgttcagcgtctgccgggtgcaattggttatgttgaatatgcttacgcgaagcagaacaacctggcgtacaccaaactgatctccgctgatggtaaaccggttagtccgaccgaagaaaacttcgctaatgcagcaaaaggtgcagactggagcaaaaccttcgctcaggatctgaccaaccagaaaggcgaagatgcatggcctattacctctaccacgttcattctgatccacaaagatcagaagaaaccagaacaaggcacagaagtgctgaaattcttcgactgggcgtacaaaaccggggctaaacaggcgaacgacctggattacgccagcctgccggatagtgtagttgaacaggttcgcgctgcgtggaagaccaatattaaagacagtagcggtaagccgctgtactaa

SEQ ID NO: 2940 - protein, 346 aa, Shigella sonnei Ss046
MKVMRTTVATVVAATLSMSAFSVFAEASLTGAGATFPAPVYAKWADTYQKEIGNKVNYQGIGSSGGVKQIIANTVDFGASDSPLSDEKLAQEGLFQFPTVIGGVVLAVNIPGLKSGELVLDGKTLGDIYLGKIKKWDDETIAKLNPGLKLPSQNIAVVRRADGSGTTFVFTSYLAKVNEEWKNNVGTGSTVKWPIGLGGKGNDGIAAFVQRLPGAIGYVEYAYAKQNNLAYTKLISADGKPVSPTEENFANAAKGADWSKTFAQDLTNQKGEDAWPITSTTFILIHKDQKKPEQGTEVLKFFDWAYKTGAKQANDLDYASLPDSVVEQVRAAWKTNIKDSSGKPLY

SEQ ID NO: 2941 - DNA, 1020 bp, Thiobacillus denitrificans ATCC 25259
  CDS (1)..(1020): transl_table=11
atgcttacactcaacggactggcgcgcgccgccgcagccgtcttcgcgagcgtcgccgtggcggcgagcgcgatggcagcggacgtcaccggcgccggcgcgaccttcccctacgccgtctataccaagtgggccgaggcctatcgtgcggcgaccggcaacaaggtcaattaccagggcatcggttcttcgggcggtgtgaagcagatcaaggcgaagaccgtcgatttcggcggcaccgacgcgccgctcaaggacgccgatctcgatgcggtgcgcctcgtgcaggtgcctaccgtcatgggtggcgtgacgatcgttgccaacgtcccgggaatcgactcgggcaaactcaaactcgacggggtgacggcggcgaacatcttccgcggggcgatctacaagtggaacgatccggcaatccggaaactgaacccgggcgtcgcattgccgaatctggcgattaccgtcgcgcaccgttccgacggctcgggtacgacctacgccttcacccattacctcgccaagcagtcgccgcgtttcaaaagcgaggtcggggcgggcaataccgtgaactggccggccaacgcagtcgggggcaagggcaaccccggcgtggcggccaacgttcagaagatcaagggcgcgatcgggtatgtcgacatcgccgacgcgatgaagaacgggatgcgtttcgtcgccctgaagaaccgcgccgggaactacatcgtcccgagccagcagtcggtcgccgacgccgccgccggggccaacttcaaggtcaagggtatggctcccgacctgctcgaccagacgcacaagaacgcctggccgatcaccagcgcgacctatatccttgtctatcaaaaaggcgccagcgctgctaaacagaagggcgtggtcgatttcttccggtggtcgctcagaaacggccagaagatggcgaccgacctcggtttcgtgcccttgccgccgaacgtcgtgcaaatggtcgaagcggagatgggcaagatcaagtaa

SEQ ID NO: 2942 - protein, 339 aa, Thiobacillus denitrificans ATCC 25259
MLTLNGLARAAAAVFASVAVAASAMAADVTGAGATFPYAVYTKWAEAYRAATGNKVNYQGIGSSGGVKQIKAKTVDFGGTDAPLKDADLDAVRLVQVPTVMGGVTIVANVPGIDSGKLKLDGVTAANIFRGAIYKWNDPAIRKLNPGVALPNLAITVAHRSDGSGTTYAFTHYLAKQSPRFKSEVGAGNTVNWPANAVGGKGNPGVAANVQKIKGAIGYVDIADAMKNGMRFVALKNRAGNYIVPSQQSVADAAAGANFKVKGMAPDLLDQTHKNAWPITSATYILVYQKGASAAKQKGVVDFFRWSLRNGQKMATDLGFVPLPPNVVQMVEAEMGKIK

SEQ ID NO: 2943 - DNA, 1026 bp, Thiobacillus denitrificans ATCC 25259
  CDS (1)..(1026): transl_table=11
atgttcggttcgaaacacctgtatttcaagcttgccggggcggcggccgccgtcgcgatgagcgttgcggccttgccggcgctggccgtcgacatcaccggcgcgggggcgaccttcccctacgccgtctacactaaatgggcggaagcctacaaggccgcttccggcaaccaggtcaactaccagggcatcggctcttcggggggcgtcaagcagatcaaggccaagaccgtcgacttcgcaggcaccgacgcgccggtcaaggaaagcgatctcgatgccgcgcatctggttcagtttcctaccgtcatgggcggcgtgaccatcgtcgtcaacctgcctggcgttgcctcggggcagctcaagctcgacggcgccaccgccgccgacatcttccgcggcacgatcaccaagtggaacgacccgcgcatcgccaagctcaaccccggcgtcaagctgcccggcacggcgatcacgatttcgcatcgctcggacggctccggcactaccttcgtcttcaccaactatctcgccaagcagtcggccgatttcaagcgtgacgtcggcgccggcaacaccgtcaactggcccgccaatgccgtcggcggcaagggcaacccgggcgtcgcggcgaacgtgatgaagatcccaggtgcgatcggctacgtcgacatcgccgacgcgatgaagaacaagatgactttcgttgcgctgaagaacaaggccggcaattacatcgtcccgaaccaggacgcggtcgccgacgccgctgcgggcgcgaacttccacgtccgcggcatggcgcccgacctgctcgaccagtcgcacaagaacgcctggccgatcacctcggcgacctacgtgctcgcctacgagcaggccgacgcgacgaagcagaaggcggtcgtcgatttcttcaagtggtcgctcaacaatgggcagaaaatggccgaggaactcggtttcgtcgccttgccgccgaacgtcgtcaagatggtcgaagccgaaatgaagaacatcaagtga

SEQ ID NO: 2944 - protein, 341 aa, Thiobacillus denitrificans ATCC 25259
MFGSKHLYFKLAGAAAAVAMSVAALPALAVDITGAGATFPYAVYTKWAEAYKAASGNQVNYQGIGSSGGVKQIKAKTVDFAGTDAPVKESDLDAAHLVQFPTVMGGVTIVVNLPGVASGQLKLDGATAADIFRGTITKWNDPRIAKLNPGVKLPGTAITISHRSDGSGTTFVFTNYLAKQSADFKRDVGAGNTVNWPANAVGGKGNPGVAANVMKIPGAIGYVDIADAMKNKMTFVALKNKAGNYIVPNQDAVADAAAGANFHVRGMAPDLLDQSHKNAWPITSATYVLAYEQADATKQKAVVDFFKWSLNNGQKMAEELGFVALPPNVVKMVEAEMKNIK

SEQ ID NO: 2945 - DNA, 1026 bp, Nitrobacter winogradskyi Nb-255
  CDS (1)..(1026): transl_table=11
atgaatttcttcaaggccatcgccgccgccggcctcgtcgccgcctcggcgtccgtcttttcggttccggtgaaggcggccgatgtcaccggtgcgggagcgacctttccgtttcccgtctactcgaaatgggctgatgcctataagaaggagaccggtcacggcgtaaattatcagtcgatcgggtcgggcgccggcatcaagcagatccttgccaagacggtgactttcggcgcgaccgacgcgccgctgaaggccgacaagctcgagaaagatggtctcgcgcagtggccgatggtgatgggcgcgatcgttcccgtggtgaatatcgagggcgtgaagcccggcgaactggttctttcgggagaactgctcggcgatatctacctcggcaaggtcacgaagtgggacgatccggcgatcgtgaagctcaatccgagcgtcaagctgccttcggcttcgatcgcggtggtgcatcgttcggacggtgcgggaacctcgttcaatttcaccaactatctgtccaaggtgaatggagaatggaagtccaaggtcggtgagggcaccgcggtcgagtggccggccggcgtcggcgccaaaggcaatgaaggcgtttccggcaatgtcgggcagaccaggaacgcgatcggctatgtcgagtacgcctatgccaaacagaacaagctgacctacaccgcgctcatcaacaaggccggcaaggtggtgcagccgggcgtggcctcttttcaggcagcggcagccaatgccgactgggcgagcgcgccaggctatcacgtgatcctgaccgatcagcccggcgaggcctcctggccaatcaccgcggcgacgttcatcctgatgtacagggagccttccgataaagcggcgtccgccgaagcgatcaagttcttcaagtgggctttcgagaagggcggcgtgatggcggaggaactcgactacattccgatgccggaatctgtcgtgaagcagattgagaaaacctggacctccgagatcaaaagctga

SEQ ID NO: 2946 - protein, 341 aa, Nitrobacter winogradskyi Nb-255
MNFFKAIAAAGLVAASASVFSVPVKAADVTGAGATFPFPVYSKWADAYKKETGHGVNYQSIGSGAGIKQILAKTVTFGATDAPLKADKLEKDGLAQWPMVMGAIVPVVNIEGVKPGELVLSGELLGDIYLGKVTKWDDPAIVKLNPSVKLPSASIAVVHRSDGAGTSFNFTNYLSKVNGEWKSKVGEGTAVEWPAGVGAKGNEGVSGNVGQTRNAIGYVEYAYAKQNKLTYTALINKAGKVVQPGVASFQAAAANADWASAPGYHVILTDQPGEASWPITAATFILMYREPSDKAASAEAIKFFKWAFEKGGVMAEELDYIPMPESVVKQIEKTWTSEIKS

SEQ ID NO: 2947 - DNA, 1182 bp, Anabaena variabilis ATCC 29413
  CDS (1)..(1182): transl_table=11
atgctctcatatatcaagagaattaaaaataaccgcattccagtatcaattaccgtattaacactggcgatgagtttagctgcttgtggtgggcagcaaggctcagacaatactgcaactcaagatggttcatctggtacagctaaagatgctacagcttccagcccagtaaaattggatcttggtggcaatgtcacattaactggagctggtgcatcgtttcctgcaccgttatatcaaagttggttcacggaattaaacaaaaagtaccccaatttacaagttaactatcagtcagtaggtagcggcgctggagttgaacaatttatccaaggtacggtagatttcggtgctagtgacgtagccatgaaggatgaagaaatccaaaaagtaccgcaagacaaaggtactttattactaccaatgactgctggtagtattgtcttggcttataatctccctgatgttgctgacctgaaactaccaagggcagtttacacagacattttgctaggtaatattaaaacttggaacgacaaaaaaattgctgatgccaaccctggtgtaaatcttcctaatcagccaattacagttgtatatcgttccgatggtagtggaactacaggggtatttactaaacacctcagtgccatcaatccagattggaaaagcaaagtaggcgatggtaaaactgtcaattggcctgtgggtgttggtgcgaagggaaatgaaggtgtaacagctcaagtccaacaaacccaaggctctattggttacatagaatatggctacgccaaacaaaacggactcaagtttgcggcgttagaaaataaagatggtaaatttgtgatacccacagaagaatcagcatctaaaactttagaagctgtcaccttaccaacagacctccgcgcttttattgcagacccagaaggtgcagaatcttatcctatagtcacctacacttggattatgacttataaaaaatatgctgatccagtgaaagcgaaagcagtggaagccgcaattgagtatggtttaacagaagggcaaaaggtcgccgcagaactggggtatgttcccctacctcaaaatgtggtggcaaaggtagcggctgtggctgaccaaattagtccagattataaaattgcagtaagtggcaacacaagcgctagcaagtaa

SEQ ID NO: 2948 - protein, 393 aa, Anabaena variabilis ATCC 29413
MLSYIKRIKNNRIPVSITVLTLAMSLAACGGQQGSDNTATQDGSSGTAKDATASSPVKLDLGGNVTLTGAGASFPAPLYQSWFTELNKKYPNLQVNYQSVGSGAGVEQFIQGTVDFGASDVAMKDEEIQKVPQDKGTLLLPMTAGSIVLAYNLPDVADLKLPRAVYTDILLGNIKTWNDKKIADANPGVNLPNQPITVVYRSDGSGTTGVFTKHLSAINPDWKSKVGDGKTVNWPVGVGAKGNEGVTAQVQQTQGSIGYIEYGYAKQNGLKFAALENKDGKFVIPTEESASKTLEAVTLPTDLRAFIADPEGAESYPIVTYTWIMTYKKYADPVKAKAVEAAIEYGLTEGQKVAAELGYVPLPQNVVAKVAAVADQISPDYKIAVSGNTSASK

SEQ ID NO: 2949 - DNA, 1092 bp, Xanthomonas campestris pv. vesicatoria str. 85-10
  CDS (1)..(1092): transl_table=11
atgaaattgcagtcggccagcctgaccgccctgtccctcaccatcgccctcgccctggccgcgtgctcgcccggcaaggacgcgcagtccgcagacgccgcaaagggcgcgccgaccgcaggcgccaccgccagcgacagcaagggcgctgaaatttccggcgccggtgcgtccttcatctatccgctggtgtccaagtggtcggccgactacaacgccgccaccggcaacaaggtcaactaccagtcgatcggctccggcggcggcattgcgcagatcaaggccggcaccgtggatttcggctcgaccgacaaaccgctggacagcacggaactgcaacaggctggcctgggccagttcccgtccgccatcggcggcgtggtgccggtggtgaatctggaaggcatcgcgccgggcaagctgcgcctgaccggcgccctgctgggcgatatcttcctgggcaaggtcaccatgtggaacgatgcggccattgtggcggccaacccgggcgtgaccctgccggccaccaagatcaacctggtgcatcgctcggatggttcgggcaccaccttcaacttctccaactacctgtccaaggtcagcccggagtggaagagcaaggtcggcgaaggcacctcggtgcagtggccgggcggcgtgggtggcaagggcaacgaaggcgttgcctcgtatgtgcagcagatcaagggctcgatcggttacgtcgagctggcctacgccctgcagaacaagatgccgtacacctcgctgcagaacgcggccggccagtgggtcgagccgaacgcggaaagctttgccgccgccgctgccagcgccgactgggccaacgcccgtgacttcaacctggtgatcaccaatgcgccgggcgagaaggcgtggccgatcaccgcgaccaacttcatgttgatgcacaagcaatccaaggacgccgcgcgcagcaaggcgacgctggacttcttcaagtgggcgctggaaaacggccaggcccaggccagcgaattgcactacgtgccgctgccgccggagctggtgaagcagatcgaagcctattggggcagcgagttcaagtaa

SEQ ID NO: 2950 - protein, 363 aa, Xanthomonas campestris pv. vesicatoria str. 85-10
MKLQSASLTALSLTIALALAACSPGKDAQSADAAKGAPTAGATASDSKGAEISGAGASFIYPLVSKWSADYNAATGNKVNYQSIGSGGGIAQIKAGTVDFGSTDKPLDSTELQQAGLGQFPSAIGGVVPVVNLEGIAPGKLRLTGALLGDIFLGKVTMWNDAAIVAANPGVTLPATKINLVHRSDGSGTTFNFSNYLSKVSPEWKSKVGEGTSVQWPGGVGGKGNEGVASYVQQIKGSIGYVELAYALQNKMPYTSLQNAAGQWVEPNAESFAAAAASADWANARDFNLVITNAPGEKAWPITATNFMLMHKQSKDAARSKATLDFFKWALENGQAQASELHYVPLPPELVKQIEAYWGSEFK

SEQ ID NO: 2951 - DNA, 1020 bp, Xanthomonas campestris pv. vesicatoria str. 85-10
  CDS (1)..(1020): transl_table=11
atgatccactccttcaagacccgtctggccgtcggcgtactcgccgcctcgctggcactgtgtgcccaggctgccgatgtcaccggtgccggtgcgtcgttcatctacccggtgatgtccaagtggtcggccgactacaacgccgccaccaagaagcaggtcaactaccaatcgatcggttcgggcggcggtattgcccaaatcaaggcggccagcgtggacttcggctcgtccgatgccccgctcaagccggaagaattggccgctgccggcctggcgcagtttccctcggtgatcggcggcgtggtgccggtggtcaacgttccgggcgtcgccgccggtacgctcaagctggacggcaagaccctgggcgacatcttcctgggcaaggtcagcacctggaacgacccggccatcgctgcgctcaacccgggcatgaaactgccggaaggcaagatcaccgtggtgcaccgctccgacggttcgggcaccagcttcaacttcaccaactacctgtccaaggtcaacccggactggaagagcaaggttggcgaagggactgccgtgcagtggccgaccggcatcggcggcaagggcaacgagggcgtggccgcctacgtgaagcagatcaagggcggcatcggctatgtcgagttgtcgtacgcgctgcagaacaagatggcctacaccgcaatgaagaacgcggccggcaagttcgtgcaaccgtcggacgaaaccttcgccgccgcggccaacagtgccgactggggcacggccaaggacttctatctggtgatgaccaacgccgctggcgataacgcctggccgatcacggcgaccaatttcattctggtgcagaaaaagccgaagaacccggctggcctgaagaacaccctggacttcttccgctgggtctacaccaagggcgatgcgcaggccaagcagttggactacgtgccgctgccggacacgctggtcacccagatcgaggcgtattgggccaagaatctgccgcactaa

SEQ ID NO: 2952 - protein, 339 aa, Xanthomonas campestris pv. vesicatoria str. 85-10
MIHSFKTRLAVGVLAASLALCAQAADVTGAGASFIYPVMSKWSADYNAATKKQVNYQSIGSGGGIAQIKAASVDFGSSDAPLKPEELAAAGLAQFPSVIGGVVPVVNVPGVAAGTLKLDGKTLGDIFLGKVSTWNDPAIAALNPGMKLPEGKITVVHRSDGSGTSFNFTNYLSKVNPDWKSKVGEGTAVQWPTGIGGKGNEGVAAYVKQIKGGIGYVELSYALQNKMAYTAMKNAAGKFVQPSDETFAAAANSADWGTAKDFYLVMTNAAGDNAWPITATNFILVQKKPKNPAGLKNTLDFFRWVYTKGDAQAKQLDYVPLPDTLVTQIEAYWAKNLPH

SEQ ID NO: 2953 - DNA, 1005 bp, Sulfurimonas denitrificans DSM 1251
  CDS (1)..(1005): transl_table=11
atgttaaagaaattagctttagttactttggttgcagcagcatcaattagttcttcatttgcgtcggataagataaacggtgcaggtgcctcgtttcctgctcctctatattatgattgggcatataactataaaaaagatacaacaaatcttgtaaattatcagtcaataggttcaggcggaggaatcaagcaaatcgcaaaaagagttgttgagtttggtgcatctgatgaagctctaagcacgttagcacttgcaaaggataacctatttcagtttccagcagtgattggttcaatcgtagttgcatttaacgtagatggagttgctgatgaaactcttaagcttagcaatgaagttgtagcagatatttttgcaggaaaaattacaatgtggaatgataaagctatcgcagtggataatcaagggcttaatcttccaaatcaaaaaatcatagttgtacaccgttcggatggaagcggaacaacttttaactttacgtattatctgacacaaagttctaaaaattggaaagagagtttcggaacaggtaagacgattgactgggctactggaataggcgcaaaaggcaatgaaggtgtagcaagtttgcttaagcagactccttactcaatcggatacatagaaaatgcttataaagagaaaaataacctaagtgcggctattttaaaaactgctaatggaaaatgggtaaaagcaacagaagagaacttcaaagctgctgcaaaatatgctacttggacaaaagcggagcacttttactctgttttagcactgcagcaaggtgatacatcttacccaatcgttgcggctacattcatacttcttcctagagaaggcggcgatatgaataaaaaggtaatagctttttatgattacgcatttaaaaacggtgacgaatcagctaaaaagttaggttatattcctcttcctgaggagactaaaaatatgattaaagagtattggacaactaatataaaataa

SEQ ID NO: 2954 - protein, 334 aa, Sulfurimonas denitrificans DSM 1251
MLKKLALVTLVAAASISSSFASDKINGAGASFPAPLYYDWAYNYKKDTTNLVNYQSIGSGGGIKQIAKRVVEFGASDEALSTLALAKDNLFQFPAVIGSIVVAFNVDGVADETLKLSNEVVADIFAGKITMWNDKAIAVDNQGLNLPNQKIIVVHRSDGSGTTFNFTYYLTQSSKNWKESFGTGKTIDWATGIGAKGNEGVASLLKQTPYSIGYIENAYKEKNNLSAAILKTANGKWVKATEENFKAAAKYATWTKAEHFYSVLALQQGDTSYPIVAATFILLPREGGDMNKKVIAFYDYAFKNGDESAKKLGYIPLPEETKNMIKEYWTTNIK

SEQ ID NO: 2955 - DNA, 996 bp, Prochlorococcus marinus str. MIT 9312
  CDS (1)..(996): transl_table=11
atgacatccatgaacatagctaagaaagctttggttttcacttctgcagtagccattgctgctggtacaagtgttcctggcacaagtgtttctgctaaaacaagattaagtggtgctggagcatcatttcctgccaaaatttacactcgttggttcaaagatttagctacttcaggggggccaagagtaaactatcaagctgttggttcaggctctggaagaaaagcttttattgatcagacagtaaactttggtgcttctgatgatcctatgaaggataaagatatagcaaaggtaacaagaggattagtacagattcctatggttggaggaactattgcatttggttataactatgattgtgatctgaaacttactcaagagcaagcagtaagagttgctatgggtatggttaaaaactggaaagaattaggctgtaaatcaggtaagttaacttgggcacatcgttctgacggatcaggtacaactaaagcctttacaaactctatggaagcgttttcaaaaacttggacactaggaacaggtaaatcagttaagtggccggcaggtgttggtgcaaaaggtaattctggtgtagctggagttatacaaaacactcctggcgcaatcggttatgttaaccagtcttatataaaaggtaatattaaagctgctgctcttcagaatctttctggagaatatgtaaagcctacagttgaggcaggagcaaaagctcttaatggcattaatttagatgaaaatcttgcgggtaaaaatcctaatccaactgcaaaaggagcatatcctatagcttcattaacatggatacttgcttatgaagagggtaatggtagaaacactaaagctatcaaacaagcctttaatacattgttaagtgatgagtatcaagataaagctccatcactaggatttgttcctttgaaaggtgatattcttgagaaatcaagagctgctgtaaaaagaatcggtaaataa

SEQ ID NO: 2956 - protein, 331 aa, Prochlorococcus marinus str. MIT 9312
MTSMNIAKKALVFTSAVAIAAGTSVPGTSVSAKTRLSGAGASFPAKIYTRWFKDLATSGGPRVNYQAVGSGSGRKAFIDQTVNFGASDDPMKDKDIAKVTRGLVQIPMVGGTIAFGYNYDCDLKLTQEQAVRVAMGMVKNWKELGCKSGKLTWAHRSDGSGTTKAFTNSMEAFSKTWTLGTGKSVKWPAGVGAKGNSGVAGVIQNTPGAIGYVNQSYIKGNIKAAALQNLSGEYVKPTVEAGAKALNGINLDENLAGKNPNPTAKGAYPIASLTWILAYEEGNGRNTKAIKQAFNTLLSDEYQDKAPSLGFVPLKGDILEKSRAAVKRIGK

SEQ ID NO: 2957 - DNA, 1041 bp, Shigella dysenteriae Sd197
  CDS (1)..(1041): transl_table=11
atgaaagttatgcgtaccaccgtcgcaactgttgtcgccgcgaccttatcgatgagtgctttctctgtgtttgcagaagcaagcctgacaggtgcaggtgcaaccttccctgcgccggtgtatgccaaatgggctgacacttaccagaaagaaaccggtaataaagttaactaccagggtatcggttcttccggtggcgtaaaacagattatcgctaataccgttgattttggtgcctctgacgcgccgctgtctgatgaaaaattggctcaggaaggcctgttccagttcccgaccgtgataggcggcgtggtgctagcggttaacattccagggttgaagtctggcgaactggtgcttgatggtaaaaccctcggcgacatctacctcggcaaaatcaagaagtgggatgatgaagccatcgccaaactgaatccgggtctgaaactgccttcacagaacattgctgtagtacgccgcgcagatggctccggtacctccttcgtcttcaccagctatctggcgaaagtgaacgaagagtggaaaaacaacgttggtactggctctaccgtaaaatggccgatcggtctgggcggtaaaggtaacgacggtatcgccgcgttcgttcagcgtctgctgggtgcaattggttacgttgaatatgcttacgcgaagcagaacaacctggcgtataccaaactgatctccgctgatggtaaaccggttagtccgaccgaagaaaacttcgctaatgtagcaaaaggcgcagactggagcaaaaccttcgctcaggatctgaccaaccagaaaggcgaagatgcgtggcctattacctctaccacgttcattctgatccacaaagatcagaagaaaccagaacaaggcacagaagtgctgaaattcttcgactgggcgtacaaaaccggggctaaacaggcgaacgacctggattacgccagcctgccggatagcgtagttgaacaggttcgcgctgcgtggaagaccaatattaaagacagtagcggcaagccgctgtactaa

SEQ ID NO: 2958 - protein, 346 aa, Shigella dysenteriae Sd197
MKVMRTTVATVVAATLSMSAFSVFAEASLTGAGATFPAPVYAKWADTYQKETGNKVNYQGIGSSGGVKQIIANTVDFGASDAPLSDEKLAQEGLFQFPTVIGGVVLAVNIPGLKSGELVLDGKTLGDIYLGKIKKWDDEAIAKLNPGLKLPSQNIAVVRRADGSGTSFVFTSYLAKVNEEWKNNVGTGSTVKWPIGLGGKGNDGIAAFVQRLLGAIGYVEYAYAKQNNLAYTKLISADGKPVSPTEENFANVAKGADWSKTFAQDLTNQKGEDAWPITSTTFILIHKDQKKPEQGTEVLKFFDWAYKTGAKQANDLDYASLPDSVVEQVRAAWKTNIKDSSGKPLY

SEQ ID NO: 2959 - DNA, 1029 bp, Burkholderia thailandensis E264
  CDS (1)..(1029): transl_table=11
atgaaattgatgcaaaccgcgttcgccggtctcgccggcgcgcttttcgcggtcgccgcacacgccgacatcaccggcgcgggcagcaccttcgccatgccgatttacacgaaatgggcagccgactatcagcagtcgggcggcgcgaaggtcaactatcagggcatcggctcgtcgggcggcctgaagcagatcatcgcgaagacggtcgatttcgccggctcggatgcgcctctgaaggatgacgaactcgcgaaggaaggcctgttccagttcccgacggtggtgggcggcgtcgtgcccgtcgtcaacgtcccgggcgtgaaggcgggcgaactgacgctgtcgggcgaggtcctcggcgacatctatctcggcaagatcaagaagtggaacgatccggcgatcgccgcgctgaacccgaaggtcaagctgccggatacggacatcgcggtcgtgcgccgcgcggacggctcgggcacgagcttcatctggacgaactacctgtcgaaggtcaacaacgagtggaagtcgaaggtcggcgaaggcacgaccgtcaactggccgacgggcacgggcggcaagggcaacgacggcgtcgcggccttcgtgcagcgcctgccgggcgcgatcggctacgtcgagtgggcgtacgcgaagaagaacaacatgatctacaccgcgctgaagaactcgacgggcgccgtggtcgagccgaagaccgagacgttcaaggccgccgccgccggcgcgaactggtcgaagtcgttctaccagatcctgacgaaccagccgggcaaggaagcgtggccggtcgtcggcgcgacgttcgtgctgctgcacgcgaagcaggacaagccggcgcaaggcacggcaacgctgaagttcttcgactgggcgttcaagaacggcgcgaaggcggcggacgatctggattacatctcgctgccggcatcggtcgagacggaaatccgcaaccagtggaaggtgaaggtgacggacgcggccggcaaggcggtcgcggagtaa

SEQ ID NO: 2960 - protein, 342 aa, Burkholderia thailandensis E264
MKLMQTAFAGLAGALFAVAAHADITGAGSTFAMPIYTKWAADYQQSGGAKVNYQGIGSSGGLKQIIAKTVDFAGSDAPLKDDELAKEGLFQFPTVVGGVVPVVNVPGVKAGELTLSGEVLGDIYLGKIKKWNDPAIAALNPKVKLPDTDIAVVRRADGSGTSFIWTNYLSKVNNEWKSKVGEGTTVNWPTGTGGKGNDGVAAFVQRLPGAIGYVEWAYAKKNNMIYTALKNSTGAVVEPKTETFKAAAAGANWSKSFYQILTNQPGKEAWPVVGATFVLLHAKQDKPAQGTATLKFFDWAFKNGAKAADDLDYISLPASVETEIRNQWKVKVTDAAGKAVAE

SEQ ID NO: 2961 - DNA, 1020 bp, Xanthomonas oryzae pv. oryzae MAFF 311018
  CDS (1)..(1020): transl_table=11
atgatccactccttcaagacccgtctggccgttggcgtactcgccgcttcgctggctctgtgcgcccaggctgccgatgtcaccggcgctggcgcgtcgtttatttacccggtgatgtccaagtggtcggccgactacaacgctgccaccaagaagcaggtcaactatcaatcgatcggttcaggcggcggtattgcccagatcaaggcggccagcgtggacttcggctcgtccgatgccccgctcaagccggaagaactggccgcagccggcctggcgcagtttccctcggtgatcggcggcgtggtgccggtggtcaacgtgccgggcgtggccgccggtgcgctcaagctggacggcaagaccctgggcgacatcttcctgggcaaggtcagcacctggaacgatccggccatcgccgcgctcaatccaggcgtgaagctgccggaaggcaagatcaccgtggtgcatcgctccgacggctcgggcaccagcttcaacttcaccaactacctgtccaaggtcaatccggactggaagagcaaggtgggcgaaggcactgccgtgcagtggccgaccggtatcggcggcaagggcaacgagggcgtcgctgcctacgtgaagcagatcaagggcggcatcggctacgtcgaactgtcgtacgcgctgcagaacaagatggcctacaccgcgatgaagaatgctgccggcaagttcgtgcagccgtccgatgaaaccttcgccgccgctgccaacagcgccgattggggcagcagcaaggacttctatctggtgatgaccaacgcggcgggcgacaacgcctggccgatcacggcgaccaatttcatcctggtgcagaagaagccgaagaacccggccggcctgaaaaacacgctggacttcttccgctgggtctacagcaagggcgacgcccaggccaagcagctggactacgtaccgctgccggacgcgctggtgacccagatcgaggcctactgggccacgaatctgcccaaataa

SEQ ID NO: 2962 - protein, 339 aa, Xanthomonas oryzae pv. oryzae MAFF 311018
MIHSFKTRLAVGVLAASLALCAQAADVTGAGASFIYPVMSKWSADYNAATKKQVNYQSIGSGGGIAQIKAASVDFGSSDAPLKPEELAAAGLAQFPSVIGGVVPVVNVPGVAAGALKLDGKTLGDIFLGKVSTWNDPAIAALNPGVKLPEGKITVVHRSDGSGTSFNFTNYLSKVNPDWKSKVGEGTAVQWPTGIGGKGNEGVAAYVKQIKGGIGYVELSYALQNKMAYTAMKNAAGKFVQPSDETFAAAANSADWGSSKDFYLVMTNAAGDNAWPITATNFILVQKKPKNPAGLKNTLDFFRWVYSKGDAQAKQLDYVPLPDALVTQIEAYWATNLPK

SEQ ID NO: 2963 - DNA, 1092 bp, Xanthomonas oryzae pv. oryzae MAFF 311018
  CDS (1)..(1092): transl_table=11
atgaaactgcagtcggccagcctgaccgccctgtccctcaccatcgccctcgccctggccgcgtgttcgcccggcaaggacgcacagtccggcgacgccgcaaagggcgcgccgaccgcaggcgctaccgccagcgacaccaagggtgctgaaatctccggtgccggcgcttccttcatctacccgctggtgtccaagtggtcggccgactacaacgccgccaccggcaacaaggtcaattaccagtcgatcggctccggcggcggcattgcgcagatcaaggccggcaccgtggatttcggctcgaccgacaagccgctggacagcgccgaactgcagcaggccggcctgggccagttcccgtccgccatcggcggcgtggtgccggtggtcaatctggacggcatcgcaccgggcaagctgcgcctgaccggcgccttgctgggcgacatcttcctgggcaaggtcacgatgtggaacgacgcggccattgtcgcggccaacccgggcgtgaccctgccggccaccaagatcaatctggtgcatcgttcggacggttcgggcaccaccttcaacttctccaactacctgtccaaggtcagcccggagtggaagagcaaggtcggcgaaggtacctcggtgcagtggccggggggcgtgggtggcaagggcaacgaaggcgttgcctcgtatgtgcagcagatcaagggctcgatcggttacgtcgagctggcctacgccctgcagaacaagatgccgtacacctcgctgcagaacgcagccggccagtggatcgagccgaacgcggaaagctttgccgccgccgctgccagcgccgactgggccaacgccaaggacttcaatctggtgattaccaatgctccgggcgaaaaggcgtggccgatcaccgccaccaacttcatgctgatgcacaagcagcccaaggacgcggcgcgcagcaaggcgacgctggacttcttcaagtgggcgttggaaaacggccaggcccaggccagcgaactgcattacgtgccgctgccgccggagctggtgaagcagatcgaagcctattggggcagcgagttcaagtaa

SEQ ID NO: 2964 - protein, 363 aa, Xanthomonas oryzae pv. oryzae MAFF 311018
MKLQSASLTALSLTIALALAACSPGKDAQSGDAAKGAPTAGATASDTKGAEISGAGASFIYPLVSKWSADYNAATGNKVNYQSIGSGGGIAQIKAGTVDFGSTDKPLDSAELQQAGLGQFPSAIGGVVPVVNLDGIAPGKLRLTGALLGDIFLGKVTMWNDAAIVAANPGVTLPATKINLVHRSDGSGTTFNFSNYLSKVSPEWKSKVGEGTSVQWPGGVGGKGNEGVASYVQQIKGSIGYVELAYALQNKMPYTSLQNAAGQWIEPNAESFAAAAASADWANAKDFNLVITNAPGEKAWPITATNFMLMHKQPKDAARSKATLDFFKWALENGQAQASELHYVPLPPELVKQIEAYWGSEFK

SEQ ID NO: 2965 - DNA, 990 bp, Sodalis glossinidius str. 'morsitans'
  CDS (1)..(990): transl_table=11
atggcggcggttcccgcttttgccgccgccagcctgaccggtgcaggtgcgacctttccggcgccggtttacgctaaatgggcggattcttatcaaaaatccaccggcgtaaaagtcaactatcagggcatcggttcctccggcggagtaaaacaaatcgtcgccaataccgttgattttggcgcctctgacgcaccgcttagcgatgaacagcttaataaagatggcctgttccaattccccgctgttatcggcggcgtcgtactggccattaacgtgccgggcgtaaaaagcggtgagctgacgctggacggtaaaacgctgggtgatatctatctcggtcaaatcaaaaaatggaacgatccggctatcatcaaacttaaccccgggctgaatctgccagatcaggcgattgcggtcgtacgccgcgccgatggttcaggcacctcgttcgtcttcaccagctatctctccaaggtcaatcccgattggaaacagaaaatcggtgctggctcaacggttaactggccggtcggtttgggtggcaaaggcaatgacggcgtggccgattttgtacagcgtttaccgggcgccatcggctatgtggaatatgcctatgccaaacaaaatcatttcgcctataccaaacttatcaccgccgacggcaagccggtatcgcctaccgagcaaaacttcagcgcggcggcgaaaggcgccgattgggaaagctctttcgcccgggacctgaccaaccagccgggcaacgacgcatggccgattacctccaccactttcattttgctgcataaacaacaaaattgtcctgagcaaggaaaagaagtcctgaaattctttgactgggcctatagccacggtgtgcaacaggcgagcgaactggactatgcggcactgcccgatatggtcactactcgtatccgcgcggcctggaaaaccgaacttaaaggcagcgacggtaagagcatttggtaa

SEQ ID NO: 2966 - protein, 329 aa, Sodalis glossinidius str. 'morsitans'
MAAVPAFAAASLTGAGATFPAPVYAKWADSYQKSTGVKVNYQGIGSSGGVKQIVANTVDFGASDAPLSDEQLNKDGLFQFPAVIGGVVLAINVPGVKSGELTLDGKTLGDIYLGQIKKWNDPAIIKLNPGLNLPDQAIAVVRRADGSGTSFVFTSYLSKVNPDWKQKIGAGSTVNWPVGLGGKGNDGVADFVQRLPGAIGYVEYAYAKQNHFAYTKLITADGKPVSPTEQNFSAAAKGADWESSFARDLTNQPGNDAWPITSTTFILLHKQQNCPEQGKEVLKFFDWAYSHGVQQASELDYAALPDMVTTRIRAAWKTELKGSDGKSIW

SEQ ID NO: 2967 - DNA, 1077 bp, Synechococcus sp. JA-2-3B'a(2-13)
  CDS (1)..(1077): transl_table=11
atggtgacgttgcaccccttggagcgtcgttctttcctgaagtttctatctgccactgttgccggctttgcggccagtcagacgaattggcagcgggtgtttgctcggcagaccatcaccatcaatggcgctggggcgaccttcccggcccccatctatcaaacttgggcccaagagtttggcaagaaaaaccctaacatccaggtcaactatcagtctgtaggaagcggtgcgggtcgtcggcagtttgtagcccgcacggtcgatttcggtgccagtgacagcgtgccccgtcctgaagagatcaaccaaattgagaatgaggctaaccctcccaaagggatggtttctgtacccatggtgggcggagcgttagttgcagcgtacaacattcctggggtgggccccgaaatccgcctttcccgcctggcactggcgaatatcttcctgggcaagatcaagaactggaacgatcccctgctggctggccttaacccacaggtgactttcccgaatttgccgattaccgtcgtgcatcgctctgatggaagtggtaccaccgatatcttcaccactcacctcaacgctattagcccagagtggaagcaaaaggtgggtcgcggctcttcggtaaactggccaaccggcgtaggggcgcgtgggaacgaaggggtttccgagcagatcaagcaaattcctggctcgattggctacgtggaattcggctttgccaagctcaacaacctgaacattgcccgtctggaaaaccgggcaggcaagtttgtaactcccaacgtcgagacggagaaagcggcgctggccagaattcagctcgacgagcgtttgctgggggtcgatccggatcctagtggggaagactcttaccctattgcaggctacacctggatccttgcctacaaggtttaccccaaagccgagacttccaaggccgttagagagtttctccgctacggcctcactgaggggcaggctttcgctgagcagttgggatatgtccctctgccggaagaaacgcggcaaaaagctctggctgcgctggaaggcattaccccgtaa

SEQ ID NO: 2968 - protein, 358 aa, Synechococcus sp. JA-2-3B'a(2-13)
MVTLHPLERRSFLKFLSATVAGFAASQTNWQRVFARQTITINGAGATFPAPIYQTWAQEFGKKNPNIQVNYQSVGSGAGRRQFVARTVDFGASDSVPRPEEINQIENEANPPKGMVSVPMVGGALVAAYNIPGVGPEIRLSRLALANIFLGKIKNWNDPLLAGLNPQVTFPNLPITVVHRSDGSGTTDIFTTHLNAISPEWKQKVGRGSSVNWPTGVGARGNEGVSEQIKQIPGSIGYVEFGFAKLNNLNIARLENRAGKFVTPNVETEKAALARIQLDERLLGVDPDPSGEDSYPIAGYTWILAYKVYPKAETSKAVREFLRYGLTEGQAFAEQLGYVPLPEETRQKALAALEGITP

SEQ ID NO: 2969 - DNA, 1110 bp, Frankia sp. CcI3
  CDS (1)..(1110): transl_table=11
atgaaccgaggcaagcgtcaggccgccatcggggctgcaatggtggcactgctcactgtggcggcgtgtggcaccgacgacaacagtgactccggcggcaccgcggcgaagccgtcgaacggggcgagcgcgatcgcctgcgagaagggctccattaccggatcgggttcctccgcgcagaagaacgcgatggacgaatgggtcaaggcgtaccagaacgcctgcgacggagcaaagatcaactatcagtcgacggggtcctcgaccggtcggcagcagttcgtcgccaagcaggtttccttcgccggttccgactcggcgctgaaggaccagcagaagaccgacgcggacaagcgctgtacccccggtacggctgtcgacctgccgatggtggtcggcccggtggcgcttatataccacctctcgggtgtcgacaagctccagctgtctgccccgacgatagcgaagatcttctccggcgccatcaccaagtggaacgacccggcgatcaccgcggagaacagcggggttactctgcctgacgcgccgattgcctcggtgcaccggtccgacggttccggcaccaccgacaacttcaccaagttcctgaagggcgcggccggcgccgcttggaccttcgactccggctcggactggaaggccccgggcggccagggtgccaagggcagcgacggggtgactgcgaccgtgaagtccaccgagaactcgatcggttatacggagctctcctacgcggagaacgccgggctgtccacggtcgcggtcaagaacggtgccggagagtacgtcaaggcgagcacggatggtgcctccctcggcctgagcaccgcgaaggttgccagcggtgacgatctgaagctcaccttcgactacaccgcggcgaccaagggggcctacccgatctacttggtcacctacgagatcgcctgcaccacgggtctcccggccgaccaggccaagctggtcaagtccttcctgacttacaccgcgtcggacgcgggccagtcctcgatcgccgaccttggttacgcgccgctgccggactcggtagcgactcgggtccgcgcggtggttgacaagctgtcctga

SEQ ID NO: 2970 - protein, 369 aa, Frankia sp. CcI3
MNRGKRQAAIGAAMVALLTVAACGTDDNSDSGGTAAKPSNGASAIACEKGSITGSGSSAQKNAMDEWVKAYQNACDGAKINYQSTGSSTGRQQFVAKQVSFAGSDSALKDQQKTDADKRCTPGTAVDLPMVVGPVALIYHLSGVDKLQLSAPTIAKIFSGAITKWNDPAITAENSGVTLPDAPIASVHRSDGSGTTDNFTKFLKGAAGAAWTFDSGSDWKAPGGQGAKGSDGVTATVKSTENSIGYTELSYAENAGLSTVAVKNGAGEYVKASTDGASLGLSTAKVASGDDLKLTFDYTAATKGAYPIYLVTYEIACTTGLPADQAKLVKSFLTYTASDAGQSSIADLGYAPLPDSVATRVRAVVDKLS

SEQ ID NO: 2971 - DNA, 1011 bp, Rhodopseudomonas palustris HaA2
  CDS (1)..(1011): transl_table=11
atgaatttcattaagtccatcgtcgcagccggactggttgcggcgtcgacctcggcctttgcggccgacatcaccggcgcgggcgccaccttcccgttcccggtctattcgaagtgggccgacgcctacaagaaagagaccggcaacggcctgaactaccagtcgatcggctccggcgccggcatcaagcagatcatcgccaagaccgtgaccttcggcgccaccgacgcgccgctgaagcccgagcagctcgacaaggaaggcctcgctcagtggccgatggtgatgggcgccatcgttccggtggtcaacctcgagggcgtcaagcccggtgagatggtgttcgacggcccgacgctggccgacatctatctcggcaagatcaagacctggaacgatccggcgatcgccaagctcaatccgaagctgaagctgccgaccgacgcgatcaccgtggttcgccgctccgacggttcgggcaccaccttcaacttcaccgactatctctccaaggtcagcgccgactggaagaccaaggtcggcatgggcacggccgtggaatggccggtcggcgtcggcgccaagggcaatgaaggcgtcgccggcaacgtcggtcagaccaagaactcgatcggctacgtcgaatacgcctacgccaagcagaacaagctgacctatgcgggtctggtgaacagcgccggcaaggcggttcagccgaccatcgctgcgttccaggctgccgccgcgaacgccgactgggccaaggccaagggttactacctgatcctgaccaaccagccgggcgagacctcgtggccgatcaccgccgcgacgttcatcctgatgcacaaggagccgaccgacaaggcggcctccgccgaagccctcaagttcttcaagtgggcgttcgagaagggcgacaagatggccgaagagctcgactacatcccgatgccggcttcggtggtcaagcagatcgaaaagacctggtctgccgacatcaagagctga

SEQ ID NO: 2972 - protein, 336 aa, Rhodopseudomonas palustris HaA2
MNFIKSIVAAGLVAASTSAFAADITGAGATFPFPVYSKWADAYKKETGNGLNYQSIGSGAGIKQIIAKTVTFGATDAPLKPEQLDKEGLAQWPMVMGAIVPVVNLEGVKPGEMVFDGPTLADIYLGKIKTWNDPAIAKLNPKLKLPTDAITVVRRSDGSGTTFNFTDYLSKVSADWKTKVGMGTAVEWPVGVGAKGNEGVAGNVGQTKNSIGYVEYAYAKQNKLTYAGLVNSAGKAVQPTIAAFQAAAANADWAKAKGYYLILTNQPGETSWPITAATFILMHKEPTDKAASAEALKFFKWAFEKGDKMAEELDYIPMPASVVKQIEKTWSADIKS

SEQ ID NO: 2973 - DNA, 1044 bp, Rhodoferax ferrireducens T118
  CDS (1)..(1044): transl_table=11
atgaaaaccagtttcaaaattgctttgctaagcgtggccagcctcgccagcctgtcgtacgccacggtggccggcgcgcaggaaatcactggcgctggcgcctcgttcccggcacccttgtacgccaaatgggcggccgactacaacaaggccacgggtgtcaagatcaattaccagtcggtcggctccggtgccggcatcaagcagatcgacgctaagacggttgattttggtgcttctgacatgccgctgtccgatgaggtactggcccagaaaggccagatacagttcccgaccgtgatgggcggcgtggtgccggtgatcaacgtcaagggcatcaatcccggccaactcaaactcaatggccaagtgctgggtgacatctacctgggcaaaatcagcaaatggaacgacgccgcgatcaaggccctcaacccgacgctggctttgcccgatgcagccatcgcacaggtacgccgggccgacggttctggcacaacgttcatcttcaccaactacctgagcaaggtgaatgcagaatggaagagcaaagtgggtgaaggcacggcagtgaactggccggtcggtgcgggcggcaagggcaacgaaggtgtttccgcttttgtgggccgtctgcccaattcgattggctacgtggagtactcttatgccaagcaaaacaagatgacctacaccctgatgcaaaacgcaggcggcaattttgtggcgcccgatgatgccactttcaaggcggctgccgcaggcgccgactgggccaagagcttctatcaaattctgaccaaccagcctggcaaagatgcctggcccatctcgggtgcgactttcatcctgatgcacaagctgcaggacaaacccgccaatgcgaccgaaacgctgaagttcttcgcctgggcctacaaaaacggcgacaagcaagcgcttgatctggactatgtgcccatgcccaagtcggttgtaggcaatattgaaaaagcctggggtgagatcaaggacgcatctggcaaagcggtcgcgttcaagtaa

SEQ ID NO: 2974 - protein, 347 aa, Rhodoferax ferrireducens T118
MKTSFKIALLSVASLASLSYATVAGAQEITGAGASFPAPLYAKWAADYNKATGVKINYQSVGSGAGIKQIDAKTVDFGASDMPLSDEVLAQKGQIQFPTVMGGVVPVINVKGINPGQLKLNGQVLGDIYLGKISKWNDAAIKALNPTLALPDAAIAQVRRADGSGTTFIFTNYLSKVNAEWKSKVGEGTAVNWPVGAGGKGNEGVSAFVGRLPNSIGYVEYSYAKQNKMTYTLMQNAGGNFVAPDDATFKAAAAGADWAKSFYQILTNQPGKDAWPISGATFILMHKLQDKPANATETLKFFAWAYKNGDKQALDLDYVPMPKSVVGNIEKAWGEIKDASGKAVAFK

SEQ ID NO: 2975 - DNA, 1011 bp, Rhodopseudomonas palustris BisB18
  CDS (1)..(1011): transl_table=11
atgaatttcttcaaggcaatcgtcgccgccggcctggttgccgcgtcgacgtcggcgttcgccgccgatattaccggtgccggggccacgttcccgttcccggtctattcgaagtgggccgacctctacaaaaaagagaccggcaacgggctgaactatcagtcgatcggctccggcgccggcatcaagcagatccaggccaagaccgtgaccttcggcgccaccgacgcgccgttgaaggccgagcagctcgagaaggacggcctggtgcaatggccgcaggtgatgggcgcgatcgtgccggtggtgaacctcgaaggcatcaagccgggtgaactggtgttcgatggcgagaccctggccaatatctatctcggcaagatcaccaagtggaacgatccggcgatcgccaagctcaatccgaagctgaagctgccgaccgacgccatcaccgtggtgcgccgctccgacggttcgggcaccaccttcaacttcaccgactatctgtccaaggccagcgccgactggaagacaaaggtcggatccggcaccgcggtcgaatggccggtcggcgtcggcgccaagggcaatgaaggcgttgccggcaacatcagccagaccaagaattcgatcggctatgtcgaatacgcctatgccaagcagaacaagctgacctacgccgggctgatcaacaaggccggcaagaccgtgcagccgaccgtcgccgcgttccaggccgccgcctccaatgcggattgggccaaggcgcccggctactacctgatcctgaccgaccagcccggcgaagcctcctggccgatcaccgcggcgacgttcatcttgatgcacaaggagccggccgacaaggcggcctccgcggaagccatcaagttcttcaaatgggcgttcgagaagggcgacaaggcggcggaagagctcgactacatcccgatgcccgccgcggtcgtcaagcagatcgagaagacctggtcggccgacatcaagagctaa

SEQ ID NO: 2976 - protein, 336 aa, Rhodopseudomonas palustris BisB18
MNFFKAIVAAGLVAASTSAFAADITGAGATFPFPVYSKWADLYKKETGNGLNYQSIGSGAGIKQIQAKTVTFGATDAPLKAEQLEKDGLVQWPQVMGAIVPVVNLEGIKPGELVFDGETLANIYLGKITKWNDPAIAKLNPKLKLPTDAITVVRRSDGSGTTFNFTDYLSKASADWKTKVGSGTAVEWPVGVGAKGNEGVAGNISQTKNSIGYVEYAYAKQNKLTYAGLINKAGKTVQPTVAAFQAAASNADWAKAPGYYLILTDQPGEASWPITAATFILMHKEPADKAASAEAIKFFKWAFEKGDKAAEELDYIPMPAAVVKQIEKTWSADIKS

SEQ ID NO: 2977 - DNA, 1044 bp, Polaromonas sp. JS666
  CDS (1)..(1044): transl_table=11
atgaaattgagtttcaaagcttctgcgactgctgtgatgggtgttgccatcatgtcgtttgccacgttgtcggccgcgcaggatgtcacgggcgctggagccagtttccccgctccgctgtattccaaatgggctgctgactacaacaaggccaccagcatcaagattaattaccagtcggtcggctctggcgcgggtttgcggcagattgaggccaagaccgtggactttggcgcatcagacgctcccctgaaggatgaagagctcgccaaaaaagggctggtgcagtttccgaccgtgattggtggcgtggttcctgtggtcaatatcaagggcgtcgctccgggccaactgaagctgagcggtcaggtcctgggtgacatctacctgggcaagatcaccaagtggaccgaccccgccatcaaggcgatgaatcctgcactggccttgccggatgcggccatcgcgccggtccgccgagctgatggttcaggtaccagcttcattttcaccaattatttgagcaaggccaacgccgagtggaaggccaaagtgggtgaaggtacggcggtgaactggccggcgggtgctggcggcaagggtaacgagggcgtcgcggcgtttgtcggtcgcctgcccaactcgattggctatgtggagtacgcctatgtcaagcagaacaagatgacgtttgtccagctgaagaatgctgccggcaatttcgtgtcgccggatgatgcggcattcaaggctgctgctgcaggcgccgactggtccaagagtttttaccagatactgactgagcagcccggcaaggatgcatggcctatcacgggcgccacctttatcctgatgcagaaggcgcaggacaagcccgcgcaggccgctgcctcgctcaaattcttcgagtgggcctataagaacggcgacaagatcgctgacgacctggactatgtgcccatgcccgccagcgtgaagacgatcatcgaaaaatcgtgggctgacatcaaggacacgtcgggcaaggctgttgcttacaaataa

SEQ ID NO: 2978 - protein, 347 aa, Polaromonas sp. JS666
MKLSFKASATAVMGVAIMSFATLSAAQDVTGAGASFPAPLYSKWAADYNKATSIKINYQSVGSGAGLRQIEAKTVDFGASDAPLKDEELAKKGLVQFPTVIGGVVPVVNIKGVAPGQLKLSGQVLGDIYLGKITKWTDPAIKAMNPALALPDAAIAPVRRADGSGTSFIFTNYLSKANAEWKAKVGEGTAVNWPAGAGGKGNEGVAAFVGRLPNSIGYVEYAYVKQNKMTFVQLKNAAGNFVSPDDAAFKAAAAGADWSKSFYQILTEQPGKDAWPITGATFILMQKAQDKPAQAAASLKFFEWAYKNGDKIADDLDYVPMPASVKTIIEKSWADIKDTSGKAVAYK

SEQ ID NO: 2979 - DNA, 1035 bp, Burkholderia xenovorans LB400
  CDS (1)..(1035): transl_table=11
atgagctatacacaaacactgttgaccggtgtggtcggcgctctattggcggtcacggcgcacggcgccgacattgccggcgccggcagcaccttcgccgcgccgatttatacgaaatgggccggcgcataccagcaggcaggcggcggcgcggtgagctatcgcgctgtcgggtcgaccgaaggcgtgaaggaaatcatggagagccaggtcgatttcgccgggtcggacgcgccgttgagcgacgacgaacttgccaggaacggcttgctccagtttccaatggtgatcggcggggtcgtgccggtcgtcaatctgcccggtatcaagcccggtgagttgattctctccgggcgtgtgctcgcggatatctacctgggcaaaatcatcaactgggacgcgccggccattgccgccatcaatcccaggatcaagctgccggatacgcctatcgccgttgtccgccgccttgacggttccggtaccacgctgatctggacgcactatctcgcgcaggccaattctgaatggaagagccggatcggcgaagggacttcggtgcgctggccacgcggtataggcggaagaggtaatgaaggggtggccactttcgtccagcatttgccaggtgcgatcggctacgttgcgtgggatttcacgaagcagaaccatatgtcgtacacggcgatggaaaatgcctcgggtgccgtggttcagcctggaccggagacattcaaggcggccgccgcgagcgcggactggtccagatctcttttcccaatcctgaccaatgagccgggcgcgaacgcgtggcctgtggtcggtgcgacatatgtactgcttcacagtacgcagaacaaaccggagcgcggcgaggcgacactgaagttcctggagtgggcgctgaccaacggcgaccaggctgcggaggatctggactatgtgccgctgccgccgccggtggtgagcgaaattcgcacgcagttgcatgcgcgggtgaagaatccgtcgggtaaggcaattgccggcgaatga

SEQ ID NO: 2980 - protein, 344 aa, Burkholderia xenovorans LB400
MSYTQTLLTGVVGALLAVTAHGADIAGAGSTFAAPIYTKWAGAYQQAGGGAVSYRAVGSTEGVKEIMESQVDFAGSDAPLSDDELARNGLLQFPMVIGGVVPVVNLPGIKPGELILSGRVLADIYLGKIINWDAPAIAAINPRIKLPDTPIAVVRRLDGSGTTLIWTHYLAQANSEWKSRIGEGTSVRWPRGIGGRGNEGVATFVQHLPGAIGYVAWDFTKQNHMSYTAMENASGAVVQPGPETFKAAAASADWSRSLFPILTNEPGANAWPVVGATYVLLHSTQNKPERGEATLKFLEWALTNGDQAAEDLDYVPLPPPVVSEIRTQLHARVKNPSGKAIAGE

SEQ ID NO: 2981 - DNA, 1023 bp, Burkholderia xenovorans LB400
  CDS (1)..(1023): transl_table=11
atgcaaaccgtgttcgctggcgtcgctggcgcgcttttcgcgatcgcagcgcaagccgcagacatcaccggcgcgggcagcaccttcgcagcaccgatttacacgaagtgggctgacgcctaccagaagtccggtggcggcaaggttaactatcagggcatcggttcgtcgggcggcgtgaagcagatcgtcgcgaagaccgtcgacttcgccggttcggacgctccgctgaaggacgacgagctcgccaaggaaggcctgttccagttcccgacggtggtcggcggcgtggtgccggtcgtcaacgtgccgggcgtgaagccggctgaactgacgctgtcgggcgaagtgctcggcgacatctacctgggcaagatcaagaagtggaacgatccggcgatcgttgcgctgaacccgaaggtcaagctgccggataccgacatcgccgtggtccgccgcgccgatggttcgggcaccagcttcatctggacgaactacctgtcgaaggtcaacgcagactggaagtcgaaggtgggtgaaggttcgacggtcaactggccgacgggcacgggcggcaagggcaacgacggcgtcgcggccttcgtgcaacgtctgccgggcgcaatcggctacgtggaatgggcgtatgcgaagcagaaccacatgacgtacgtcgcactgaagaactcgtcgggtgcagtggtcgagccgaagacggacacgttcaaggcagcggcagcaggcgcggactggtcgaagtcgttctaccagatcctgacgaacgagccgggcaagaacgcatggccgatcgtcggcgcaacgttcgtgctggttcacacggcacaggacaagccggcgcaaggcaccgaaacgctgaagttcttcgactgggcattcaagaacggcacgcaagccgcgaacgatctggactacatctcgctgccggattcggtcgtgtcggaaatccgcacgcagtggaagtcgaaggtgaaggacacgtcgggcaaggcaatcgccgagtaa

SEQ ID NO: 2982 - protein, 340 aa, Burkholderia xenovorans LB400
MQTVFAGVAGALFAIAAQAADITGAGSTFAAPIYTKWADAYQKSGGGKVNYQGIGSSGGVKQIVAKTVDFAGSDAPLKDDELAKEGLFQFPTVVGGVVPVVNVPGVKPAELTLSGEVLGDIYLGKIKKWNDPAIVALNPKVKLPDTDIAVVRRADGSGTSFIWTNYLSKVNADWKSKVGEGSTVNWPTGTGGKGNDGVAAFVQRLPGAIGYVEWAYAKQNHMTYVALKNSSGAVVEPKTDTFKAAAAGADWSKSFYQILTNEPGKNAWPIVGATFVLVHTAQDKPAQGTETLKFFDWAFKNGTQAANDLDYISLPDSVVSEIRTQWKSKVKDTSGKAIAE

SEQ ID NO: 2983 - DNA, 1011 bp, Rhodopseudomonas palustris BisB5
  CDS (1)..(1011): transl_table=11
atgaatttcatcaagtctatcgtcgcagccggactggttgcggcgtcgacctcggcattcgctgccgacatcaccggcgccggcgccacctttccgttcccgctgtattcgaaatgggcggacgcttacaagaaagagaccggcaacggcctgaactaccagtcgatcggctcgggcgccggcatcaagcagatcatcgccaagaccgtgacgttcggcgcaagcgacatgccgctgaagcccgagcagctcgagaaggaaggcatgatccagtggccccaggcgatgggcgcgctggttccggtcgtgaatctcgaaggcgtccagcccggcgagctggtgttcaccggcgaagtgctgggtgacatctatctcggcaagatcaagacctggaacgatccggcgatcgtcaagctcaatccgaaagcgaagttgtcgggcgacgcgatcaccgtggttcgccgctccgacggctcgggaacgacgttcctgtggaccgactatctgacgaaggtcaacgccgagtggaagtcgaaggttggctccggcaccgcggtggaatggccggtcggcgtcggcgccaagggcaatgaaggcgttgccggcaacgtcagccaaaccaagaattcgatcggctacgtcgaatacgcctatgccaagcagaacaagctgacctacgccggcgtcgtgaacaaggccgggaagacggtgcagccgaccatcggcgctttccaggctgcggccgccaatgccgattgggccggttcgaagaactactacgtcatcctgaccgatcagcccggcgaggcctcgtggccgatcaccggtgcgaccttcatcctgatgcacaaggatccgtccgacaaggcggcctcttcggaagccatcaagttcttcaagtgggcgttcgagaagggcgacaagatggccgaagaactcgactacatcccgatgccggagccggtggttaagctgatcgagaagacctggtcggccgacatcaagagctga

SEQ ID NO: 2984 - protein, 336 aa, Rhodopseudomonas palustris BisB5
MNFIKSIVAAGLVAASTSAFAADITGAGATFPFPLYSKWADAYKKETGNGLNYQSIGSGAGIKQIIAKTVTFGASDMPLKPEQLEKEGMIQWPQAMGALVPVVNLEGVQPGELVFTGEVLGDIYLGKIKTWNDPAIVKLNPKAKLSGDAITVVRRSDGSGTTFLWTDYLTKVNAEWKSKVGSGTAVEWPVGVGAKGNEGVAGNVSQTKNSIGYVEYAYAKQNKLTYAGVVNKAGKTVQPTIGAFQAAAANADWAGSKNYYVILTDQPGEASWPITGATFILMHKDPSDKAASSEAIKFFKWAFEKGDKMAEELDYIPMPEPVVKLIEKTWSADIKS

SEQ ID NO: 2985 - DNA, 1026 bp, Nitrobacter hamburgensis X14
  CDS (1)..(1026): transl_table=11
atgagttttattaaggccatcgtcgccgccggcctcgttgccgcctcggcgtccgccttttcgcttccggcgagggcggccgacatcaccggtgcgggcgcgaccttcccgttcccggtctattccaaatgggccgatgcctacaagaaagagaccggcaatagcgtgaattatcagtcgatcgggtcgggcgccggcatcaagcagatcctcgccaagaccgtgaccttcggcgcgaccgacgcgccgctgaaggccgacaagctcgacaaggacggcctgctgcagtggccgatggtgatgggcgcgatcgtccccgtcgtgaacgtcgaaggcgtgacgcctggcgagttggtcctttcgggtgaactgctcggcgacatctatctcggcaaggtcaccaggtgggacgaccctgcgatcgcaaagctcaacccgaagctcaagctgccttcggccccgatcgcggttgtgcatcgttcggacgggtcgggcacctcgttcaacttcaccaattatctgtccaaggtgaacgccgagtggaaatccaaggtcggcgagggcactgcggtcgagtggccggcgggcgtcggcgccaagggcaacgaaggcgtctccggcaatgtcggccagaccaagaactcgatcggctatgtcgagtatgcctatgccaagcagaacaagctgacctacgccgcgctcatcaacaaggccggcaagatcgtgcagccgaccgtcgcctccttccaggccgcggccggcaacgccgactgggcgcacgcgccgggctactacgtgatcctgaccgatcagccgggcgaggcttcctggccgatcaccgcggcgacgttcatcctgatgcacaaggagccgatcgacaaaacggcctccgccgaagccatcaagttcttcaagtggtcgttcgagaagggcggcaagatggccgaggatctcgactacattccgatgccggaccaggtcttaaagcagatcgagaaaacctggacctccgagatcaagagctga

SEQ ID NO: 2986 - protein, 341 aa, Nitrobacter hamburgensis X14
MSFIKAIVAAGLVAASASAFSLPARAADITGAGATFPFPVYSKWADAYKKETGNSVNYQSIGSGAGIKQILAKTVTFGATDAPLKADKLDKDGLLQWPMVMGAIVPVVNVEGVTPGELVLSGELLGDIYLGKVTRWDDPAIAKLNPKLKLPSAPIAVVHRSDGSGTSFNFTNYLSKVNAEWKSKVGEGTAVEWPAGVGAKGNEGVSGNVGQTKNSIGYVEYAYAKQNKLTYAALINKAGKIVQPTVASFQAAAGNADWAHAPGYYVILTDQPGEASWPITAATFILMHKEPIDKTASAEAIKFFKWSFEKGGKMAEDLDYIPMPDQVLKQIEKTWTSEIKS

SEQ ID NO: 2987 - DNA, 1155 bp, Psychrobacter cryohalolentis K5
  CDS (1)..(1155): transl_table=11
atgcgttattcattcatggcagtagcaatcgctagcactttgacattagccgcttgtaaccaaacgactagcaacaacgagagcgataaaaccgacgaagcagccacaacagcaccatcaaacactgctgtgagtagcgacgctagtgctagctcagctgaaagtgcatcgatgagtattaccggtgctggtgcttcttttccacagcctatctatgctaagtggtcagatgcctacaataaagccacaggtggtcaagtgaactatcagtctattggctcatcaggtggtatcaaacaaatcgttgctaagacggtagattttggggcatctgatgcgccgatgacaccagaagagttgaacgaagccggtctgatacagttcccaagcgtcatcggtggcgtggtacctattgttaatatcgatggtattgagcccggtcagttaaagctcgatggcaaaatgcttgctgatatttatctgggtaaaatcagcaaatggaacgaccctgcaattgcggcgatgaatcctgaacttaaattaccagacgctgccattaccacagtgtttcgctcagatggttctggtacaacctttaacttcactgattatctagccaaagtgtcaagcgattggaatgacagtgtaggtgtcgataagaccgtcaaatggccaacgtcggctaccggtgcgggtggtaaaggtaatgaaggtgtgtcgagctatgtcacgcgtatgaaaaactctatcggctatgttgaatacgcttacgctaagcaaaacggtatggcacacgtcgccctgaaaaatgctgcgggcaatgtcgtacaaccttctgccaaaacctttgcagcagcaggtgacatcgattggtcacagcaagaaggcttttataaagtcattaccaactctgaaacagcgcaagcttggccaatcgccgccgccacttttatcttagtacataagcagccacaagatgccaaacaagtcgctggtgtattgaagttctttgactgggcttatgagcaaggtgatgacgacgctatggcgcttgattacgtaccgttctctgatactgcagttgccttatttaaagcaaaatggagtgaggtcaaaggcagtgacggccaacctgtctataagcctgcacagtaa

SEQ ID NO: 2988 - protein, 384 aa, Psychrobacter cryohalolentis K5
MRYSFMAVAIASTLTLAACNQTTSNNESDKTDEAATTAPSNTAVSSDASASSAESASMSITGAGASFPQPIYAKWSDAYNKATGGQVNYQSIGSSGGIKQIVAKTVDFGASDAPMTPEELNEAGLIQFPSVIGGVVPIVNIDGIEPGQLKLDGKMLADIYLGKISKWNDPAIAAMNPELKLPDAAITTVFRSDGSGTTFNFTDYLAKVSSDWNDSVGVDKTVKWPTSATGAGGKGNEGVSSYVTRMKNSIGYVEYAYAKQNGMAHVALKNAAGNVVQPSAKTFAAAGDIDWSQQEGFYKVITNSETAQAWPIAAATFILVHKQPQDAKQVAGVLKFFDWAYEQGDDDAMALDYVPFSDTAVALFKAKWSEVKGSDGQPVYKPAQ

SEQ ID NO: 2989 - DNA, 1005 bp, Acidobacteria bacterium Ellin345
  CDS (1)..(1005): transl_table=11
ttgcaacgtacgctgcgagtacttttctgtctgactgtcctggccggcatggcatttgcgcaaacgactctgaatggcgccggcgcgaccttcccgtatcccatctactcgaagtggttctcggaataccacaaggcgcatggcgatgttgagatcaactaccaatccattggtagtggcggcggaatccgccaagtgaccacgggcaccgtggatttcggcgccagcgacggcccgatgaccgacgagcagttgcagcaatcgaaggtcaagatcgttcacatcccgacggttcttggcgccgtggttccggcgtacaacgttccaggcgtgagcggcgaaatcaagtttccggccgacgtactggcgaacatttttttaaataagatcagcaactggaacgataaggcgatcgccgcggcgaatccgggcgtgaagttcccggaccagaacattatcgtgatccatcgttccgacggctcgggcacgacctacatcttcaccgactttctgtcgaaggtgagtccggattggctgcaggttgcaggcaaggggacggccgtgaagtggccggttggtctcggaggcaagggcaacgaaggcgtggccggaatgatccgtcagacgccgggcgcgatcggctacatcgaactgatctacgcgttgcagaacaatatcccttacggttctgtgaagaactcctccggccagttcatcaaggcctcgctggagagcgtgaccgcggcggcacagggtgtgaagatgccgaacgactatcgtgtgtcgatcaccaacccgccgggcaagacggcttatccgatttcgagtttcacctggctactgatcccgcagccctacaaggacggcgctaagggcaagatcatcaccgacttcttgaactgggaactggacaacggacagggcatggcgggcagcctgagctacgccccgcttccgaaggaagtggcagataaggtccggcaaacaattaaaggtctgaagtag

SEQ ID NO: 2990 - protein, 334 aa, Acidobacteria bacterium Ellin345
MQRTLRVLFCLTVLAGMAFAQTTLNGAGATFPYPIYSKWFSEYHKAHGDVEINYQSIGSGGGIRQVTTGTVDFGASDGPMTDEQLQQSKVKIVHIPTVLGAVVPAYNVPGVSGEIKFPADVLANIFLNKISNWNDKAIAAANPGVKFPDQNIIVIHRSDGSGTTYIFTDFLSKVSPDWLQVAGKGTAVKWPVGLGGKGNEGVAGMIRQTPGAIGYIELIYALQNNIPYGSVKNSSGQFIKASLESVTAAAQGVKMPNDYRVSITNPPGKTAYPISSFTWLLIPQPYKDGAKGKIITDFLNWELDNGQGMAGSLSYAPLPKEVADKVRQTIKGLK

SEQ ID NO: 2991 - DNA, 1023 bp, Deinococcus geothermalis DSM 11300
  CDS (1)..(1023): transl_table=11
atgaagaagtttttccttctgggcctgattctcaccggcacggctgcggcacaaacgaccatcacgggtgcgggcgcttcttttccctatcccctctacagcaagatgttcgccgaatacaagaacgccaccggcgtcaatgtgaactatcagtcggtggggagtggtgccggtcagaagcagattctggagcgcacggttgactttgcgggctcggacaaccccatgagtgatgagaccctcaaaagtgctccggcgcccctgctgcacattcccaccgccattggtgcggtggtacccgcctacaacctgccgggcgtgacccagcccctgaagtttaccgggcgggtgctggccgacatctacctgggcaagatcaagaactggaacgacaaggccatcgccgcgctgaatcctggtgtgaccctgccgccgctgcccatcacggtcgctcgccgcagcgacggttcaggcacgacctacgtcttctcggactacctgagcaaagtgtcgccggagtggaaaagcaaggtgggcgtgggcaacagcctccagtggccggtagggacaggcgcgaagggcaatgacggcgtggcgggcgttgtgaagagtacccccggcgcgattggctacgtggaactggtgtatgccaagcagaacaaactgacctttgggagcgtgcagaaccgcgccgggaaatttgtgctggccgataatggcccggctgcggccgccgcgctgggtgtggtgattcctgccgacacccgcgtgagcctgaccaacagcgcgaacgcagaggcttaccccattgccagcttcacctacgtgatcttctatcaggaccaaaagtacgggaaccgcaccgaagcgcaggccaaggccctcaagaatctgctgacctggatggtcactaccgggcagcagtacaacgaggggctggattacgccaagctgcccgccaatgtggtcaataaggccaagagcatcatcaattcgatgacctacggcggcaagcggctctga

SEQ ID NO: 2992 - protein, 340 aa, Deinococcus geothermalis DSM 11300
MKKFFLLGLILTGTAAAQTTITGAGASFPYPLYSKMFAEYKNATGVNVNYQSVGSGAGQKQILERTVDFAGSDNPMSDETLKSAPAPLLHIPTAIGAVVPAYNLPGVTQPLKFTGRVLADIYLGKIKNWNDKAIAALNPGVTLPPLPITVARRSDGSGTTYVFSDYLSKVSPEWKSKVGVGNSLQWPVGTGAKGNDGVAGVVKSTPGAIGYVELVYAKQNKLTFGSVQNRAGKFVLADNGPAAAAALGVVIPADTRVSLTNSANAEAYPIASFTYVIFYQDQKYGNRTEAQAKALKNLLTWMVTTGQQYNEGLDYAKLPANVVNKAKSIINSMTYGGKRL

SEQ ID NO: 2993 - DNA, 1026 bp, Burkholderia cenocepacia AU 1054
  CDS (1)..(1026): transl_table=11
atgcaaaccgcgattgccggcctggctggcgcgcttttcgccgtcgccgcccacgctgccgacatcacgggcgcaggtagcacgttcgcgatgccgatctatacgaaatgggctgcggactaccagcagtccggcggttcgaaggtcaactaccagggcatcggctcgtcgggcggcctgaagcagatcgtcgcgaagaccgtcgattttgccggttcggacgctccgctgaaggatgaagaactcgcgaaggaaggcctgttccagttcccgacggtggtcggcggcgtggtgccggtcgtcaacgtgccgggcgtgaaggccggcgaactgacgctgtcgggcccggtgctcggcgacatctacctcggcaagatcaagaagtggaacgacccggcgatcgccgcgctgaacccgaaggtcaagctgccggatacggacatcgccgtggtccgccgcgctgacggctcgggtacgagcttcatctggacgaactacctgtcgaaggtcaacgacgagtggaagtcgaagatcggcgaaggcacgacggtcaactggccgacgggcacgggcggcaagggcaacgacggcgtcgcggccttcgtgcagcgtctgccgggcgcgatcggctacgtcgagtgggcgtacgcgaagaagaacaacatgacctacactgcgctgaagaattcgacgggcacggtggtcgagccgaagacggaaacgttcaaggccgcagcagcaggcgcgaactggtcgaagtcgttctaccagatcctgacgaaccagccgggcaaggaagcgtggccggtcgtcggcgcgacgttcgtgctgctgcacgcgaagcaggacaagccggagcagggcgcggaaacgctgaagttcttcagttgggcgttcaagaacggcgagaaggctgccgacagcctcgactacatctcgctgccggcgacggtcgagacggaaatccgcaagcagtggaagacgaaggtgacggacgcttcgggcaagccggtcgccgccgagtaa

SEQ ID NO: 2994 - protein, 341 aa, Burkholderia cenocepacia AU 1054
MQTAIAGLAGALFAVAAHAADITGAGSTFAMPIYTKWAADYQQSGGSKVNYQGIGSSGGLKQIVAKTVDFAGSDAPLKDEELAKEGLFQFPTVVGGVVPVVNVPGVKAGELTLSGPVLGDIYLGKIKKWNDPAIAALNPKVKLPDTDIAVVRRADGSGTSFIWTNYLSKVNDEWKSKIGEGTTVNWPTGTGGKGNDGVAAFVQRLPGAIGYVEWAYAKKNNMTYTALKNSTGTVVEPKTETFKAAAAGANWSKSFYQILTNQPGKEAWPVVGATFVLLHAKQDKPEQGAETLKFFSWAFKNGEKAADSLDYISLPATVETEIRKQWKTKVTDASGKPVAAE

SEQ ID NO: 2995 - DNA, 1113 bp, Rubrobacter xylanophilus DSM 9941
  CDS (1)..(1113): transl_table=11
ttgagcggactcaagggttggaagctggtctgtgccggtttggcgctctcctcgctgctgcttgcgggctgcgccaccgtcgacgaggcctcgccccagcagggcggcggttccggaggcggctcgcagggggcggcccagcggataaacggcgccggggcctccttccccgcgcccttctactcggcggtcttccagcgcttcgcgcaggaggaggggatagaggtcaactaccagtccatcggctcgagcggcggtcgcgagcagttcatccagaagaccgtcgccttcggcgcctcggacgagccgatgagcgaggaggagatgcgggaggccgggggcaacccgctccacatcgccaccgtgggcggggcggtggtccccgtgtacaacatcgagggggtggacagcgggctcaacttcaccggccgggtgctcgccgacatctacctcggcaacatcacccgctggaacgacccggccatagcggagctcaacccgggcgtggagctgccggacgccaagatagcggtcgtccaccgctccgacggctcgggcaccaccaacatctggaccagctacctggccgcggtgagccccgagtggaagagcgggcccggcgcgggcggcgagataaagtggccgaccggcatcggcggcgacggcaacgagggcgtggccgggctcgtcaagcagacccccaactccatcggctacgtggggctggagtacgcggtgcagaacgagctggcctacggcgacgttggcgaggagggggccttcgtccggcccagcgtcgagagcgcccgggcggccatcgcggcggccggggacgagatcccggaggacctcaggttcaccatctcctcggccaacccgcagggcgagggggtctacccgatcacgggcctcacctggatcctcgtgcgccagcagatggacgacccggcgcagtgcagggccgtggcgcaggctgcctggtacctgacccacgaggggcagagcctcgctcccgacctcaactacgtgccgctcccggagaacatcgtctcccgggacgaggagctgatccggagcatggaggccgggggcgagaagtgctacgcgggctag

SEQ ID NO: 2996 - protein, 370 aa, Rubrobacter xylanophilus DSM 9941
MSGLKGWKLVCAGLALSSLLLAGCATVDEASPQQGGGSGGGSQGAAQRINGAGASFPAPFYSAVFQRFAQEEGIEVNYQSIGSSGGREQFIQKTVAFGASDEPMSEEEMREAGGNPLHIATVGGAVVPVYNIEGVDSGLNFTGRVLADIYLGNITRWNDPAIAELNPGVELPDAKIAVVHRSDGSGTTNIWTSYLAAVSPEWKSGPGAGGEIKWPTGIGGDGNEGVAGLVKQTPNSIGYVGLEYAVQNELAYGDVGEEGAFVRPSVESARAAIAAAGDEIPEDLRFTISSANPQGEGVYPITGLTWILVRQQMDDPAQCRAVAQAAWYLTHEGQSLAPDLNYVPLPENIVSRDEELIRSMEAGGEKCYAG

SEQ ID NO: 2997 - DNA, 1041 bp, Escherichia coli 536
  CDS (1)..(1041): transl_table=11
atgaaagttatgcgtaccaccgtcgcaactgttgtcgccgcgaccttatcgatgagcgctttctctgtgtttgcagaagcaagcctgacaggtgcaggtgcaaccttccctgcgccggtgtatgccaaatgggctgacacttaccagaaagaaaacggtaataaagttaactaccagggtatcggttcttctggtggtgtaaaacagatcatcgccaataccgttgattttggtgcttctgacgcgccgctgtctgacgaaaaactggctcaggaaggcctgttccagttcccgaccgtgattggcggcgtggtgctggcggttaatattccaggtctgaagtctggcgaactggtgctggatggtaaaaccctcggcgacatctacctgggcaaaatcaagaagtgggatgatgaagccatcgccaaactgaatccgggtctgaaactgccttcacagaacattgctgtagtacgccgcgcagatggctccgggacttccttcgtcttcaccagctacctggcgaaagtgaacgaagagtggaaaaacaacgttggtactggctctaccgtaaaatggccgatcggtctgggcggtaaaggtaacgacggtatcgccgcgttcgttcagcgtctgccgggtgcaattggttacgttgaatatgcttacgcgaagcagaacaacctggcgtacaccaaactgatctccgctgatggcaaaccggtgagtccgaccgaagaaaacttcgctaatgcagcaaaaggcgcagactggagcaaaacattcgctcaggatctgaccaaccagaaaggcgaagatgcatggcctattacctctaccacgttcattctgatccataaagatcagaagaaaccagaacaaggcaccgaagtgttgaagttcttcgactgggcatacaaaaccggggctaaacaggcgaacgacctggattacgccagcctgccggatagcgtagttgaacaggttcgcgctgcgtggaagaccaatattaaagacagtagcggcaagccgctgtactaa

SEQ ID NO: 2998 - protein, 346 aa, Escherichia coli 536
MKVMRTTVATVVAATLSMSAFSVFAEASLTGAGATFPAPVYAKWADTYQKENGNKVNYQGIGSSGGVKQIIANTVDFGASDAPLSDEKLAQEGLFQFPTVIGGVVLAVNIPGLKSGELVLDGKTLGDIYLGKIKKWDDEAIAKLNPGLKLPSQNIAVVRRADGSGTSFVFTSYLAKVNEEWKNNVGTGSTVKWPIGLGGKGNDGIAAFVQRLPGAIGYVEYAYAKQNNLAYTKLISADGKPVSPTEENFANAAKGADWSKTFAQDLTNQKGEDAWPITSTTFILIHKDQKKPEQGTEVLKFFDWAYKTGAKQANDLDYASLPDSVVEQVRAAWKTNIKDSSGKPLY

SEQ ID NO: 2999 - DNA, 1041 bp, Shigella flexneri 5 str. 8401
  CDS (1)..(1041): transl_table=11
atgaaagttatgcgtaccaccgtcgcaactgttgtcgccgcgaccttatcgatgagtgctttctctgtgtttgcagaagcaagcctgacaggtgcaggtgcaaccttccctgcgccggtgtatgccaaatgggctgacacttaccagaaagaaaccggtaataaagttaactaccagggtatcggttcttccggtggcgtaaaacagattatcgctaataccgttgattttggtgcctctgacgcgccgctgtctgacgaaaaactggctcaggaaggtctgttccagttcccgaccgtgattggcggcgtggtgctggcggttaacattccagggctgaagtctggcgaactggtgctggatggtaaaaccctcggcgacatctacttgggcaaaatcaagaagtgggatgatgaagccatcgccaaactgaatccgggtctgaaactgccttcacaaaacattgctgtagtacgccgcgcagatggctccgggacttccttcgtcttcaccagctacctggcgaaagtgaacgaagagtggaaaaacaacgttggtactggctctaccgtaaaatggccgatcggtctgggcggtaaaggtaacgacggtatcgccgcgttcgttcagcgtctgccgggtgcaattggttatgttgaatatgcttacgcgaagcagaacaacctggcgtacaccaaactgatctccgctgatggtaaaccggttagtccgaccgaagaaaacttcgctaatgcagcaaaaggtgcagactggagcaaaaccttcgctcaggatctgaccaaccagaaaggcgaagatgcatggcctattacctctaccacgttcattctgatccacaaagatcagaagaaaccagaacaaggcacagaggtgatgaaattcttcgactgggcgtacaaaaccggggctaaacaggcgaacgacctggattacgccagcctgccggatagtgtagttgaacaggttcgcgctgcgtggaagaccaatattaaagacagtagcggtaagccgctgtactaa

SEQ ID NO: 3000 - protein, 346 aa, Shigella flexneri 5 str. 8401
MKVMRTTVATVVAATLSMSAFSVFAEASLTGAGATFPAPVYAKWADTYQKETGNKVNYQGIGSSGGVKQIIANTVDFGASDAPLSDEKLAQEGLFQFPTVIGGVVLAVNIPGLKSGELVLDGKTLGDIYLGKIKKWDDEAIAKLNPGLKLPSQNIAVVRRADGSGTSFVFTSYLAKVNEEWKNNVGTGSTVKWPIGLGGKGNDGIAAFVQRLPGAIGYVEYAYAKQNNLAYTKLISADGKPVSPTEENFANAAKGADWSKTFAQDLTNQKGEDAWPITSTTFILIHKDQKKPEQGTEVMKFFDWAYKTGAKQANDLDYASLPDSVVEQVRAAWKTNIKDSSGKPLY

SEQ ID NO: 3001 - DNA, 1119 bp, Rhodococcus jostii RHA1
  CDS (1)..(1119): transl_table=11
atgaatctcaagcgcagtggcgccctgctcggtgcagtggccctgggtgccatgaccttggccgcgtgtggcagcgacaacaacgcggcgtcgagcggcgtcgacgcatcgtcgtccaacgcgacgtgcgagggcaaggccaacctctccgcggccggttcctcggcccagaagaacgccatggaccagttcgtctccacctacatctccgtctgccaggaaaagggcaagaccgtcaacctggcgtacaaccccagcggttccggcgacggacggacccagttcatcgcgggccagatcgacttcgccggctccgactcggcgatcaaggccgagcaggccgagcaggccaaggcccgttgcgtcggcggcgaggcctggaacctgccgctggtcttcggacccgtcgcgatcgcctacaacctcgacggcgtcgaggacctggtgctgaacggtgaggtgaccgccaagatcttcaacggcaccatcaagaagtggaacgacccggccatcgccgcgctcaaccccggcgccaccctgcccgaccaggacgtcaccgccatcatccgctcggattcgtcgggaaccaccgacaacttccagcagtacctgacggccgcctccaacggcgcctggaccaccggtgccggttccgacttcaccggcggaatcggtgagggcgccaagggttcggccggtgtcgcgcaggcagtggcctccgccccgggctcgatcacctacgtcgagaagtcctacgccgaccagaacaagcttgctgccgcgcagatcgacaccggctccggccccgtcgcgctgtccgacgagtccgcggcgaaggccatcgagggtgcgcagttcaagggtcagggtgtgggcgatctgaccctcgacctcggctcgatcttcggtaccaaggaagcgggcgcgtacccgctggtgctcgccacctacgagatcgtgtgctcgaagggctacgacgccgacacctccgctgcggtcaagtcgttcctgaccagcgcagccaacgaggggcagggcaacctggccgagcagggttacgtgccgctgcccgactccatgaaggagaagctgaacgcatcggtcgccgccatcggctga

SEQ ID NO: 3002 - protein, 372 aa, Rhodococcus jostii RHA1
MNLKRSGALLGAVALGAMTLAACGSDNNAASSGVDASSSNATCEGKANLSAAGSSAQKNAMDQFVSTYISVCQEKGKTVNLAYNPSGSGDGRTQFIAGQIDFAGSDSAIKAEQAEQAKARCVGGEAWNLPLVFGPVAIAYNLDGVEDLVLNGEVTAKIFNGTIKKWNDPAIAALNPGATLPDQDVTAIIRSDSSGTTDNFQQYLTAASNGAWTTGAGSDFTGGIGEGAKGSAGVAQAVASAPGSITYVEKSYADQNKLAAAQIDTGSGPVALSDESAAKAIEGAQFKGQGVGDLTLDLGSIFGTKEAGAYPLVLATYEIVCSKGYDADTSAAVKSFLTSAANEGQGNLAEQGYVPLPDSMKEKLNASVAAIG

SEQ ID NO: 3003 - DNA, 1032 bp, Ralstonia eutropha H16
  CDS (1)..(1032): transl_table=11
atgaagctggtcaagactgccgtggcaggcatcgtttcgatggtggtggcgggtactgcgttcgcggcggaaattaccggtgcaggcgcttctttcccggcgcccgtgtattccaagtgggccgacgcataccaaaaagcaacgggtaataaggtcaactatcaatccatcggctcgtcgggcgggatcaagcagatcggcgccaagacggtcgatttcggtgcctcggacgcgccgctgaaggacgaggacctgaacaagcagggcctggtccagttcccgaccgtgatcggcggcgtggtgccggtgatcaacctgcagggcgtaaagccgggcgatctgaccatcacgggcgaagtgctggccaatatctacctgggcaagatcaagaagtgggatgaccccgcgatcaaggcgctgaacccgcaagccaagctgccgagccaggacatcctgccggtgcgccgcgccgacggttcgggcactaccttcatcttcaccaactacctgtccaaggtcagcccggactggaagagcgcggtgggcgagggcaccacggtcaactggccgggcggcggcaccggcggcaagggcaacgagggcgtcgccgccttcgtgcagcgcctgaacggcgccatcggctacgtcgagtacgcctacgccaagcagaacaagatgacccacgtgaacatgaagaacgcgtcgggtgccgtggtcaagccgggcgacgatgccttcaaggctgccgccgccggtgcggactggagcaagacctactaccagatcctgaccaaccagccgggcaaggaagcctggccgatcgcgggcgccaccttcatcctggtccacaagaaccaggaaaaggccgcgcagggtgccgaagtgctgaagttcttcgactgggcctacaagagcggcgccaacatggccgccgaccttgactacgtgccgctgccggaaaacgttgtgaaccagatccgttcgacctggaagaccagcgtcaaggacgcctcgggcaaggcgctgtactga

SEQ ID NO: 3004 - protein, 343 aa, Ralstonia eutropha H16
MKLVKTAVAGIVSMVVAGTAFAAEITGAGASFPAPVYSKWADAYQKATGNKVNYQSIGSSGGIKQIGAKTVDFGASDAPLKDEDLNKQGLVQFPTVIGGVVPVINLQGVKPGDLTITGEVLANIYLGKIKKWDDPAIKALNPQAKLPSQDILPVRRADGSGTTFIFTNYLSKVSPDWKSAVGEGTTVNWPGGGTGGKGNEGVAAFVQRLNGAIGYVEYAYAKQNKMTHVNMKNASGAVVKPGDDAFKAAAAGADWSKTYYQILTNQPGKEAWPIAGATFILVHKNQEKAAQGAEVLKFFDWAYKSGANMAADLDYVPLPENVVNQIRSTWKTSVKDASGKALY

SEQ ID NO: 3005 - DNA, 1044 bp, Granulibacter bethesdensis CGDNIH1
  CDS (1)..(1044): transl_table=11
atgaaattcgctccctcggcaattgctgccgtgctgattggcgctggcttgatcgctccggcttgcgcgcaggcgcagcaggttgtcggcgccggctcttcttttgcagcgccgctttatgacaagtggtcggagcaggcaaaaccctccacaggcgtgtcgctgaattatcaggcgatcggttccggcgcaggtcagactcagattttcaaccgcaccgtggattttggtgcctctgacgcgccggtgtcggccgataaactgcgtgaccacaaactgttgcagttccccagcgctatgggtgcagttgacgtcatcgtcaacatcccgggcatcaaaagcaacgagctgaagctgactggtccgatcatcgccgcaatctatgctggcacgatcacccagtggaatgatccgaagatcaaggaaatcaacaagggcatcaagctgccacgtctggcgatcgcaccggtttaccgcgctgatggctccggcacgaccttcgtatttacagattacctgtctctggttgacagcgactgggcctccaagatcggtcgtgcgacctccatcagctggcccgccggttctggcgccaagggcagcgcgggtgtggctggcaccgttcagcagattccgggcagcatcggctatgttgaggccgcctatgcgacccaaagccatctggtgactgtccagctgcagaacaaggccggcaagtttgtggctccgacccctgccaatttcgcagccaccgctgcggcggctgactggaccaaggcgcagaatttcgccatcgacctgaacgatcaggcaggcgataattcctggccgatcgaaagcgccactttcgtattggtgccgaccaaccccaccagcaccgcaaaagccgctgccgtgctgaagctgtttgactggggctttaaaaatggcgatgctctggcttccgatctgcaatacatcccgctgccagcatccgtgaaggacaccattcgcgccgcctggcacgatggtatcaagggtgcggatggcaagccggttttctga

SEQ ID NO: 3006 - protein, 347 aa, Granulibacter bethesdensis CGDNIH1
MKFAPSAIAAVLIGAGLIAPACAQAQQVVGAGSSFAAPLYDKWSEQAKPSTGVSLNYQAIGSGAGQTQIFNRTVDFGASDAPVSADKLRDHKLLQFPSAMGAVDVIVNIPGIKSNELKLTGPIIAAIYAGTITQWNDPKIKEINKGIKLPRLAIAPVYRADGSGTTFVFTDYLSLVDSDWASKIGRATSISWPAGSGAKGSAGVAGTVQQIPGSIGYVEAAYATQSHLVTVQLQNKAGKFVAPTPANFAATAAAADWTKAQNFAIDLNDQAGDNSWPIESATFVLVPTNPTSTAKAAAVLKLFDWGFKNGDALASDLQYIPLPASVKDTIRAAWHDGIKGADGKPVF

SEQ ID NO: 3007 - DNA, 1113 bp, Rhizobium leguminosarum bv. viciae 3841
  CDS (1)..(1113): transl_table=11
atgacgggaatttcagcgccccagacaatggacaccccctccatggcgctggtctcgttgtttttcaaatccattagggaagcgcttcaaatgctcaccaacaaacttctttcggcctgcctcggcgccggcctggttgccgctctggcggtttcggcgtccgccgccgatatcaccggcgccggctctaccttcgtctatcccgtcctgtccaagtggtctgcggactacaacaagcagaccggcgacaaactgaactaccagtcgatcggttcgggcggcggcatcgcccagatcaaggctgcaacggttgacttcggcgcgtccgacgccccgatgaagccggaagacctgacgactggcggcttcggtcagttcccgctcgtcgtcgggggcatcgtgcccgtcatcaacatcaaaggcatcaagtcgggcgaactgaagctcacgggcaaggttctcgccgacatctacctcggcaatgtcaccaagtggaatgacaaggccatcgccgatctgaatcccggcctgaaactgcccgacagccagatcgccgtcgtccaccgttcggacggttcgggcacctccttcaactggaccaactacttttccaaggtcaacgaagactggaagagcaaggttggcgaaggaactgccgtcaactggccggtcggcatcggcggcaagggcaatgaaggcgttgccgcttacgtcacccgcgtcaaggattcgatcggctacgtcgaatacgcctacgccctgcagaacaagctgccctacgttctgatccagaatgccgcaggccagtatccgaagccgaatgcggaaagcttctcggctgctgccgccagcgccgaatgggccaaggctcaggacttctacctgatcatgaccaatgctccgggcgaaaaggcctggccggtgaccgccacgacctgggcgatcatgtacaaggagccgaaggatgcagcgcgctccaaggctgccttcgccttcttcaagtgggcgcttgaaaacggccagaaggaagcctctgccctcgattacgttccgcttccgcagaccctggtgaagcagatcgaggattactggacagcctcgttcaagggctga

SEQ ID NO: 3008 - protein, 370 aa, Rhizobium leguminosarum bv. viciae 3841
MTGISAPQTMDTPSMALVSLFFKSIREALQMLTNKLLSACLGAGLVAALAVSASAADITGAGSTFVYPVLSKWSADYNKQTGDKLNYQSIGSGGGIAQIKAATVDFGASDAPMKPEDLTTGGFGQFPLVVGGIVPVINIKGIKSGELKLTGKVLADIYLGNVTKWNDKAIADLNPGLKLPDSQIAVVHRSDGSGTSFNWTNYFSKVNEDWKSKVGEGTAVNWPVGIGGKGNEGVAAYVTRVKDSIGYVEYAYALQNKLPYVLIQNAAGQYPKPNAESFSAAAASAEWAKAQDFYLIMTNAPGEKAWPVTATTWAIMYKEPKDAARSKAAFAFFKWALENGQKEASALDYVPLPQTLVKQIEDYWTASFKG

SEQ ID NO: 3009 - DNA, 1026 bp, Burkholderia ambifaria AMMD
  CDS (1)..(1026): transl_table=11
atgcaaaccgcgattgccggcctggctggcgcgcttttcgccgttgccgcgcacgctgccgacatcacgggcgcaggtagcacgttcgccatgccgatctatacgaaatgggctgccgactaccagcagtccggcggcgcgaaggtgaactaccagggtatcggttcgtcgggcggcctgaagcagatcaacgcgaagacggtcgattttgccggttcggacgctccgctgaaggatgaagagctcgcgaaggaaggcctgttccagttcccgacggtggtcggcggcgtggtgccggtcgtcaacgtgccgggcgtgaaggccggtgaactgacgctgtcgggcccggtactcggcgacatctacctcggcaagatcaagaagtggaacgatccggcgatcgttgcactgaacccgaaggtcaagctgccggacacggacatcgcggtcgttcgccgcgctgacggctcgggcacgagcttcatctggacgaactacctgtccaaggtgaacgacgagtggaagtcgaaggtcggcgaaggcacgacggtcaactggccgacgggcacgggcggcaagggcaacgacggcgtcgcggccttcgtgcagcgcctgccgggcgcggtcggctacgtcgagtgggcgtacgcgaagaagaacaacatggtctacaccgcgctgaagaattcgacgggcacggtggtcgagccgaagacggaaacgttcaaggccgccgcggccggcgcgaactggtcgaagtcgttctaccagatcctcacgaaccagccgggcaaggaagcatggccggtcgtcggcgcgacgttcgtgctgctgcacgcgaagcaggacaagccggagcagggcgccgaaacgctgaagttcttcagctgggcgttcaagaatggcgagaaggcggccgacagcctcgactacatctcgctgccgctggcagtcgaggcggaaatccgcaagcagtggaagacgaaggtcacggacgcatcgggcaagccggtcgccgcggagtaa

SEQ ID NO: 3010 - protein, 341 aa, Burkholderia ambifaria AMMD
MQTAIAGLAGALFAVAAHAADITGAGSTFAMPIYTKWAADYQQSGGAKVNYQGIGSSGGLKQINAKTVDFAGSDAPLKDEELAKEGLFQFPTVVGGVVPVVNVPGVKAGELTLSGPVLGDIYLGKIKKWNDPAIVALNPKVKLPDTDIAVVRRADGSGTSFIWTNYLSKVNDEWKSKVGEGTTVNWPTGTGGKGNDGVAAFVQRLPGAVGYVEWAYAKKNNMVYTALKNSTGTVVEPKTETFKAAAAGANWSKSFYQILTNQPGKEAWPVVGATFVLLHAKQDKPEQGAETLKFFSWAFKNGEKAADSLDYISLPLAVEAEIRKQWKTKVTDASGKPVAAE

SEQ ID NO: 3011 - DNA, 1014 bp, Rhodopseudomonas palustris BisA53
  CDS (1)..(1014): transl_table=11
atgaatttctttaaggcaatcgtcgcggccggcctggtcgccgccacgacgtcggcttatgcggccgatattaccggcgctggcgcgacgttcccgttcccgatctattcgaagtgggctgacgcctacaagaaggagaccggcaacggtctgaactaccagtcgatcggctcgggcgccggcaccaagcagatcattgccaagaccgtgactttcggcgccaccgatgcgccgctgaaggccgagcagctcgagaaggaaggcctcgtgcaatggccgcaggtgatgggtgcgatcgtacccgtcgtcaatctcgaaggcatcaagccgggcgagttgatcctgtccggtgaaaccctggccgacatctatctcggcaaggtcaagacctggaacgatccggcgatcgccaagctcaatccgaaactgaagctgccgaccgacgcgatcaccgtcgtgcgccgctccgacggatcgggaaccaccttcaacttcaccgactatctgtcgaaggccagcgccgactggaaggccaaggtcggccccggcgccgctgctgtcgagtggccggtgggtgtcggcgccaagggcaatgaaggcgttgccggcaacatcagccagaccaagaactcgatcggctatgtcgaatacgcctacgccaagcagaacaagctgacctatgccgggttgatcaacaaggccggcaagaccgttctgccgaccatggctgccttccaggccgcggcttccaacgccgactggtcaaaagcgcctggatattatgtgatcctgaccgaccagcccggcgaagcctcttggccgatcaccgcggcgaccttcatcctgatgcacaaggagccgacggacaaggaggcctctgccgaagccctcaagttcttcaagtgggcgttcgagaagggcgacaagatggccgaagagctcgactacatcccgatgcccgactcggtggtcaagcagatcgagaagacctggtcggccgacatcaagagctga

SEQ ID NO: 3012 - protein, 337 aa, Rhodopseudomonas palustris BisA53
MNFFKAIVAAGLVAATTSAYAADITGAGATFPFPIYSKWADAYKKETGNGLNYQSIGSGAGTKQIIAKTVTFGATDAPLKAEQLEKEGLVQWPQVMGAIVPVVNLEGIKPGELILSGETLADIYLGKVKTWNDPAIAKLNPKLKLPTDAITVVRRSDGSGTTFNFTDYLSKASADWKAKVGPGAAAVEWPVGVGAKGNEGVAGNISQTKNSIGYVEYAYAKQNKLTYAGLINKAGKTVLPTMAAFQAAASNADWSKAPGYYVILTDQPGEASWPITAATFILMHKEPTDKEASAEALKFFKWAFEKGDKMAEELDYIPMPDSVVKQIEKTWSADIKS

SEQ ID NO: 3013 - DNA, 1038 bp, Bordetella avium 197N
  CDS (1)..(1038): transl_table=11
atgttcaaacgtgtcttcaagcaagtttcgatgggcgtggccctgagcgccgctgtttttgccgttcatgccgccgacatcactggcgcaggcgcctccttcccctacccgatctatgccaagtgggcctccgactacaaggctgccaccggcaacagcgtgaactaccaatcgatcggctcgggcggcggccagcaacagatcaaggccaagacggtcgattttggcgcttcggacgatcctttgaaggctgaagaccttgagcaaaacggtttgctgcaatttccggccgtgatcggcggcaccgtcgcggtcgtgaacctcgacggtgtggcccctggccaactgaagttgtcgggcaaggttttggccgacatcttccagggcaagatcaccaaatgggatgatgccgccatcaaggcgctgaaccccgatgtcaagctgccctcggccgacattgttgtcgtgcaccgttcggacggttcgggtaccacctttggctggaccaactatctgtccaaggtctcgcccgactggaagagcgccgtgggagagggcaaggccgtcaagtggcccgtcggtcaaggcggcaagggtaatgaaggcgttgccgcctacgttggccagttgaagaactcgatcggctatgttgaatatgcctacgccaagcagaacaagctggcctggacccagttgcagaacaaggcgggcaagtttgttcagcctgagcagaaggcctttgccgccgccgctgccaatgccgactggaagagcgcgcctggcatgggcgtggtgctgaccgacgagccgggcgccgattcctggcctgtgaccgccgccaccttcattctggtgcacaaggttcaggataagcctggccaaggcaagggcgtgctggaattcttcgactgggccttcaagaatggcgccaagtcggctgaagccctggactacgtgccgctgccggaagccgtcaccaacgaaatccgtagcgcctggaagacggtcaagagcactgacggcaaggcggtttactaa

SEQ ID NO: 3014 - protein, 345 aa, Bordetella avium 197N
MFKRVFKQVSMGVALSAAVFAVHAADITGAGASFPYPIYAKWASDYKAATGNSVNYQSIGSGGGQQQIKAKTVDFGASDDPLKAEDLEQNGLLQFPAVIGGTVAVVNLDGVAPGQLKLSGKVLADIFQGKITKWDDAAIKALNPDVKLPSADIVVVHRSDGSGTTFGWTNYLSKVSPDWKSAVGEGKAVKWPVGQGGKGNEGVAAYVGQLKNSIGYVEYAYAKQNKLAWTQLQNKAGKFVQPEQKAFAAAAANADWKSAPGMGVVLTDEPGADSWPVTAATFILVHKVQDKPGQGKGVLEFFDWAFKNGAKSAEALDYVPLPEAVTNEIRSAWKTVKSTDGKAVY

SEQ ID NO: 3015 - DNA, 1122 bp, Arthrobacter sp. FB24
  CDS (1)..(1122): transl_table=11
atgaaggcactccgcttcggccgccacgcggctatcgctgtcatcgcagccggcgcactcgcgctcaccgcctgcggttccgacaacgccacgaatacggcacagtccggcgccccgtctgccacgggagcgaaggtcaccggcacgctgaccggcatcggttcctccgcccagggtgcagccatggacgtatggaagaccaacttcgcatccgcaaaccagggtgccaacgtgcagtactccccggatggctccggcgccggacgcaaggccatcatcgacggttcggcccagttcgccggttccgacgcctacctcaaggacgaggagctcgccagctccaaggaaaagtgcggccccgagggtgcgatcaacattccggtgtacatctccccgatcgccatcgccttcaacattccggatgtcaaggaactgaagctggatgccgccaccgtggccaagatcttccgcggcgaaatcgccaactggaacgatcccgcgatcgcagcaatgaacccggacgccaagctgccggacctcaaggtcacgccggtcaaccgttccgatgactccggcaccaccagcaacttcaccgattacctggccgccgcagctcctgaggtctggaccgacaaggctgccggcgtctggcccgcatccctgaagggcgagaacgccaagggcacctccggcgtggtcaagaccgtcaccgacaccccgggcgccgtaacctacgccgatgactcggccgtcagcggcaagcttggcatcgcccaggtcaaggtgggcgataccttcaccaagatctccgccgaggctgcggccaaggccgtggacgccggcaagcccgttgaaggccgttccgccaacgacctgtccatcaagctggaccgcaagaccaccatcgagggcgcctacccggttgtcctggtctccttccacgtggtctgctccacctacgccacccaggaaaccgttgacctggtgaaggccttcgaaaactacgtggtttccgacgccggccagcaggctgcagcagacgccgcgaagtccgctcccctctccaaggaactccaggagaaggctgccaaggccatcgagaccatcaaggtcaagtcctag

SEQ ID NO: 3016 - protein, 373 aa, Arthrobacter sp. FB24
MKALRFGRHAAIAVIAAGALALTACGSDNATNTAQSGAPSATGAKVTGTLTGIGSSAQGAAMDVWKTNFASANQGANVQYSPDGSGAGRKAIIDGSAQFAGSDAYLKDEELASSKEKCGPEGAINIPVYISPIAIAFNIPDVKELKLDAATVAKIFRGEIANWNDPAIAAMNPDAKLPDLKVTPVNRSDDSGTTSNFTDYLAAAAPEVWTDKAAGVWPASLKGENAKGTSGVVKTVTDTPGAVTYADDSAVSGKLGIAQVKVGDTFTKISAEAAAKAVDAGKPVEGRSANDLSIKLDRKTTIEGAYPVVLVSFHVVCSTYATQETVDLVKAFENYVVSDAGQQAAADAAKSAPLSKELQEKAAKAIETIKVKS

SEQ ID NO: 3017 - DNA, 1113 bp, Mycobacterium ulcerans Agy99
  CDS (1)..(1113): transl_table=11
atgagattcaatcgatttggcgccgcggtgagtgtattggccctcggcgcatcgatactttcgggatgttcgggtgacaacaacgtcgccggcaaaagcgcggcgccgggaaccacttcggcgcaagtgacctgcgggcgcaagcggactctggcggccagtggttccaccgcccaggaaaacgccatgatccggtttgtccgttccttcgagcaagcctgccccggtcagtcgttgaactacacggccaacggctcaagcgccgggattagcgaattcatccgcggccagaccgatttcgggggctcggattcgccgctgaacagcgacgagcacacccaggccgagcaacgctgcggctcgctcgtctggaatctgccacgggtgttcggcccgattgccatcgcctaccgggtcaacggtctgacatcgctgaacctggacggccccaccgcggccaggatcttcaacggcagcatcaccaactggcacgatcccgcgatcgaagcactcaatccgggcgccgacctgcccaccgaacccattcgcgtcgtcttccgcagcgacgggtccggcaccacggacaacttccagcgatacctcgatagcgcttccaacggtgggtggggcaagcgtgccggcaagcatttcaacggcggcgtgggggagggcgccaagggcaacgccggcgccgccgccgtcgtcagcagcaccgaaggggcgatcagctatgtggaatggtcgttcgctcgtgagcagcatctcgacatggccaagatcatcacctcggccgggcccgctccggtagcgatcagcgaagagtcggtgggaaagacgatttcggctgcctggtttgtcggggaggacaacgatctggctttcgataccctctcgttctaccggccaaaccaaccgggcgcttacccgatcgtgctggcgacctatgagatcgtgtgctcgaagtaccccgatgcgcaggtcgcaatggctgtcaaagcgtttctgcagagctcggtcggtgccggccagaatgcccttgcgggcaccggatacgtgccgattcccgacgaattcaagtcgcgattgtcgcgcgccgtcagtgccatcgcctga

SEQ ID NO: 3018 - protein, 370 aa, Mycobacterium ulcerans Agy99
MRFNRFGAAVSVLALGASILSGCSGDNNVAGKSAAPGTTSAQVTCGRKRTLAASGSTAQENAMIRFVRSFEQACPGQSLNYTANGSSAGISEFIRGQTDFGGSDSPLNSDEHTQAEQRCGSLVWNLPRVFGPIAIAYRVNGLTSLNLDGPTAARIFNGSITNWHDPAIEALNPGADLPTEPIRVVFRSDGSGTTDNFQRYLDSASNGGWGKRAGKHFNGGVGEGAKGNAGAAAVVSSTEGAISYVEWSFAREQHLDMAKIITSAGPAPVAISEESVGKTISAAWFVGEDNDLAFDTLSFYRPNQPGAYPIVLATYEIVCSKYPDAQVAMAVKAFLQSSVGAGQNALAGTGYVPIPDEFKSRLSRAVSAIA

SEQ ID NO: 3019 - DNA, 1245 bp, Pyrobaculum islandicum DSM 4184
  CDS (1)..(1245): transl_table=11
atgcttgggtttatatgtttttctcttcaatatttttgtttctatgtttttcgtaggcttatgagggctgtggctctggctgtcttggcggcggtgttggccctcttggcggtgggggttttgtttttcccgccgaagtgtctggcggcgtctggcggtggcggcggggtggcgctgggggttaggggttctctagtggggggcggctcgtcttttatagctccacagatgtttgtctggtctagggagttctataggctaagcggcggggcggcggtggttaactaccagtctgtggggtctggggctggggttgcgcaacttttggagaggaggcttgacttcgccgcctccgacgtgcctctgccgcgggataggtacgccgccgtcggcgggcgggttttccagttccccgtggctgtgggctctatcgtggttgtctacaacgtccccgaggtggcgtatggggtgacggggaggtatctaaacctgacggcggaggtgctggcgttgatctacatgggggttgttagacagtggtgcgacgttaggattagggagcttaacccggggcttgcggataggctgccgtgtagagacatcgtggcggtgcacaggagcgacgggtctgggacaactgcggcgtttaccctcttcctctccagggcctacccgccgtggaataacacggtggggtgggggctcgtggttaggtggcctgtggacgcagtggggaggggggtgggggcgaaggggaacgagggggttgcccaagccgtcttgcagaacgcctactctatcggctatgtggagtacgcctactgggtgaagaaccgggggaagttcgacgaagtggggggcgtggcgtatgtgcggaatgacaacgacgggaggttctacttccccacggccgagtctgtgtcggaggcggtgtcggccggccttgagaggtatttggcgaaatacggcgcgcctcctggccctggcgacgactggaaccccgtgtctatggagttttctaacccgccgcggggctatcccattgtgtcttttacatatataatcctctggcgggactatgtagcggagggatacggcaacgctggtgttaaagccaagatccttagggagttctttaggtgggttcttactgagggtcagaggaggcttgtggatggctacatcgccctcccccgagaggtagctgaggtgggtcttagagctgtggaggtggtgaagccgtag

SEQ ID NO: 3020 - protein, 414 aa, Pyrobaculum islandicum DSM 4184
MLGFICFSLQYFCFYVFRRLMRAVALAVLAAVLALLAVGVLFFPPKCLAASGGGGGVALGVRGSLVGGGSSFIAPQMFVWSREFYRLSGGAAVVNYQSVGSGAGVAQLLERRLDFAASDVPLPRDRYAAVGGRVFQFPVAVGSIVVVYNVPEVAYGVTGRYLNLTAEVLALIYMGVVRQWCDVRIRELNPGLADRLPCRDIVAVHRSDGSGTTAAFTLFLSRAYPPWNNTVGWGLVVRWPVDAVGRGVGAKGNEGVAQAVLQNAYSIGYVEYAYWVKNRGKFDEVGGVAYVRNDNDGRFYFPTAESVSEAVSAGLERYLAKYGAPPGPGDDWNPVSMEFSNPPRGYPIVSFTYIILWRDYVAEGYGNAGVKAKILREFFRWVLTEGQRRLVDGYIALPREVAEVGLRAVEVVKP

SEQ ID NO: 3021 - DNA, 1041 bp, Azoarcus sp. BH72
  CDS (1)..(1041): transl_table=11
atgatccgtttctcgaagaagttggccgtcctcgcgtcgtccgtgctgttggccgcgagcggcgtgcaggccgctgaaatcaccggtgccggcgcgtccttccccgctccgatctacgcgaagtgggcggatgcctaccagaaggccaccggaaacaaggtcaactatcagtcgatcggctcgggcggcggtattcgtcagatcaatgcgaagaccgtggacttcggtgcttcggacatgccgctcaagggcgaagagctggcgaagggcggtctgcagcagtttccgaccgtgatcggcggcgtggtgccggtggtgaacctgcccggcatcaaggccggcgagatgaagctcacgggccagctgctggccgacatctatcaaggcaagatcgtcaactggaacgacaaggcgatcgccgcgctcaatcccggcctgacgctgccggaccaggcgatcggcgtggttcgccgcgctgacggctccggcaccactttcgtcttcaccaactacctctccaaggtttcgccggagtggaaggaaaagatcggcgaaggctccgccgtgcagtggccggttgggctgggtggcaagggtaacgagggcgtttccgccttcgtgcagcgtctcccgggtgccatcggctacgtggagtacgcctacgccaagcagaacaagctggcttacacgctgctgcagaacaaggccggtgagttcgtttcgcccacggatgactcgtttgccgccgctgccgcgggtgcggactggaccaagtcgaacttctacgaaatcctgaccgagcagcccgccaaggcgtcctggccgatcactgcagcaactttcatcctgatgcatcagcagcaggacaagccgcagcaggccgcggaagtgctgaagttcttcgaatgggcgttcaagaatggtggcaatatggcggccgaacttgattatgttccgctgccggcgccgaccgtgaagctgatccgcacctcgtggggtcagatgaaggacgcctcgggcaaaccggtcttcgctgagtaa

SEQ ID NO: 3022 - protein, 346 aa, Azoarcus sp. BH72
MIRFSKKLAVLASSVLLAASGVQAAEITGAGASFPAPIYAKWADAYQKATGNKVNYQSIGSGGGIRQINAKTVDFGASDMPLKGEELAKGGLQQFPTVIGGVVPVVNLPGIKAGEMKLTGQLLADIYQGKIVNWNDKAIAALNPGLTLPDQAIGVVRRADGSGTTFVFTNYLSKVSPEWKEKIGEGSAVQWPVGLGGKGNEGVSAFVQRLPGAIGYVEYAYAKQNKLAYTLLQNKAGEFVSPTDDSFAAAAAGADWTKSNFYEILTEQPAKASWPITAATFILMHQQQDKPQQAAEVLKFFEWAFKNGGNMAAELDYVPLPAPTVKLIRTSWGQMKDASGKPVFAE

SEQ ID NO: 3023 - DNA, 1041 bp, Acidovorax avenae subsp. citrulli AAC00-1
  CDS (1)..(1041): transl_table=11
atgaaactgtctgtgattcggattctggtgtcgggcgtcgtctcggcgggtgcgttctccgccgcgtgggcccagcaggaggccacgggcgccggcgccagtttccccgctccgctgtactccaagtgggcggccgattacaacagggcaaccggtgtcaagatcaactaccagtccgtcggctccggcgccggcctgcgccagatcgaggcgaagacggtggacttcggcgcgtccgacgctcccctgaaggacgaggacctggccaagaagggcctggtgcagttccccaccgtgatcggcggcgtggtgcccgtggtcaacatcaaggggatcgctcccggccagatcaagctgagcggccaggtgctcggcgacatctacctgggcaaggtgaccaactggtccgatccggccatcaagtccctcaaccccggcgtgaccctgccggacgcgcagatcgccccggtgcgccgtgccgacggctccggcaccagcttcatcttcacgaactacctgtcgaaggtgaacgaggagtggaagaccaaggtcggcgaaggcacggccgtgaactggcccaccggcgcgggcggcaagggcaacgaaggcgtcgccgcttttgtaggccgcctgcccaactccatcggctatgtggaatatgcctacgtcaagcagaacaagctgacctacgtgcagatgcagaacgccaacggcgccttcgtctcgcccgacgattccgccttcaaggccgctgccgcaggcgccgactggtccaagagcttctaccagatcctgacgaaccagaagggcaaggaatcgtggcccatcaccggtgccaccttcatcctgatgcacaaggtccaggacaagcccgcccaggcctccacgtcgctgaagttcttcgactgggcttataagaacggcgacaagaccgccgccgacctcgactacatgcccatgcccgacagcgtgaaggccgtcgtgctcaagtcctgggatgacatcaaggacgcttccggcaaggccatcccgctgaagtaa

SEQ ID NO: 3024 - protein, 346 aa, Acidovorax avenae subsp. citrulli AAC00-1
MKLSVIRILVSGVVSAGAFSAAWAQQEATGAGASFPAPLYSKWAADYNRATGVKINYQSVGSGAGLRQIEAKTVDFGASDAPLKDEDLAKKGLVQFPTVIGGVVPVVNIKGIAPGQIKLSGQVLGDIYLGKVTNWSDPAIKSLNPGVTLPDAQIAPVRRADGSGTSFIFTNYLSKVNEEWKTKVGEGTAVNWPTGAGGKGNEGVAAFVGRLPNSIGYVEYAYVKQNKLTYVQMQNANGAFVSPDDSAFKAAAAGADWSKSFYQILTNQKGKESWPITGATFILMHKVQDKPAQASTSLKFFDWAYKNGDKTAADLDYMPMPDSVKAVVLKSWDDIKDASGKAIPLK

SEQ ID NO: 3025 - DNA, 1044 bp, Polaromonas naphthalenivorans CJ2
  CDS (1)..(1044): transl_table=11
atgcaatcaactctcaaagcttcgatgaccgtgaccctgggcgctgccctgatgtcgtttgccacgctgtcggctgcgcaggatgtcacgggcgccggcgccaccttcccggcaccgctttattccaaatgggccgccgattacaacaaggcgaccaacatcaagatcaactaccagtcggtaggctccggcgctggtattcgtcaaattgaagccaagaccgtggattttggtgcatcggacatgccgctgaaggatgacgagctggctaaaaaagggttgatgcagttccccaccgtcattggtggcgtggtgcccgtggtgaacatcaagggtattgccccaggtcagcttaagttgacgggccaggttctgggtgacatctacctcggcaagatcaccaagtggagcgatccggccatcaaggcgctgaaccccaccctgcctttgcctgatgtggcgattgcgccagtgcgccgcgccgatggttcgggcaccagctttatctttaccaattacctgagcaaggtgaatgccgagtggaaagccaaagtgggcgagggtacggccgtcaactggcctgtgggcgcgggcggcaagggtaatgagggtgtggctgcgtttgtgggccggctgcccaactcgattggctaccttgaatacgcttacatcaaacaaaacaagctgacttttgcgcagatgaaaaatgccgccggcaactttgtttcgcccgaagacacggctttcaaggccgcagccgctggcgccgaatggtccaagagcttctaccagatcctgaccgagcagcccggcaaggatgcctggcccatcaccggcgcgaccttcatcctgatgcagaaagtccaggaaaaaccggcccaggccgctacgtcgctcaagttcttcgagtgggcttacaagaatggcgaccagaccgctgacacgctggactatgtaccgatgcctgccaatgtgaagctcatcgtcgaaaaagcctggggcgagatcaaggacgcttcgggtaaagccgtcgcctacaagtaa

SEQ ID NO: 3026 - protein, 347 aa, Polaromonas naphthalenivorans CJ2
MQSTLKASMTVTLGAALMSFATLSAAQDVTGAGATFPAPLYSKWAADYNKATNIKINYQSVGSGAGIRQIEAKTVDFGASDMPLKDDELAKKGLMQFPTVIGGVVPVVNIKGIAPGQLKLTGQVLGDIYLGKITKWSDPAIKALNPTLPLPDVAIAPVRRADGSGTSFIFTNYLSKVNAEWKAKVGEGTAVNWPVGAGGKGNEGVAAFVGRLPNSIGYLEYAYIKQNKLTFAQMKNAAGNFVSPEDTAFKAAAAGAEWSKSFYQILTEQPGKDAWPITGATFILMQKVQEKPAQAATSLKFFEWAYKNGDQTADTLDYVPMPANVKLIVEKAWGEIKDASGKAVAYK

SEQ ID NO: 3027 - DNA, 1041 bp, Acidovorax sp. JS42
  CDS (1)..(1041): transl_table=11
atgaaactctccgcgattcgcgttctggtgtctggtgttgtggcaatgggcgcgttttctggcgcctgggcacagcaggaagcaacgggcgctggcgccagcttccctgcacccctgtattccaagtgggcggccgactacaacaaggccacgggcgtcaagatcaactaccagtccgtcggctcgggcgccggcctgcgtcagatcgaggccaagacggttgatttcggcgcttccgatgcgcccctgaaagacgaagaactggccaagaaggggctcgtgcagttccctactgtgatcggcggtatcgttcccgtggtgaacatcaagggtattcagcccggccaactcaagctcaacggtcaactgctcggcgacatctatctgggcaagatcaccaagtggaacgacgaagccatcaaggccttgaacccgggcttgaacctgcctgatgccgccatcgccccggtgcgccgtgccgatggctccggcaccaccttcggtttcaccaactacctgagcaaggtgaacgccgagtggaaggccaaggtgggcgaaggcactgccgtgaactggcccaccggcgcgggcggcaagggcaacgaaggcgtggccgcgttcgtgggacgcctgcccaactccatcggctacgtggagtacgcctacgtgaagcaaaacaagctgacgttcgcgcagatgcagaacagcgctggcaacttcgtgtcgcctgatgaggccactttcaaggccgccgccgcgggtgcggagtggaccaagagcttctaccagatcctgacgaaccagcccggcaaggatgcatggccgctcacctccgccaccttcatcctgatgcagaagtcgcaggacaagccggtgcaggctgctacggtactgaagttcttcgagtgggcatacaagtcgggcgacaagaccgcatccgatctggactatgtgcccatgccggaaaatgtgaaggccgtgatcatgaagtcgtggggcgagatcaaggacacttcgggcaaatccatcgccctgaagtaa

SEQ ID NO: 3028 - protein, 346 aa, Acidovorax sp. JS42
MKLSAIRVLVSGVVAMGAFSGAWAQQEATGAGASFPAPLYSKWAADYNKATGVKINYQSVGSGAGLRQIEAKTVDFGASDAPLKDEELAKKGLVQFPTVIGGIVPVVNIKGIQPGQLKLNGQLLGDIYLGKITKWNDEAIKALNPGLNLPDAAIAPVRRADGSGTTFGFTNYLSKVNAEWKAKVGEGTAVNWPTGAGGKGNEGVAAFVGRLPNSIGYVEYAYVKQNKLTFAQMQNSAGNFVSPDEATFKAAAAGAEWTKSFYQILTNQPGKDAWPLTSATFILMQKSQDKPVQAATVLKFFEWAYKSGDKTASDLDYVPMPENVKAVIMKSWGEIKDTSGKSIALK

SEQ ID NO: 3029 - DNA, 1038 bp, Verminephrobacter eiseniae EF01-2
  CDS (1)..(1038): transl_table=11
atgaaacccgaacgcatatttttcaaaaccgttgccgtcattgccgtcacattggccagcagcgccgtcggcacggccttggcagcggacatcacgggcgcaggcgcgaccttcccgttcccgatgtacgccaaatgggctgaagcctacaaaaaggaaaccggcatcggactgaactatcaatcgataggctcgtcgggcggcattcgccagatccgcgccaaaaccgtggccttcggcgccacggatgcgccactgtccggggccgatctggaaaaagacggcatggtgcagttccccgcgatcattggcggcaccgtgcccgtgatcaacctcgaaggcttcaagccgggcgagttgcgcgtcaccggcccggtgctggccgaggtgttcctgggcaagatcagcaagtggaatgacgccaagctggccgccctcaatcccggcaaggcgctgccggatcagggcatcaccgtcgtgcaccgcgccgatggctccggcaccacgttcaactggaccgactacctgacttcggtcagcaaggaatgggccgatcaggtgggcaagggggcggccgtcaagtggcccgcagcctcttcggtgggcggcaagggcaacgagggcgtggccgcaaatgtgacgcgcgtcaaaggcgccgtgggttatgtcgagtacgcttacgtcaagaagaacaatatgaactacctgcaactgcaaaatgccgacggcaagtatgtcaacccggacgacaagacctttgcgtcggctgcggccagtgccgactggttcagcgtgccgggcatgggcatctcgatggtcaacgccaagggcgccgacagttggccggtgagcacggcctcgttcatcctgatgtacaaggacccggccgacaaggcgcagtccgccgaggtgttgaagttcttcgagtgggctttcaagaacggcaagggcatggcggcggagttggactatgtgccgctgcctgaccgcctgaccgccgaaattggcgccaaagtctggtcgcagatcaagaagtaa

SEQ ID NO: 3030 - protein, 345 aa, Verminephrobacter eiseniae EF01-2
MKPERIFFKTVAVIAVTLASSAVGTALAADITGAGATFPFPMYAKWAEAYKKETGIGLNYQSIGSSGGIRQIRAKTVAFGATDAPLSGADLEKDGMVQFPAIIGGTVPVINLEGFKPGELRVTGPVLAEVFLGKISKWNDAKLAALNPGKALPDQGITVVHRADGSGTTFNWTDYLTSVSKEWADQVGKGAAVKWPAASSVGGKGNEGVAANVTRVKGAVGYVEYAYVKKNNMNYLQLQNADGKYVNPDDKTFASAAASADWFSVPGMGISMVNAKGADSWPVSTASFILMYKDPADKAQSAEVLKFFEWAFKNGKGMAAELDYVPLPDRLTAEIGAKVWSQIKK

SEQ ID NO: 3031 - DNA, 1020 bp, Haemophilus influenzae R2846
  CDS (7)..(1020): transl_table=11
atgtttatgcataaaatgaaaaaaaatcttattatcgttttaaccttaggtacgttaccttttgctcaagctaatagtatcactggtgctggagcgtctttcccttatccaatttatgcgaagtgggcatctttatatgagaaagaaactgggaataaagttaattatcaatccatcggttcgggcggcggacaacagcaaattattgcaaaaacggttgattttggtgcctctgacgatccgatgaaatccgaattattacaacaacaccaactagtccaattccctgcggttatcggtggtatagtgcctgttgttaatttgcctgaaattaaacctggtaaattaaagttatcaggtaagctgttagcagaaatcttccttggtaagattaaaaaatggaacgatcctgacttagttgcattaaatccaacgcttcctttaccaaataaaaacattattgtgattcatcgttcagacggctctggaacaacatttggcttcactaattatctatctaaagtttcgaacgattggaaaaatcaagttggtgaaggtaaatcagtgaagtggttaacaggtcaaggtggaaaggggaatgagggaattgcttcttatgttcgccaaatgaaatacaccattggttatgtagagtatgcctatgccaaacaaaatcagcttgcttggatttcattacaaaatcaagcagggcaatttgtacagccttctaatgaaagtttcatggcagctgcaagtcacgcaaaatggcacgaaaaggcgggaatgggtgttatattaaccaatgaaacgggggaaaaatcttggccaattacggcagcgagttttattttattaaataaatattctgacaatcctgaaacaactaaaaatgtattagccttttttgattgggcattctcaagagggcaagatgcggcaactgaattagattatgtgccaattccagctgatgtggtatctaccattaaaagtcaatggaaaacagagctaaaacaataa

SEQ ID NO: 3032 - protein, 337 aa, Haemophilus influenzae R2846
MHKMKKNLIIVLTLGTLPFAQANSITGAGASFPYPIYAKWASLYEKETGNKVNYQSIGSGGGQQQIIAKTVDFGASDDPMKSELLQQHQLVQFPAVIGGIVPVVNLPEIKPGKLKLSGKLLAEIFLGKIKKWNDPDLVALNPTLPLPNKNIIVIHRSDGSGTTFGFTNYLSKVSNDWKNQVGEGKSVKWLTGQGGKGNEGIASYVRQMKYTIGYVEYAYAKQNQLAWISLQNQAGQFVQPSNESFMAAASHAKWHEKAGMGVILTNETGEKSWPITAASFILLNKYSDNPETTKNVLAFFDWAFSRGQDAATELDYVPIPADVVSTIKSQWKTELKQ

SEQ ID NO: 3033 - DNA, 1020 bp, Haemophilus influenzae R2866
  CDS (1)..(1020): transl_table=11
atgtttatgcataaaatgaaaaaaaatcttattatcgttttaaccttaggtacgttaccttttgctcaagctaatagcatcactggtgcgggagcgtctttcccttatccaatttatgcgaagtgggcatctttatatgagaaagaaactgggaataaagttaattatcaatccatcggttcgggcggcggacaacagcaaattattgcaaaaacggttgattttggtgcctctgacgatccaatgaaatccgaattattacaacaacaccaactagtccaattccctgcggttatcggtggtatagtgcctgttgttaatttgcctaaaattaaacctggtaaattaaagttatcaggtaagctgttagcagaaatcttccttggtaagattaaaaaatggaacgatcctaacttagttgcattaaatccaacgcttcctttaccaaataaaaacattattgtgattcatcgttcagacggctctggaacaacatttggcttcactaattatctatctaaaatttcgaacgattggaaaaatcaagttggtgaaggtaaatcagtgaagtggttaacaggtcaaggtgggaaggggaatgagggagttgcttcttatgttcgccaaatgaaatacagcattggttatgtagagtatgcctatgccaaacaaaatcagcttgcttggatttcattacaaaatcaagcagggcaatttgtacagccttctaatgaaagtttcatggcagctgcaagtcacgcaaaatggcacgaaaaggcgggaatgggtgttatattaaccaatgaaacgggggaaaaatcttggccaattacggcagcgagttttattttattaaataaatattctgacaatcctgaaacaactaaaaatgtattagccttttttgattgggcattctcaagagggcaagatgcggcaactgaattagattatgtgccaattccagctgatgtggtatctaccattaaaagtcaatggaaaacagagctaaaacaataa

SEQ ID NO: 3034 - protein, 339 aa, Haemophilus influenzae R2866
MFMHKMKKNLIIVLTLGTLPFAQANSITGAGASFPYPIYAKWASLYEKETGNKVNYQSIGSGGGQQQIIAKTVDFGASDDPMKSELLQQHQLVQFPAVIGGIVPVVNLPKIKPGKLKLSGKLLAEIFLGKIKKWNDPNLVALNPTLPLPNKNIIVIHRSDGSGTTFGFTNYLSKISNDWKNQVGEGKSVKWLTGQGGKGNEGVASYVRQMKYSIGYVEYAYAKQNQLAWISLQNQAGQFVQPSNESFMAAASHAKWHEKAGMGVILTNETGEKSWPITAASFILLNKYSDNPETTKNVLAFFDWAFSRGQDAATELDYVPIPADVVSTIKSQWKTELKQ

SEQ ID NO: 3035 - DNA, 1149 bp, Lyngbya sp. PCC 8106
  CDS (1)..(1149): transl_table=11
atgatttttcgtctcaatcaaattaatctatccaatgtaatcaccaaaatttcggcagcggctctcgttgtgagtctcggggcttgtggaggcggtactgatactgcaaccgacacaatgggtggtgatacaggttctacaggcggttcgggcggtgaagtaaaactggttctcaacgaacaagtcaacctcgtcggtgcaggagcgtctttccccgctcccttgtatcagcgttggttccaagaattttctcaagatacccagaacttacaaattgactatcagtctgttgggagtggtgcgggagttgagcggtttacccaagggctagtacagtttggcgctagtgatgtcgccatgagtgatgaagaaattgcccaagtggacagaggcgttttaatgctgcccatgaccgcaggaagtatcgttctcgcttataatcttcccggtgtagacggagaactgaagctgtctcgcgacaactatgttaatatcctgcttggtaatatcaccaactggagcgatccggcgatcgctgaaaataaccccgacttacaactccccgatcagccgatcactgttgtttatcgttcagacgggagtggaaccacaggagtctttaccaagcacctaagctccatcagtgaagattggaaaaattctgttggtgaaggaaaaacagtacagtggcctacaggaattggtggtgctaaaaatgatggtgtagccgctcaacttacccaaactcccggtgcaattggttatgtggaatttggttttgccgaaagcgctggcttaccgatggcttctttggaaaaccaatctggaaattatatccaacccactaatgaggcggcttccaagaccctcgaagccgtagaattaccgggtgatttacgagcctttattactgatcccgcaggggctgaatcctatccgattgtgacctatacttggttgctggcttacaaagaatatgacgatccagaagttgccaaatccgttgaagcgatagtagagtacggtttaaccgcaggtcaagaaatcgctccccaattgggttatgtcaaactccctcaaaacgttagagagaaagttgcacaacaagccgatcaactgactcctgattaccaaattaatgtaaattaa

SEQ ID NO: 3036 - protein, 382 aa, Lyngbya sp. PCC 8106
MIFRLNQINLSNVITKISAAALVVSLGACGGGTDTATDTMGGDTGSTGGSGGEVKLVLNEQVNLVGAGASFPAPLYQRWFQEFSQDTQNLQIDYQSVGSGAGVERFTQGLVQFGASDVAMSDEEIAQVDRGVLMLPMTAGSIVLAYNLPGVDGELKLSRDNYVNILLGNITNWSDPAIAENNPDLQLPDQPITVVYRSDGSGTTGVFTKHLSSISEDWKNSVGEGKTVQWPTGIGGAKNDGVAAQLTQTPGAIGYVEFGFAESAGLPMASLENQSGNYIQPTNEAASKTLEAVELPGDLRAFITDPAGAESYPIVTYTWLLAYKEYDDPEVAKSVEAIVEYGLTAGQEIAPQLGYVKLPQNVREKVAQQADQLTPDYQINVN

SEQ ID NO: 3037 - DNA, 1050 bp, Nodularia spumigena CCY 9414
  CDS (1)..(1050): transl_table=11
atgagtttttcaaccaccattttgcaacgagcatttactacttcagtgctaacaacggctgttgcacttggttctatttatacagcgcctggcaaagctcaagctcaaactctcaatggtgcaggagccacttttccagcgcctttgtacgaaagatacgctcgtgaagtcagaaagaaatttccagatatgagaattaactaccaagcaattggtagtggtggtggtattcgtcaaacgattgctggaaccgttgactttggtggtagtgatgctgctatgacagacggggatatagctaaagtcaagaatggtgtgattttagtccctacagcaggtggtgctgtttctgtggtttataatctgcccggtgtgaataatctcagattatctcgtactactttaccaggtattttttctggtcaaattaccaactggaatgatccgaagattaaagctgataatcctggtgtaaatctacccaaccaagcaattagatttgctgttcgtgctgatggtagcggtacaactttcatttttaccaaccatttgagtgcaattagctcttatttcaagggtagagtcggaactggtactgctcccaaatggactttacccaatgtcctcaaaggtaagggtaatccaggtgtagctgctttagtcgctcggactcctggctctattggttatgtggaatattcctacgctagccaaaacaaactcaaatcagcacagttgcaaaataagtcaggagaatttgtggctccttctttgcagtctgcaaacgcagctttagcatctgtgaattttcctgataactaccgtgtttttgaaggagatccagcacaaggttatcctatcgtgggtctcacctggatgatggtttatagacagtatcctaatgctgctaaagctaatgctgtcaaaaaatggattaattgggtgttgaccgatggtcaaaaattaaatgatgaaatgaactatacggcaattccccccgcagtggcaaatcgggtattgcagacagtgaatagtactgttaaaccataa

SEQ ID NO: 3038 - protein, 349 aa, Nodularia spumigena CCY 9414
MSFSTTILQRAFTTSVLTTAVALGSIYTAPGKAQAQTLNGAGATFPAPLYERYAREVRKKFPDMRINYQAIGSGGGIRQTIAGTVDFGGSDAAMTDGDIAKVKNGVILVPTAGGAVSVVYNLPGVNNLRLSRTTLPGIFSGQITNWNDPKIKADNPGVNLPNQAIRFAVRADGSGTTFIFTNHLSAISSYFKGRVGTGTAPKWTLPNVLKGKGNPGVAALVARTPGSIGYVEYSYASQNKLKSAQLQNKSGEFVAPSLQSANAALASVNFPDNYRVFEGDPAQGYPIVGLTWMMVYRQYPNAAKANAVKKWINWVLTDGQKLNDEMNYTAIPPAVANRVLQTVNSTVKP

SEQ ID NO: 3039 - DNA, 1065 bp, Ralstonia solanacearum UW551
  CDS (1)..(1065): transl_table=11
ttgtcatcgctcaaccgctcctctggaggacacatgaaactggtcaagaccgcgatcgcgggcgttatttcgctggctttcgctggtgttgcgttcgccgccgacatcaccggtgctggcgcgaccttcccggcacccgtctacaacaagtgggccgatgcttatcagaaggccaccggcgccaaggtgaactaccaaggcatcggctcgtccggcggcatcaagcagatcaccgccaagaccgtcgatttcggcgcctcggacatgccgctcaaggatgacgagctgaacaaggacggcctgctgcagttcccgaccgtgatcggcggcgtggtgccggtgatcaacctgccgggcgtgaaggcgggtgagctggtcctgacgggccaggtgctgggtgacatctacctgggcaaggtcaagaaatggaacgatccggcgatcgccaagctgaacccgaaggccaagctgccggaccaggacatcctggtggtgcgccgcgccgacggttcgggcacttcgttcatcttcacgaactatctgtcgaaggtgaacgccgagtggaagggcaaggtcggtgaaggcacgaccgtgaactggccgaccggcacgggcggtaagggcaacgagggcgtggccgccttcgtgcagcgcctgggcggtgcgatcggctacgtggaatacgcctacgccaagcagaaccacatgacccatgtgaacctgcagaacgcatcgggcgccgtggtgcagccgaccagcgacgcgttcaaggccgccgcggccggtgccgactggaacaagtcgttctaccagatcctgaccaaccagccgggcaaggacgcatggccgatcgctggcgctaccttcattctggtgcacaagacccaggacaagccggcccagggcaccgaagtcctgaagttcttcgactgggcctacaagaacggcggcaaggatgcctccgccctggactacgtgccgctgccggatcaggtgctgaaccagatccgcgccacctggaaatcgggtgtgaaggacgctgcgggcaagccgatctacaactga

SEQ ID NO: 3040 - protein, 354 aa, Ralstonia solanacearum UW551
MSSLNRSSGGHMKLVKTAIAGVISLAFAGVAFAADITGAGATFPAPVYNKWADAYQKATGAKVNYQGIGSSGGIKQITAKTVDFGASDMPLKDDELNKDGLLQFPTVIGGVVPVINLPGVKAGELVLTGQVLGDIYLGKVKKWNDPAIAKLNPKAKLPDQDILVVRRADGSGTSFIFTNYLSKVNAEWKGKVGEGTTVNWPTGTGGKGNEGVAAFVQRLGGAIGYVEYAYAKQNHMTHVNLQNASGAVVQPTSDAFKAAAAGADWNKSFYQILTNQPGKDAWPIAGATFILVHKTQDKPAQGTEVLKFFDWAYKNGGKDASALDYVPLPDQVLNQIRATWKSGVKDAAGKPIYN

SEQ ID NO: 3041 - DNA, 1026 bp, Nitrobacter sp. Nb-311A
  CDS (1)..(1026): transl_table=11
atgaatgtcttcaaggccatcgttgccgccggcctcgccatcgtttccacggccgccctttcgatttcggcgaaggcggccgacgttaccggcgcgggggcgaccttcccgtttccggtctattcgaaatgggctgatgcctacaagaaagagaccggcaaaagtctgaactatcagtcgatcggttcgggcgccggcatcaaacagattctcgccaagacggtgacattcggcgcgaccgatgcgccgctgaaggccgacaagctcgagaaagacggtctcgtgcagtggccgatggtgatgggggcgatcgtaccggtcgtgaacgtcgagggtgtgaagcctggcgagctggttctttcgggtgaactgctcggtgatatctacctcggcaaggtcacgaaatgggacgatcccatgatcgtgaaactcaatccgggcatcaagctgccttcggctccgatcgcggtggtgcaccgttcggacgggtcaggcacctcgttcaacttcaccaactatctgtccaaggtgaatgccgagtggaagtccaagattggcgagggtaccgcggttgagtggccggccggcgtcggcgccaaaggcaatgaaggggtttccggcaatgtcggccagaccaggaactcgatcggctatgtcgaatacgcctatgccaagcagaacaagctgacctacgccgcgctcgtcaacaaggccggcaaggcggtgcagcccaccgttgcctccttccaggccgcggccgccagcgccgattgggctcactcgccgggctactacgtgatcctgacggatcagccgggcgaggcttcgtggccgatcactgccgcgacgttcatcctgatgcacaatgagccggccgacaaggcggcctccgctgaagctatcaagttcttcaaatgggcgttcgagaagggcggcgggatggccgaggagctcgactacattccgatgccggattcggtcgtggagcagatcaagaaaacctggacctccgatatcaaaagctga

SEQ ID NO: 3042 - protein, 341 aa, Nitrobacter sp. Nb-311A
MNVFKAIVAAGLAIVSTAALSISAKAADVTGAGATFPFPVYSKWADAYKKETGKSLNYQSIGSGAGIKQILAKTVTFGATDAPLKADKLEKDGLVQWPMVMGAIVPVVNVEGVKPGELVLSGELLGDIYLGKVTKWDDPMIVKLNPGIKLPSAPIAVVHRSDGSGTSFNFTNYLSKVNAEWKSKIGEGTAVEWPAGVGAKGNEGVSGNVGQTRNSIGYVEYAYAKQNKLTYAALVNKAGKAVQPTVASFQAAAASADWAHSPGYYVILTDQPGEASWPITAATFILMHNEPADKAASAEAIKFFKWAFEKGGGMAEELDYIPMPDSVVEQIKKTWTSDIKS

SEQ ID NO: 3043 - DNA, 1014 bp, Synechococcus sp. RS9917
  CDS (1)..(1014): transl_table=11
atgcgtcgaaccctccgcaaccgtgcgctgaccgccgctgccggcgtgaccgcaaccctgaccctggcctcctgctccgtcggagacggtggtggcggtggtggtgatcaggtcaagggcaacctgagcggcgccggtgcgtccttccccgccgccatctacacccgctggttccaggagctggctcccgaaggcgtcaatgtcaattatcaatccgtcggctccggctccggtgtccgccagttcaccgccggcacggtcgacttcggcgcctccgatgcgccgatgaagcccgatgaagtggcgaaagtggcccgcggcgtgctccagatcccgatgaccgccggtgccatcgctgtggcttacaacaaccccggttgtgaactgaagctcacccaggagcaactcgccggcatcttcctcggcaagatcaccaacttcaaggaactcggctgcgacgacaaggcgatcaccatcgtccaccgctccgatggttccggcaccacctacaacttcacgaaacacctctcagccatcagcgaggagtggaagaatgggccaggcaccggcaaatcggtgaattggcctgtcggcgtaggctccaaaggtaatgagggcgtttccgcacagctgaaccaggtggatggtggtttgggctatgtggaagtggcttatgtcaaagacaagctccaggccgctgcgctcgccaatgcttccggagagcaggtgaagcccaccaacgaaacggagagcaccgctctcgattcgatcgacctcggccctgagctgatcggtggcaaccccaacccccccaagggctatccgatcgtcaccttcacctggatcctggcttacaaagaaggtaacggcgacaagaccgagctgctgaagaaagcgttcgatttcatgctctccgagaaggcccagagccaggctcctgagctgggttatgtgtccctgcccccgggcgtggtggagaagtcgaaagccgctgtggcccagatcagcaagtga

SEQ ID NO: 3044 - protein, 337 aa, Synechococcus sp. RS9917
MRRTLRNRALTAAAGVTATLTLASCSVGDGGGGGGDQVKGNLSGAGASFPAAIYTRWFQELAPEGVNVNYQSVGSGSGVRQFTAGTVDFGASDAPMKPDEVAKVARGVLQIPMTAGAIAVAYNNPGCELKLTQEQLAGIFLGKITNFKELGCDDKAITIVHRSDGSGTTYNFTKHLSAISEEWKNGPGTGKSVNWPVGVGSKGNEGVSAQLNQVDGGLGYVEVAYVKDKLQAAALANASGEQVKPTNETESTALDSIDLGPELIGGNPNPPKGYPIVTFTWILAYKEGNGDKTELLKKAFDFMLSEKAQSQAPELGYVSLPPGVVEKSKAAVAQISK

SEQ ID NO: 3045 - DNA, 1077 bp, Nitrococcus mobilis Nb-231
  CDS (1)..(1077): transl_table=11
atgcgaaaagaattgacgcgtgtgcttatggtcgctgccgtgctgatggttgccggtgtggcgagcgccgccgcggcgagcaagagcaagcagatcagcggggccggcgcgactttcccttaccccatctacagtaagtgggccgcggcctatcacaaggcgaccggggttagagtgaattaccaatccatcggttcgggcggtggtatcaaacagatcaaggcgggaacggtggatttcggtgcctcggacgcgccgttgaccaaacaggagcttgacgcagctgggttggtacaattcccgatgattatcggcggagtggtgccagtggtcaatttaccgggagtcaagcctggtacgctgaggctgacgccgcagacgcttgctgggattttcctgggccggatcaagcgctgggatgatcccatgctgcaggagctcaatcccgagctggacttgcccgactcgccaatcacggtggtgcatcgctccgatggctcgggtacgacctgggtctttaccaattacctgagcaaggtcagctcgagctggcaacgccaggtaggcaacgccaaagcggtcagctggcccgctggggttggcggtaaaggcaatgaaggcgtggcttcctatgtgactcggctgaagggcggaatcggttacgtcgagttcgcctatgcgctgcaaaaccagatgaattacgtgctcttacgtaaccgcgcgggtgatttcaccaaaccgagtatcgaggcttttcaggcggcggcagcgggtgccgattgggctcacgcgccgggtttttatttggtgctgaccaatcagcccggtcaacagagttggccgatcagtggggcgagtttcatcctgatgcacaaggttcaaaacgaccgcacggcgggtcgaacggcgctcgagtttttcgcttggtgcttcgagcatgggaacgagatggcgctggacctgcactatgtgccattgccgcaaaacgtggtcgatcaagtcgaaaatgcctggcaggaaaggctggtaggatcggatcagcagccgctctggacccgcgccgcgtcccatgagtaa

SEQ ID NO: 3046 - protein, 358 aa, Nitrococcus mobilis Nb-231
MRKELTRVLMVAAVLMVAGVASAAAASKSKQISGAGATFPYPIYSKWAAAYHKATGVRVNYQSIGSGGGIKQIKAGTVDFGASDAPLTKQELDAAGLVQFPMIIGGVVPVVNLPGVKPGTLRLTPQTLAGIFLGRIKRWDDPMLQELNPELDLPDSPITVVHRSDGSGTTWVFTNYLSKVSSSWQRQVGNAKAVSWPAGVGGKGNEGVASYVTRLKGGIGYVEFAYALQNQMNYVLLRNRAGDFTKPSIEAFQAAAAGADWAHAPGFYLVLTNQPGQQSWPISGASFILMHKVQNDRTAGRTALEFFAWCFEHGNEMALDLHYVPLPQNVVDQVENAWQERLVGSDQQPLWTRAASHE

SEQ ID NO: 3047 - DNA, 1020 bp, Haemophilus influenzae 22.4-21
  CDS (1)..(1020): transl_table=11
atgtttatgcataaaatgaaaaaaaatcttattatcgttttaaccttaggtacgttaccttttgctcaagctaatagcatcactggtgctggagcgtctttcccttatccaatttatgcgaagtgggcatctttatatgagaaagaaactgggaataaagttaattatcaatccatcggttcgggcggcggacaacagcaaattattgcaaaaacggttgattttggtgcctctgacgatccaatgaaatccgaattattacaacaacaccaactagtccaattccctgcggttatcggtggtatagtgcctgttgttaatttgcctgaaattaaacctggtaaattaaagttatcaggtaagctgttagcagaaatcttccttggtaagattaaaaaatggaacgatcctgacttagttgcattaaatccaacgcttcctttaccaaataaaaacattattgtgattcatcgttcagacggctctggaacaacatttggcttcactaattatctatctaaaatttcgaacgattggaaaaatcaagttggtgaaggtaaatcagtgaagtggttaacaggtcaaggtggaaaggggaatgagggagttgcttcttatgttcgccaaatgaaatacagcattggttatgtagagtatgcctatgccaaacaaaatcagcttgcttggatttcattacaaaatcaagcagggcaatttgtacagccttctaatgaaagtttcatggcagctgcaagtcacgcaaaatggcacgaaaaggcgggaatgggtgttatattaaccaatgaaacgggggaaaaatcttggccaattacggcagcgagttttattttattaaataaatattctgacaatcctgaaacaactaaaaatgtattagccttttttgattgggcattctcaagagggcaagatgcggcaactgaattagattatgtgccaattccagctgatgtggtatctaccattaaaagtcaatggaaaacagagctaaaacaataa

SEQ ID NO: 3048 - protein, 339 aa, Haemophilus influenzae 22.4-21
MFMHKMKKNLIIVLTLGTLPFAQANSITGAGASFPYPIYAKWASLYEKETGNKVNYQSIGSGGGQQQIIAKTVDFGASDDPMKSELLQQHQLVQFPAVIGGIVPVVNLPEIKPGKLKLSGKLLAEIFLGKIKKWNDPDLVALNPTLPLPNKNIIVIHRSDGSGTTFGFTNYLSKISNDWKNQVGEGKSVKWLTGQGGKGNEGVASYVRQMKYSIGYVEYAYAKQNQLAWISLQNQAGQFVQPSNESFMAAASHAKWHEKAGMGVILTNETGEKSWPITAASFILLNKYSDNPETTKNVLAFFDWAFSRGQDAATELDYVPIPADVVSTIKSQWKTELKQ

SEQ ID NO: 3049 - DNA, 1044 bp, Vibrio shilonii AK1
  CDS (1)..(1044): transl_table=11
atgaaatttatcagatcagctctcttgtcttctttgttagtcactgcatcattcggcttggcagcaaagaccactattaacggtgcgggcgcgactttccctcatccaatttatgcaaagtgggctgagcaataccaaaaggaaacgggtatccagatcaactatcaagctatcggttctggtggtggcattcgtcagatcacagcaaaaacggtagactttggcgcgacagatgcaccgcttaccatcgaagagttgaacaaagaagacatgattcaatttcctatggttatgggcgcgattgtccctgtaatcaacctcccaggtatcaaggcaggtcaattaaaactgacaggcaaagtattagctgatatctacttaggaaatatcaagaactggaacgataaagctattacgggacttaacccagatatagcgctcccgaaccaacctatttatgttgtccaccgctctgatgggtcaggtactacattcaatttcactgaatatcttgatcaagttagcccagaatggcacgaaaaaatcggtgcaagcaaagacatcgcattgccctcggcagcgacggcaattggtggaaacggtaacgctggtgtcgccaacttcgttacgcgcactcgtggtgctatcggctacgtagaatatgcattcgctaaacaaaatgatttggcgtacacacaaatgcaggctcgcgatggtgcatacctaatgccaaccatgaaaaccttccaagccgctgccgcaaacgccgattgggaagacgctccaggatatcatttacttcttaacaaccaaccgggagctgattcgtggccgatgaccgccgcaactttcatcttaatgcataaggaccaacctgacgccaagaaagcacaagagattattaagttctttgaatggagctatacccaaggcaaagctgctgaagaactcgactatattccaatgccgaagaaagtcgttagcatggttaatgacacttggaaacaaagtctaaaaaccaacaatcaagccattattaaataa

SEQ ID NO: 3050 - protein, 347 aa, Vibrio shilonii AK1
MKFIRSALLSSLLVTASFGLAAKTTINGAGATFPHPIYAKWAEQYQKETGIQINYQAIGSGGGIRQITAKTVDFGATDAPLTIEELNKEDMIQFPMVMGAIVPVINLPGIKAGQLKLTGKVLADIYLGNIKNWNDKAITGLNPDIALPNQPIYVVHRSDGSGTTFNFTEYLDQVSPEWHEKIGASKDIALPSAATAIGGNGNAGVANFVTRTRGAIGYVEYAFAKQNDLAYTQMQARDGAYLMPTMKTFQAAAANADWEDAPGYHLLLNNQPGADSWPMTAATFILMHKDQPDAKKAQEIIKFFEWSYTQGKAAEELDYIPMPKKVVSMVNDTWKQSLKTNNQAIIK

SEQ ID NO: 3051 - DNA, 1041 bp, Limnobacter sp. MED105
  CDS (1)..(1041): transl_table=11
atgttcaacatcaaaacaatcgctacagcgatttccgcaggtgccctggccctgagcatgacttccgtgaacgccgctgaaattactggtgctggcgcttctttccccgctcctgtgtattccaagtgggctgatgcttacaacaaggaaacaggcaacaaggtgaactaccagtccatcggttccggtggtggtatcaagcagatttccgcaaaaactgtagatttcggtgcttccgacatgcctttgaagcctgaagacctgaaagaaaaaggtttgatgcagttcccaaccgtgatcggcggtgttgttcccgtggtgaacctgcagggcgtggccccaggccagatgaagttgtctgctgaagtattggccaacatctacttgaacaagatcaccaagtggaacgacaaggcaattgttgccttgaacccaggtgtgaacctgcccgaccaagacatcagcgtgattcgtcgtgccgatggttcaggcacaacattcattttcaccaactacctgagcaaggtaagcgctgactggaagagcaccgttggtgaaggtacagccgtgaagtggccagtaggtttgggtggcaagggcaacgaaggtgtttcagctttcgtacagcgcgtacccggctctattggttacgttgagtatgcttacgccaagcagaacaagttgacacatacccagttgaacaacgctgaaggtgcatttgttcagccttctgaagagtcattcaaggcagcagctgctggtgcttcttgggacaacggcttctacgaaatcctgactcagcaacctggcaaagccgcatggcccatcactggtgctactttcattctgttccacacagaacaggctgacgcagccaaggcttctgaagtattgaagttcttcaactgggcctacgcaaagggcgacaagctgagctctgacctggactacgttccactgccagacgaaacagtgaagaagattgaagccgcctggaagacagttaaagcgactgacggcaaagcaatctcaatgaagtaa

SEQ ID NO: 3052 - protein, 346 aa, Limnobacter sp. MED105
MFNIKTIATAISAGALALSMTSVNAAEITGAGASFPAPVYSKWADAYNKETGNKVNYQSIGSGGGIKQISAKTVDFGASDMPLKPEDLKEKGLMQFPTVIGGVVPVVNLQGVAPGQMKLSAEVLANIYLNKITKWNDKAIVALNPGVNLPDQDISVIRRADGSGTTFIFTNYLSKVSADWKSTVGEGTAVKWPVGLGGKGNEGVSAFVQRVPGSIGYVEYAYAKQNKLTHTQLNNAEGAFVQPSEESFKAAAAGASWDNGFYEILTQQPGKAAWPITGATFILFHTEQADAAKASEVLKFFNWAYAKGDKLSSDLDYVPLPDETVKKIEAAWKTVKATDGKAISMK

SEQ ID NO: 3053 - DNA, 1062 bp, Victivallis vadensis ATCC BAA-548
  CDS (1)..(1062): transl_table=11
atgaaggagcacctgaagattatgaacctgttcggaaaacttgcattgctttccatgttgccgcttgccgccgcatccggggcggatatttcgatcaacggcgcgggcgcgtcgttcccggccccggtttaccgggtctggagctacaacttcggccagtccaccggcgggaagatcgaagtcaactatcagagcagcggttccggcgccggaatcaaccagatcaaggataggaccatcgatttcggcggctccgacaatccgctgaccaaagaggagctggacaaggcgaatctgtgccagttcccgatgctgaccgggggcgtggtggtgatcgcgaatctgcgcggcgtgaaacccggcgcgctgaagctcgatcagccgacgctggccggcatcttcctcggcaggatcacgcgctggaacgatccggccatcgcggcgctgaaccccggggtgaagctgccgaagatcaagatcacggtggtgcgccgttcggacagctcgggcaccagcttcatcttcacgaactacctgtcgaagatttccaaagagtggaacgacacggtcggcgcggggccggcggtcaagtggccggtcggcatcggcggccagaagaatccgggcgtctgcaacaacgtcgcgcgcatcaacggttcgatcggttacaccgaatacacctacgcggtcgaggcgaagctctcgatggtcgcgctgaagaacaaggacggcaacttcgtcgctccgacgccggagaccttcaaggcttccgccgcgaacgccgactggaagaacgcccccggtttctacatggtcctgaccgaccagccgggcgcgcagagctggccgatcaccggtgtgacctacatcctcgtgcagcgcagccagcccgacgcggagaaggcggcggcattgctgaaatacttcgactggtgctacaccgccggggcggtttcggcctccaggctgaactacgtgccgctgactgaaaacgtgatcggacaggtccgggccgcgtgggcggaggagatccgcgcgaacggccggccggtgaaatactga

SEQ ID NO: 3054 - protein, 353 aa, Victivallis vadensis ATCC BAA-548
MKEHLKIMNLFGKLALLSMLPLAAASGADISINGAGASFPAPVYRVWSYNFGQSTGGKIEVNYQSSGSGAGINQIKDRTIDFGGSDNPLTKEELDKANLCQFPMLTGGVVVIANLRGVKPGALKLDQPTLAGIFLGRITRWNDPAIAALNPGVKLPKIKITVVRRSDSSGTSFIFTNYLSKISKEWNDTVGAGPAVKWPVGIGGQKNPGVCNNVARINGSIGYTEYTYAVEAKLSMVALKNKDGNFVAPTPETFKASAANADWKNAPGFYMVLTDQPGAQSWPITGVTYILVQRSQPDAEKAAALLKYFDWCYTAGAVSASRLNYVPLTENVIGQVRAAWAEEIRANGRPVKY

SEQ ID NO: 3055 - DNA, 1032 bp, Ralstonia pickettii 12D
  CDS (1)..(1032): transl_table=11
atgaaactggtcaaaaccgcaatcgctggcgtggctgcactggctttcgccggtgccgcatttgctgttgacatcactggcgcaggcgcaacgttcccggcacccgtctacaacaagtgggcggccgactacaacaaggcgaccaacaccaaggtgaactaccaaggtatcggttcgtcgggcggcatcaagcagatcaccgccaagaccgtcgacttcggcgcatcggacatgccgttgaaggacgaagagctggccaaggatggcctgatccagttcccgacggtgatcggcggcgtggtgcccgtgatcaacctgccgggcgtgaagccgggcgagctgacgctgaatggccaattgctgggtgatatctacctgggcaagatcaagaagtggaacgatccggccatcgccaagctgaacccgaaggccaagctgccggaccaggacatcctggtggtgcgtcgtgctgacggttcgggcacttcattcatcttcacgaactacctgtcgaaggtgaatgccgagtggaagagcaaggtcggcgaaggcacgaccgtgaactggccgacgggtacgggtggcaagggcaacgaaggcgtggccgctttcgtgcagcgtctgggtggcgcagtgggctacgtcgagtacgcctacgccaagcagaacaagatgacgtatgtgaacctgcagaataagtcgggtgccgtggtgaaaccgaccgcagaagccttcaaggccgcagccgctggcgccgagtggagcaagtcgtactaccagatcctgacggacgaaccgggtaaggacgcatggccgatcgctggtgccacgttcatcctgctgcacaagacgcaagccaagccggagcagggcgctgaagtcatgaagttcttcgactgggcctacaagggtggtgacgacgccgccaagagcctggactacgtgccgctgccggacgctgtgaagaaccagatccgcgcaacgtggaagtcgagcgtgaaggatgcatcgggcaaggttgtctacaactaa

SEQ ID NO: 3056 - protein, 343 aa, Ralstonia pickettii 12D
MKLVKTAIAGVAALAFAGAAFAVDITGAGATFPAPVYNKWAADYNKATNTKVNYQGIGSSGGIKQITAKTVDFGASDMPLKDEELAKDGLIQFPTVIGGVVPVINLPGVKPGELTLNGQLLGDIYLGKIKKWNDPAIAKLNPKAKLPDQDILVVRRADGSGTSFIFTNYLSKVNAEWKSKVGEGTTVNWPTGTGGKGNEGVAAFVQRLGGAVGYVEYAYAKQNKMTYVNLQNKSGAVVKPTAEAFKAAAAGAEWSKSYYQILTDEPGKDAWPIAGATFILLHKTQAKPEQGAEVMKFFDWAYKGGDDAAKSLDYVPLPDAVKNQIRATWKSSVKDASGKVVYN

SEQ ID NO: 3057 - DNA, 990 bp, Hydrogenivirga sp. 128-5-R1-1
  CDS (1)..(990): transl_table=11
atgagaagactgatggcgggtatgggcatgctgagcgcaaccctcttcgccggggagaccataaacggagccggtgccacctttccctaccccctttacgccaagtgggcgtatctctactacaaggaaacgggtgtcaggctcaactaccagtccataggttccggaggcggtgtcagacagataattaacaggacggttgacttcggtgcctccgatgcacctctcaaaccggaggaaaccaagaagcacaagctcgcccagttccccactgtggttggaggtgtggttatctcctacaacctgcccatcaaggagctcaagctcagcaccgaggctgtgtgcggcatctttctgggtaaagtgaagtactgggacgacccccttgtgaagaagcataatccgaaggcgaaactaccccacaggaagataaccgtcataaggaggtctgatggttcgggaacgacctggatattcaccaactaccttgcgaaggcatgccctgaatggaagaagaaggtcgggtacggcaaggctgtgaactggcccacaggtataggtgccaagggaaacgaaggggtggctaattacctcaggagggtcagaggaggtataggctacgtagagttcgcctacgcccttgagaacaggctgaaggttgcaacccttcagaacagagagggaagtttcgtcaagccctccatagagacctttcaggcggcagctgcaggagcgaagtgggatcccaagagggacttttacgaggttctcacctggcagaaggggaagagggcttacccgatagctggtgccacattcatactcctcgcaaaggactaccctaaggataggaacaggaaggtcgtaaagttctttgactgggctttcaagaagggcgataagatcgccaccgagctccactacgttccactgccgaagaaggttaaggagagcataagggactactggcgggctaacggttggtattga

SEQ ID NO: 3058 - protein, 329 aa, Hydrogenivirga sp. 128-5-R1-1
MRRLMAGMGMLSATLFAGETINGAGATFPYPLYAKWAYLYYKETGVRLNYQSIGSGGGVRQIINRTVDFGASDAPLKPEETKKHKLAQFPTVVGGVVISYNLPIKELKLSTEAVCGIFLGKVKYWDDPLVKKHNPKAKLPHRKITVIRRSDGSGTTWIFTNYLAKACPEWKKKVGYGKAVNWPTGIGAKGNEGVANYLRRVRGGIGYVEFAYALENRLKVATLQNREGSFVKPSIETFQAAAAGAKWDPKRDFYEVLTWQKGKRAYPIAGATFILLAKDYPKDRNRKVVKFFDWAFKKGDKIATELHYVPLPKKVKESIRDYWRANGWY

SEQ ID NO: 3059 - DNA, 1122 bp, Microcystis aeruginosa PCC 7806
  CDS (1)..(1122): transl_table=11
atgcccagcagaaacaagaccaatttactaacagccttatccctagcgactctaacagcgactttaaccgcttgtggtggcggcgatacggcgggaaccagcggagagggaagcaatagaatcgcccaggttcctctgcaaggagaggtcgccctcaatggcgcgggagcttcttttcctgcacccctatatcaaaactggtttgtcaccatcaatcaactattttctaaactgctaattaactatcaatctaccggtagcggggcgggagtcgaacaatttattcaaggtacgatcgattttggcgcttccgatgtggccatgagtgacgaggatatggccagagttagccgcggggttttactgctaccgatgacggcgggaagcatcgttatggcttataatttgcccggagtagaagggctgaaactaagtagagaagcctatgtaggcatctttttaggcacgattacccgttggaacgatgccaaaattgccgccgataaccccgatttaaaactacccaatcaagaaattaccgtagttcaccgggcagacggtagcgggacaacgggagtttttactaagtttttaagcgccgttagtcccgaatggaaaaaaagcatcggtgaaggaaaagccgtacaatggccgaccaaaaaaggtaaatttcttggcggtagaggcaatgagggtgtaactgccctaattcaacaaaatcaaggctcgatcggttatatcgagtacggtttcgctaaaaataataacctgcccatggccgccctgcaaaatcaggcgggtaaatttgtcattcccgatgaaaccaacgccgctgctaccctcgctaacgttgaactgcctgaaaatttacgcgcttttatcgtcgatccgccgggggaaaattcctatcccattgtcacctatacctggatgttggtttacaaaaaatacaacgatccccaaaaagctttagctatggaggcgatgatcgaatttggacttaaccaaggacaagaacaagcagctccccttggttatattcccctgccgaaaaacgtccgggaacgagtagccgccgctgccgatgtcatctatcctgattacacgatcaaggtggattag

SEQ ID NO: 3060 - protein, 373 aa, Microcystis aeruginosa PCC 7806
MPSRNKTNLLTALSLATLTATLTACGGGDTAGTSGEGSNRIAQVPLQGEVALNGAGASFPAPLYQNWFVTINQLFSKLLINYQSTGSGAGVEQFIQGTIDFGASDVAMSDEDMARVSRGVLLLPMTAGSIVMAYNLPGVEGLKLSREAYVGIFLGTITRWNDAKIAADNPDLKLPNQEITVVHRADGSGTTGVFTKFLSAVSPEWKKSIGEGKAVQWPTKKGKFLGGRGNEGVTALIQQNQGSIGYIEYGFAKNNNLPMAALQNQAGKFVIPDETNAAATLANVELPENLRAFIVDPPGENSYPIVTYTWMLVYKKYNDPQKALAMEAMIEFGLNQGQEQAAPLGYIPLPKNVRERVAAAADVIYPDYTIKVD

SEQ ID NO: 3061 - DNA, 1041 bp, Escherichia albertii TW07627
  CDS (1)..(1041): transl_table=11
atgaaagttatgcgtaccaccgtcgcaactgttgtcgccgcgaccttatcgatgagcgctttctctgtttttgcagaagcaagcctgacaggcgcaggtgcaacattccctgcgccggtgtatgccaaatgggctgacacttaccagaaagaaaccggtaataaagttaactaccagggtatcggttcttccggtggcgtaaaacagattatcgctaacaccgtagattttggtgcgtctgatgcgccgctgtctgacgaaaaactggcccaggaaggtctgttccagttcccgaccgtgattggcggcgtggtgctggcggttaacctgccgggtctgaaatctggtgaactggtgctggatggtaaaaccctcggcgatatctatctgggtaaaatcaaaaagtgggatgatgaagctatcgtcaaattgaacccgggtctgaaattgccttcacagaacattgctgtggtgcgccgcgctgatggctccggtacatccttcgtcttcaccagctatctggcaaaagtgaacgaagagtggaaaaacaaagtcggttctggctctaccgtaaactggccgacgggactgggtggtaaaggtaacgatggtatcgctgcgtttgttcagcgtctgcctggggcgattggttacgttgaatatgcttacgccaagcagaacaacctcgcctacaccaaactgatctccgctgatggtaaacctgtcgccccgactgaagaaaacttcgcgaatgcggcaaaaggcgcagactggagcaaaacatttgctcaggatctgactaaccagaaaggcgaagatgcgtggcctatcacctctaccacgttcattctggtccacaaagatcagaagaaaccagagcagggcgtagaagtgctgaagttcttcgactgggcgtacaaaaccggggctaaacaggcgaacgacctggattatgccagcctgccggagagcgtcgttgaacaggttcgcgctgcgtggaagaccaatattaaagacagtagcggtaagccgctgtactaa

SEQ ID NO: 3062 - protein, 346 aa, Escherichia albertii TW07627
MKVMRTTVATVVAATLSMSAFSVFAEASLTGAGATFPAPVYAKWADTYQKETGNKVNYQGIGSSGGVKQIIANTVDFGASDAPLSDEKLAQEGLFQFPTVIGGVVLAVNLPGLKSGELVLDGKTLGDIYLGKIKKWDDEAIVKLNPGLKLPSQNIAVVRRADGSGTSFVFTSYLAKVNEEWKNKVGSGSTVNWPTGLGGKGNDGIAAFVQRLPGAIGYVEYAYAKQNNLAYTKLISADGKPVAPTEENFANAAKGADWSKTFAQDLTNQKGEDAWPITSTTFILVHKDQKKPEQGVEVLKFFDWAYKTGAKQANDLDYASLPESVVEQVRAAWKTNIKDSSGKPLY

SEQ ID NO: 3063 - DNA, 1035 bp, Burkholderia ambifaria IOP40-10
  CDS (1)..(1035): transl_table=11
atgaaattgatgcaaaccgcgattgccggcctggctggcgcgcttttcgccgttgccgcgcacgctgccgacatcacgggcgcaggtagcacgttcgccatgccgatctatacgaaatgggctgccgactaccagcagtccggcggcgcgaaggtgaactaccagggtatcggttcgtcgggcggcctgaagcagatcaacgcgaagacggtcgattttgccggttcggacgctccgctgaaggatgaagagctcgcgaaggaaggcctgttccagttcccgacggtggtcggcggcgtggtgccggtagtcaacgtgccgggcgtgaaggccggcgaactgacgctgtcgggcccggtgctcggcgacatctacctcggcaagatcaagaagtggaacgatccggcgatcgtcgcactgaacccgaaggtcaagctgccggacacggacatcgcggtcgttcgccgcgctgacggctcgggcacgagcttcatctggacgaactacctgtccaaggtgaacgacgagtggaagtcgaaggtcggcgaaggcacgacggtcaactggccgacgggcacgggcggcaagggcaacgacggcgtcgcggccttcgtgcagcgcctgccgggcgcggtcggctacgtcgagtgggcgtacgcgaagaagaacaacatggtctacaccgcgctgaagaattcgacgggcacggtggtcgagccgaagacggaaacgttcaaggccgctgctgcgggcgcgaactggtcgaagtcgttctaccagatcctgacgaaccagccgggcaaggaagcatggccggtcgtcggcgcgacgttcgtgctgctgcacgcgaagcaggacaagccggagcagggcgccgaaacgctgaagttcttcagctgggcgttcaagaacggcgagaaggcggctgacagcctggactacatctcgctgccgccggcagtcgaggcggaaatccgcaagcagtggaagacgaaggtcacggacgcatcgggcaagccggtcgccgcggagtaa

SEQ ID NO: 3064 - protein, 344 aa, Burkholderia ambifaria IOP40-10
MKLMQTAIAGLAGALFAVAAHAADITGAGSTFAMPIYTKWAADYQQSGGAKVNYQGIGSSGGLKQINAKTVDFAGSDAPLKDEELAKEGLFQFPTVVGGVVPVVNVPGVKAGELTLSGPVLGDIYLGKIKKWNDPAIVALNPKVKLPDTDIAVVRRADGSGTSFIWTNYLSKVNDEWKSKVGEGTTVNWPTGTGGKGNDGVAAFVQRLPGAVGYVEWAYAKKNNMVYTALKNSTGTVVEPKTETFKAAAAGANWSKSFYQILTNQPGKEAWPVVGATFVLLHAKQDKPEQGAETLKFFSWAFKNGEKAADSLDYISLPPAVEAEIRKQWKTKVTDASGKPVAAE

SEQ ID NO: 3065 - DNA, 1032 bp, Burkholderia graminis C4D1M
  CDS (1)..(1032): transl_table=11
atgaaattgatgcaaaccgtgttcgctggcgtcgctggcgcgttcttcgcgatggccgcaaacgcagcagacatcaccggcgcgggcagcaccttcgcagcaccgatctacacgaagtgggccgacgcctatcagaagtccggcggcggcaaggttaactaccagggcatcggctcgtcgggcggcgtgaagcagatcatcgccaagacggtcgatttcgccggttccgacgctccgctgaaggacgacgaactcgcgaaagacggcctgttccagttcccgacggtggtgggcggcgtggtgccggtcgtcaacgtgccgggcgtgaagccggctgaactggtgctgtcgggcgaagtgctgggcgacatctatctgggcaagatcaagaagtggaacgatccggcgatcgttgcactgaacccgaaggtcaagctgcccgacacggacatcgccgtggtgcgccgcgccgacggttcgggcacgagcttcatctggacgaactacctgtcgaaggtcaacacggaatggaagtcgaaggtcggtgaaggttcgacggtcaactggccgacgggcacgggcggcaagggcaacgacggcgtcgcggctttcgtgcaacgcctgccgggcgcaatcggttacgtcgaatgggcgtacgcgaagcagaaccacatgacctacgtcgcgctgaagaattcgacgggcacggtggtcgagccgaagacggacacgttcaaggcagcggcagcgggcgcggactggtcgaagtcgttctatcagatcctgacgaacgagccgggcaagaacgcatggccgatcgtcggcgcaaccttcgtgctgttgcacacgacgcaggaaaaggcgccgcaaggcagcgaaacgctgaagttcttcgactgggcgttcaagaacggcacgcaggccgcgaacgatctggactacatctcgctgccggaatcggtcgtgtcggaaatcaagacgcagtggaagtcgaaggtgaaggacgcttcgggcaagccgatcgccgagtaa

SEQ ID NO: 3066 - protein, 343 aa, Burkholderia graminis C4D1M
MKLMQTVFAGVAGAFFAMAANAADITGAGSTFAAPIYTKWADAYQKSGGGKVNYQGIGSSGGVKQIIAKTVDFAGSDAPLKDDELAKDGLFQFPTVVGGVVPVVNVPGVKPAELVLSGEVLGDIYLGKIKKWNDPAIVALNPKVKLPDTDIAVVRRADGSGTSFIWTNYLSKVNTEWKSKVGEGSTVNWPTGTGGKGNDGVAAFVQRLPGAIGYVEWAYAKQNHMTYVALKNSTGTVVEPKTDTFKAAAAGADWSKSFYQILTNEPGKNAWPIVGATFVLLHTTQEKAPQGSETLKFFDWAFKNGTQAANDLDYISLPESVVSEIKTQWKSKVKDASGKPIAE

SEQ ID NO: 3067 - DNA, 1035 bp, Burkholderia ambifaria MEX-5
  CDS (1)..(1035): transl_table=11
atgaaattgatgcaaaccgcgattgccggcctggctggcgcgcttttcgccgttgccgcgcacgctgccgacatcacgggcgcaggcagcacgttcgccatgccgatctatacgaaatgggctgccgactaccagcagtccggcggcgcgaaggtgaactaccagggtatcggttcgtcgggcggcctgaagcagatcaacgcgaagacggtcgattttgccggttcggacgctccgctgaaggatgaagagctcgcgaaggaaggcctgttccagttcccgacggtggtcggcggcgtggtgccggtcatcaacgtgccgggcgtgaaggccggtgaactgacgctgtcgggcccggtgctcggcgacatctacctcggcaagatcaagaagtggaacgatccggcgatcgctgcactgaacccgaaggtcaagctgcccgacacggacatcgcggtcgttcgccgcgctgacggctcgggcacgagcttcatctggacgaactacctgtccaaggtgaacgacgagtggaagtcgaaggtcggcgaaggcacgacggtcaactggccgacgggcacgggcggcaagggcaacgacggcgtcgcggccttcgtgcagcgcctgccgggcgcggtcggctacgtcgagtgggcgtacgcgaagaaaaacaacatggtctacaccgcgctgaagaattcgacgggcacggtggtcgagccgaagacggaaacgttcaaggccgctgcggctggcgcgaactggtcgaagtcgttctaccagatcctgacgaaccagccgggcaaggaagcatggccggtcgtcggcgcgacgttcgtgctgctgcacgcgaagcaggacaagccggagcagggcgccgaaacgctgaagttcttcagctgggcgttcaagaacggcgagaaggcggccgacagcctggactacatctcgctgccgccggcagtcgaggcggaaatccgcaagcagtggaagacgaaggtcacggacgcatcgggcaagccggtcgccgcggagtaa

SEQ ID NO: 3068 - protein, 344 aa, Burkholderia ambifaria MEX-5
MKLMQTAIAGLAGALFAVAAHAADITGAGSTFAMPIYTKWAADYQQSGGAKVNYQGIGSSGGLKQINAKTVDFAGSDAPLKDEELAKEGLFQFPTVVGGVVPVINVPGVKAGELTLSGPVLGDIYLGKIKKWNDPAIAALNPKVKLPDTDIAVVRRADGSGTSFIWTNYLSKVNDEWKSKVGEGTTVNWPTGTGGKGNDGVAAFVQRLPGAVGYVEWAYAKKNNMVYTALKNSTGTVVEPKTETFKAAAAGANWSKSFYQILTNQPGKEAWPVVGATFVLLHAKQDKPEQGAETLKFFSWAFKNGEKAADSLDYISLPPAVEAEIRKQWKTKVTDASGKPVAAE

SEQ ID NO: 3069 - DNA, 1041 bp, Escherichia coli 53638
  CDS (1)..(1041): transl_table=11
atgaaagttatgcgtaccaccgtcgcaactgttgtcgccgcgaccttatcgatgagtgctttctctgtgtttgcagaagcaagcctgacaggtgcaggtgcaaccttccctgcgccggtgtatgccaaatgggctgacacttaccagaaagaaaccggtaataaagttaactaccagggtatcggttcttccggtggcgtaaaacagattatcgctaataccgttgattttggtgcctctgacgcgccgctgtctgacgaaaaactggctcaggaaggtctgttccagttcccgaccgtgattggcggcgtggtgctggcggttaacattccagggttgaagtctggcgagctggtgctggatggtaaaaccctcggcgacatctacctcggcaaaatcaagaagtgggatgatgaagccatcgccaaactgaatccggatctgaaactgccttcacagaacattgctgtagtacgccgcgcagatggctccgggacttccttcgtcttcaccagctacctggcgaaagtgaatgaagagtggaaaaacaacgttggtactggctctaccgtaaaatggccgatcggtctgggtggtaaaggtaacgacggtatcgctgcgttcgttcagcgtctgccgggtgcaattggttacgttgaatatgcttatgcgaagcaaaacaacctggcgtacaccaaactgatctccgctgatggtaaacctgttttgccgactgaagaaaacttcgctaatgcagcaaaaggtgcagactggagcaaaaccttcgctcaggatctgaccaaccagaaaggcgaagatgcatggcctattacctctaccacgttcattttggtccacaaagatcagaagaaaccagagcagggtgtagaagtcctgaagttcttcgactgggcgtataaaaccggggctaaacaggcaaatgacctggattacgccagcctgccggatagcgtagtggaacaggttcgcgctgcgtggaagaccaatattaaagacagtagcggtaagccgctgtactaa

SEQ ID NO: 3070 - protein, 346 aa, Escherichia coli 53638
MKVMRTTVATVVAATLSMSAFSVFAEASLTGAGATFPAPVYAKWADTYQKETGNKVNYQGIGSSGGVKQIIANTVDFGASDAPLSDEKLAQEGLFQFPTVIGGVVLAVNIPGLKSGELVLDGKTLGDIYLGKIKKWDDEAIAKLNPDLKLPSQNIAVVRRADGSGTSFVFTSYLAKVNEEWKNNVGTGSTVKWPIGLGGKGNDGIAAFVQRLPGAIGYVEYAYAKQNNLAYTKLISADGKPVLPTEENFANAAKGADWSKTFAQDLTNQKGEDAWPITSTTFILVHKDQKKPEQGVEVLKFFDWAYKTGAKQANDLDYASLPDSVVEQVRAAWKTNIKDSSGKPLY

SEQ ID NO: 3071 - DNA, 1044 bp, Providencia stuartii ATCC 25827
  CDS (1)..(1044): transl_table=11
atgaaaatgatgcgtacaaccttagctagcgtaatggcagcaaccctttcaatgactgcaatgtcttcttttgctgccacaagcttaactggcgcgggtgcaacattccctgctccagtttatgctaagtgggcggactcttatcagaaagaaacaggtaataaagtgaactatcaggggattggctcttctggtggtgttaaacaaattaatgcaaaaacggttgatttcggtgcgtctgatgcgccattaaccgatgaaaaattgaaagaagatggcctattccagttcccaaccgtaatcggtggtgtggtactggcggttaacgtaaaaggtatccagtcaggtcaattgacattagacggtacaacattaggtgatatctaccttggtaaaatcaccaaatggaatgatcctgccatcgctaaattgaacccaggtgttaacttacccgatcaaaacattgcagtggtaagacgctctgatggctcaggtacgacgttcgtatttacgagctacttatcaaaagtcagctcaagctggaaaaatgatattggtgcaggctctacagtaaactggccgaaaaacaacgtcgcaggtaaaggtaacgatggcgttgcagctttcgtccagcgtttaccaggctctatcggttatgtggagtatgcctatgcgaaacagaataaccttgcttatactaaactcatttccgcagatggtaaggttgtttccccaacaggtgaaagcttcagcgcagcagcgaagaaagttgactggtctaagtcattcgctcaagacctgactaaccgtaatggtgagaacgcatggccaattacctcaaccacgtttatcttagttcacaaagatcaagcgaatgcagaaaaaggaaaagctgtgctcgatttctttaactgggcttatgagaaaggtggtcagcaagcagaagcattggattatgctatccttcctcaagaagttgtgacagcaattcgtgcagcatggaaaacagaagtcaaagatagccaaggcaaaccactgttctaa

SEQ ID NO: 3072 - protein, 347 aa, Providencia stuartii ATCC 25827
MKMMRTTLASVMAATLSMTAMSSFAATSLTGAGATFPAPVYAKWADSYQKETGNKVNYQGIGSSGGVKQINAKTVDFGASDAPLTDEKLKEDGLFQFPTVIGGVVLAVNVKGIQSGQLTLDGTTLGDIYLGKITKWNDPAIAKLNPGVNLPDQNIAVVRRSDGSGTTFVFTSYLSKVSSSWKNDIGAGSTVNWPKNNVAGKGNDGVAAFVQRLPGSIGYVEYAYAKQNNLAYTKLISADGKVVSPTGESFSAAAKKVDWSKSFAQDLTNRNGENAWPITSTTFILVHKDQANAEKGKAVLDFFNWAYEKGGQQAEALDYAILPQEVVTAIRAAWKTEVKDSQGKPLF

SEQ ID NO: 3073 - DNA, 1053 bp, Bacteroides coprocola DSM 17136
  CDS (1)..(1053): transl_table=11
atgaaaaaacattatttgcctttggtggcaggtataatggctattgccgttactgcatgtggtggacaaaaatcatcaactgaatctgtagaattaactggtgcgggagcaactttcccattacctttctataacatgagctttgaaggatatggtgctacacacgataataaagtttcttatggtggcattggtagtggtggtggagtacgtaacctgaaagatggtatcgtagactttgccggaagtgatgctttcttgagcgataaggaaatgtcagaaatggaacctgtagtacacatcccgacatgtatgggagctgtggtattggcctacaatttaccggatgtagttaaattgaacttgtcgggtgatgttattgctgatatttatgctggaaagataacagactggaatgatgcacgtttgcaggaactgaatccggatgtgaaattgcctgcaaagaagataattcttgcatatcgttcggatggtagcggtacaacatttgtatttaccgattatttgtctaaagtcagcgaaagctggaaaaatactttcggatcaggtaaaacagtggatttccctgtcggacaggctgcaaaaggtaatccgggtgtagctggtatcattgcacagactccgtattcattgggatatattggttctgaatatgctttcgcacagaaaattccttatgcagctgtaaagaaccagcgtggtgagctgatcactccgtctacagaaagtatctcggctgctgccggtgatattcctcaggacactcgttgttctataaccaatgccgatgcagcaggagcttatcctatcagctgttttacctggttgctgatttacaaggaacagaattattcagaccgttcggaagcacaggctaaagctacgctggatttgatgcaatatatgttaagcgacagcgtacagcagactactgctaccgtacactatgctccgctgcctaagaaagctgttgaacaaagtctggcaaaccttaagactgttacttatcagggacagccgattctgaaataa

SEQ ID NO: 3074 - protein, 350 aa, Bacteroides coprocola DSM 17136
MKKHYLPLVAGIMAIAVTACGGQKSSTESVELTGAGATFPLPFYNMSFEGYGATHDNKVSYGGIGSGGGVRNLKDGIVDFAGSDAFLSDKEMSEMEPVVHIPTCMGAVVLAYNLPDVVKLNLSGDVIADIYAGKITDWNDARLQELNPDVKLPAKKIILAYRSDGSGTTFVFTDYLSKVSESWKNTFGSGKTVDFPVGQAAKGNPGVAGIIAQTPYSLGYIGSEYAFAQKIPYAAVKNQRGELITPSTESISAAAGDIPQDTRCSITNADAAGAYPISCFTWLLIYKEQNYSDRSEAQAKATLDLMQYMLSDSVQQTTATVHYAPLPKKAVEQSLANLKTVTYQGQPILK

SEQ ID NO: 3075 - DNA, 1029 bp, Geobacter sp. M21
  CDS (1)..(1029): transl_table=11
atgattcagcagataaaaaaagcattcctggcactggcactcgtggcgactgttggcgccgcgggccaggcatccgcggcaaccctggttaacggcgcaggcgccaccttcccgtatcccctttactccaagtggttcagcgagtacgccaaggtggacagaagcgtcaagttcaactaccaatccatcggcagcggcggcggcatcaagcagatcaccgctcagaccgtcgacttcggcgccagcgacaagttcctctcggacaaggaactgagcgcggccccgggcaaactccttcacatcccgaccgtcatgggtgccgtcgtagtaacctacaacgttccgggggtcccctccgggatcaagctcaactccgaggacgtggccaacatctacctcggtaagatcaccatgtggaacgacaagaggatcgcagacgacaacaaggggatcaacctcccggccaagccgatcatcgtcgttcaccgctccgacggcagcggcaccaccagcatcttcacggactacctggccggggtcaacgcggagtgggcaaatagggtcggcaagggcgcttcggtcaagtggccggtaggcctgggcggcaagggtaacgaaggtgtcgcgggacagatcaagaccaccccctacagcatcggctacgtcgaactcgcctacgccttcgagaacaagctccccttcgcctccctgaaaaacggcgccggcgtcttcgtgtctccgtccatcaagtccaccagcgcagcggcggcagcagcgctgaagaagatgcccgccgattaccgcatctcgctggtgaaccagcccggcaaggacgcctacccggtggtcggcttcacttggctgctcgtttacgagaagcagaaggatgccatcaaaggcaagaagctggtcgagttcctgaactggagcatgaccaaagggcagaagatggcggcccccatgctgtacgcgccgcttccgggcagcgttgtgaagatggttcagaagaccatcaagaccatcaagtaa

SEQ ID NO: 3076 - protein, 342 aa, Geobacter sp. M21
MIQQIKKAFLALALVATVGAAGQASAATLVNGAGATFPYPLYSKWFSEYAKVDRSVKFNYQSIGSGGGIKQITAQTVDFGASDKFLSDKELSAAPGKLLHIPTVMGAVVVTYNVPGVPSGIKLNSEDVANIYLGKITMWNDKRIADDNKGINLPAKPIIVVHRSDGSGTTSIFTDYLAGVNAEWANRVGKGASVKWPVGLGGKGNEGVAGQIKTTPYSIGYVELAYAFENKLPFASLKNGAGVFVSPSIKSTSAAAAAALKKMPADYRISLVNQPGKDAYPVVGFTWLLVYEKQKDAIKGKKLVEFLNWSMTKGQKMAAPMLYAPLPGSVVKMVQKTIKTIK

SEQ ID NO: 3077 - DNA, 1041 bp, Shigella dysenteriae 1012
  CDS (1)..(1041): transl_table=11
atgaaagttatgcgtaccaccgtcgcaactgttgtcgccgcgaccttatcgatgagcgctttctctgtgtttgcagaagcaagcctgacaggtgcaggtgcaaccttccctgcgccggtgtatgccaaatgggctgacacttaccagaaagaaaccggtaataaagttaactaccagggtatcggttcttccggtggcgtaaaacagattatcgctaataccgttgattttggtgcctctgacgcgccgctgtctgacgaaaaactggctcaggaaggtctgttccagttcccgaccgtgattggcggcgtggtgctggcggttaacattccagggctgaagtctggcgaactggtgctggatggtaaaaccctcggcgacatctacctgggcaaaatcaagaagtgggatgatgaagccatcgccaaactgaatccgggtctgaaactgccttcacaaaacattgctgtagtacgccgcgcagatggctccgggacttccttcgtcttcaccagctacctggcgaaagtgaacgaagagtggaaaaacaacgttggtactggctctaccgtaaaatggccgatcggtctgggcggtaaaggtaacgacggtatcgccgcgttcgttcagcgtctgccgggtgcaattggttatgttgaatatgcttacgcgaagcagaacaacctggcgtacaccaaactgatctccgttgatggtaaaccggttagtccgaccgaagaaaacttcgctaatgcagcaaaaggtgcagactggagcaaaaccttcgctcaggatctgaccaaccagaaaggcgaagatgcatggcctattacctctaccacgttcattctgatccacaaagatcagaagaaaccagaacaaggcacagaagtgctgaaattcttcgactgggcgtacaaaaccggggctaaacaggcgaacgacctggattacgccagcctgccggatagtgtagttgaacaggttcgcgctgcgtggaagaccaatattaaagacagtagcggtaagccgctgtactaa

SEQ ID NO: 3078 - protein, 346 aa, Shigella dysenteriae 1012
MKVMRTTVATVVAATLSMSAFSVFAEASLTGAGATFPAPVYAKWADTYQKETGNKVNYQGIGSSGGVKQIIANTVDFGASDAPLSDEKLAQEGLFQFPTVIGGVVLAVNIPGLKSGELVLDGKTLGDIYLGKIKKWDDEAIAKLNPGLKLPSQNIAVVRRADGSGTSFVFTSYLAKVNEEWKNNVGTGSTVKWPIGLGGKGNDGIAAFVQRLPGAIGYVEYAYAKQNNLAYTKLISVDGKPVSPTEENFANAAKGADWSKTFAQDLTNQKGEDAWPITSTTFILIHKDQKKPEQGTEVLKFFDWAYKTGAKQANDLDYASLPDSVVEQVRAAWKTNIKDSSGKPLY

SEQ ID NO: 3079 - DNA, 1185 bp, Cyanothece sp. PCC 7822
  CDS (1)..(1185): transl_table=11
atgcttaatcaaaagaatttaagaacctcacctagagacctaataaattttatatctatacttgctttaagcatcagtttaggcgcttgtggcagtgccaataatacagcagacacaggacaaggacaaggacaaagcggtacagccgaacaaactcctgctgctgccggaggagactctctagccaaagccttagccttagctcaaccggttagactaaccggtgccggggcatcttttccctatcccctctattccaactggtttgtacagctaaaccaagaagtgcctgatttacaggtgaattatcaatcagtgggaagtggtgcaggcgttgaacagttcatccaaggaaccatcaactttggggcgagtgacgtggccatgaaagatgaagaaattgccaaagtgcagcgaggcgtgttaaccttacccatgaccgccggggcgatcgtgctggcttataatattcccggggttcaaggagaactaaaattaagtcgagatacttatgtgggcatctttttaggagagatcactaactggaacgatccgaaaattgctaaagataacccggatgtaaaattacccgatttacccattaccgtagtgcatcgggctgatggaagcggcacaacagccgtatttactcaacatttaagtgctatcagtgacaattggaaatccaaaataggggcaggtaaaaccgtacaatggcccaaaaccggtaaatttatcggcgcaaaaggaaatgaaggcataaccgcatcaattcaacaaaatcaaggctccattggctatgtagaagctggctatgccaagaacaataaattaagcgtggcttccttacaaaataaagccggacaatttgttgcccccaccgaagaatcagaagccgctaccttagcatctgtaactctgcctgaaaatttacgagcatttattaccgatcctgaaggagaaaaatcttatcccattgttacctacacttggatgctagtctacaaaaaatatgacgatcccaatattgccaaaggcatagaagggatgattcaatatggattgactcaaggacaaaaatcgagtgcagaactcggttatattcccctacctcaaaacgtcgtggaaaaagtagcggcggcggctgatcaaattagccccgattttcaaattaaggtcaaataa

SEQ ID NO: 3080 - protein, 394 aa, Cyanothece sp. PCC 7822
MLNQKNLRTSPRDLINFISILALSISLGACGSANNTADTGQGQGQSGTAEQTPAAAGGDSLAKALALAQPVRLTGAGASFPYPLYSNWFVQLNQEVPDLQVNYQSVGSGAGVEQFIQGTINFGASDVAMKDEEIAKVQRGVLTLPMTAGAIVLAYNIPGVQGELKLSRDTYVGIFLGEITNWNDPKIAKDNPDVKLPDLPITVVHRADGSGTTAVFTQHLSAISDNWKSKIGAGKTVQWPKTGKFIGAKGNEGITASIQQNQGSIGYVEAGYAKNNKLSVASLQNKAGQFVAPTEESEAATLASVTLPENLRAFITDPEGEKSYPIVTYTWMLVYKKYDDPNIAKGIEGMIQYGLTQGQKSSAELGYIPLPQNVVEKVAAAADQISPDFQIKVK

SEQ ID NO: 3081 - DNA, 1140 bp, Microcoleus chthonoplastes PCC 7420
  CDS (1)..(1140): transl_table=11
atggtgttccgtctcgctttcatcaatccagctcgtttagttcgttcagtttctgtgctagttctagccgttagcttagcggcgtgtggagggcagcaagaggctgacacaggtggagaaaccgatcaaactgacatgggtgcgggtgatgacaaactcgccctcgctgaacctgtagcgctaaccggtgctggtgcatcgttccccgccccgatctatcagcgttggttccaagaactcaacagtcaatatcccaaactgcaggttaactatcaatccgtcggcagtggtgctggtgtggaacagtttactcaaggtacggtagacttcggcgctagtgatgtggcaatgaaggatgaagaaatcgcggaagtcgatagaggtgttctgatgctgccgatgacagcgggtagtatcgtactggcatacaacctagaaggtgtagaagaattgaaactgccacgggatgtgtatgtggatattcttctgggtaatattaccaactggaatgacccagcaattgcggcggcaaacgaaggtgtagagttgcccgatcagtcgattaccgtgattcatcgttccgatggcagtggtaccacaggtgtctttacaaaacacctgagtgcgattagtccggagtgggaagagcaagttggcgaaggcaaaaccgtcgagtggcccaccggggttggcgcaaagggaaatgaaggggttacggctcagattcaacaaaccgatggtgcgatcggttatgttgaatacggctacgccaagaataatgaccttaactttgctgctttagaaaaccaatcgggtaattttgtcacgcccagtgatgaatcggcgtctaaaaccttagaagcggttacattaccggaaaatctgcgggcatttatttctgatcctgaaggcgaggaatcctatcccattgttacttatacttggcttttggcttaccaagagtatgatgatccggagacggcgaaatccatagaagcaacaattgagtatatgttgaccgaaggtcaagaaattgccccagagttaggctatgtgaaactgccgcccaatgtgcgggaaaaagtggcagaggcagctgatgtgattagcgacgagtatgacattgaggtgagtgaatag

SEQ ID NO: 3082 - protein, 379 aa, Microcoleus chthonoplastes PCC 7420
MVFRLAFINPARLVRSVSVLVLAVSLAACGGQQEADTGGETDQTDMGAGDDKLALAEPVALTGAGASFPAPIYQRWFQELNSQYPKLQVNYQSVGSGAGVEQFTQGTVDFGASDVAMKDEEIAEVDRGVLMLPMTAGSIVLAYNLEGVEELKLPRDVYVDILLGNITNWNDPAIAAANEGVELPDQSITVIHRSDGSGTTGVFTKHLSAISPEWEEQVGEGKTVEWPTGVGAKGNEGVTAQIQQTDGAIGYVEYGYAKNNDLNFAALENQSGNFVTPSDESASKTLEAVTLPENLRAFISDPEGEESYPIVTYTWLLAYQEYDDPETAKSIEATIEYMLTEGQEIAPELGYVKLPPNVREKVAEAADVISDEYDIEVSE

SEQ ID NO: 3083 - DNA, 1017 bp, Cyanobium sp. PCC 7001
  CDS (1)..(1017): transl_table=11
atggccgcgaccagtttcgtggcttccatgtccttcgtgaagaaggtctccatctgtggcacggtctccgctgccctggccagcatcaccgccgcaacgtccgtgctggcaagctccaccctcaacggtgctggtgccagtttccccgcccccttctatcaggcggccttcgcctcggcggccggcaagggtatccgtgtcaattaccagtcggtgggctccggcgccggtgtccgtcaattcgtggcgggcacggtggacttcggcgccaccgatgaaccgatcaaacccgccgaagccgccaaggtgaagcgcggcgtggtgcagttccccgccgtgggcggcaccatcgccatcgcctacaacaacccgggctgcaaagggctcaaattgagccagaagcaggcagtggatgtgttcctgggcaagatcaaggcctgggagcagctcaagtgcggcaagggcaagatcaacgtggtgcaccgctccgatggcagcggcaccaccttcgccttcaccaattccctctccgccttctccccggagtggaagagaaaggtgggtgagggcaagagcgtgaagtggcccttgggcgtgggcggcaagggcaacgagggagtggccggcatcctcagcaacaccccgggttcgatcggctacgtgaaccaggcctacgtgaggggcaagctcaaggccgccgcgctgcagaacaaggcgggcaggtatgtgctgcccagtgtgaaatccggagctgcggcgctgaacaacatccgcctcgacggcaacctcgccggtgaggatcccaaccccgccggagccgagagctatcccatctccaccctcacctggatcctggcctaccagagcggaaacggcgccagggccgccgggatccgcaaggcgatgaaccacctgctggggcctgcccagagcagggccgatgacctgggctacgtgcccctgcggggcagcgttctcaacgcggcccgcaaagcggtggggcggatcggctcctaa

SEQ ID NO: 3084 - protein, 338 aa, Cyanobium sp. PCC 7001
MAATSFVASMSFVKKVSICGTVSAALASITAATSVLASSTLNGAGASFPAPFYQAAFASAAGKGIRVNYQSVGSGAGVRQFVAGTVDFGATDEPIKPAEAAKVKRGVVQFPAVGGTIAIAYNNPGCKGLKLSQKQAVDVFLGKIKAWEQLKCGKGKINVVHRSDGSGTTFAFTNSLSAFSPEWKRKVGEGKSVKWPLGVGGKGNEGVAGILSNTPGSIGYVNQAYVRGKLKAAALQNKAGRYVLPSVKSGAAALNNIRLDGNLAGEDPNPAGAESYPISTLTWILAYQSGNGARAAGIRKAMNHLLGPAQSRADDLGYVPLRGSVLNAARKAVGRIGS

SEQ ID NO: 3085 - DNA, 1077 bp, Arthrospira maxima CS-328
  CDS (1)..(1077): transl_table=11
atggttctcaatcgcaaagtccttttagcagtagcctccctaccaatactattgggagcaaccgcctgcgctcccggtccccaagaaggagaaactcgcggccaaaggatatccattagcggcgctggggcgaccttccccgcccccctatttcaacgttggtttgatgcctataaccgccaggtagaccccaacgtacaagttagttatcagtccgtcggaagtggggctggtttagagcagtacatcaatggcacagtagacttcggagccagtgaagcaccaatcacagactccgccactcgcacagaatccttcatcgccgcccacggtcacgatcccattcaacttcccttaaccggagggtttgtttccttctcctataacctacccggagttgagaacctccaactgagactatctcggcaagcctactgtggtatcgtgaccggacagattacccaatggactgatccggcgatcgccgccgataaccccaacctcaatcttcctaacctacccattatcttcgctcatcgttccgacggtagtggaaccacctttgtatttactaaccacatcaatacagtctgtcctgactggcctgctggtgtcggcacctccgtagactggcctataggtattggtggtcaaggaaacgaaggtgtagccgcggccattcagcaaaacgagggagccattggattcctatcttatgcctacgcagccctcaacaacattgactcagctttaatcgaaaaccaagccggaaactttatcaccccatctccagaagcagcagctaaagccttacttgatgaacccgtacccgataactttgctttgctagttcctgacccctccggtgctgagtcttaccccattgtcggtctagtttgggtaatgatctatcaaaactatgaagacgatgccaaatggcaagctctgcgtcaggtttttgaatggtctttaggtccagaaggcagagccttagcagaagaactcctttttgttcccacccccgatcctttagtacaaaggattaaagctgtctttgacaccgtaaatgccaactaa

SEQ ID NO: 3086 - protein, 358 aa, Arthrospira maxima CS-328
MVLNRKVLLAVASLPILLGATACAPGPQEGETRGQRISISGAGATFPAPLFQRWFDAYNRQVDPNVQVSYQSVGSGAGLEQYINGTVDFGASEAPITDSATRTESFIAAHGHDPIQLPLTGGFVSFSYNLPGVENLQLRLSRQAYCGIVTGQITQWTDPAIAADNPNLNLPNLPIIFAHRSDGSGTTFVFTNHINTVCPDWPAGVGTSVDWPIGIGGQGNEGVAAAIQQNEGAIGFLSYAYAALNNIDSALIENQAGNFITPSPEAAAKALLDEPVPDNFALLVPDPSGAESYPIVGLVWVMIYQNYEDDAKWQALRQVFEWSLGPEGRALAEELLFVPTPDPLVQRIKAVFDTVNAN

SEQ ID NO: 3087 - DNA, 1038 bp, Burkholderia sp. H160
  CDS (1)..(1038): transl_table=11
atgaaaacgttggccgccatcatggctgttctgattggctgttcatgcgtagccgcggcttgcgccgccgacattaggggcgccggcagtacgttcgccgcccctctctacacccggtgggccaccgactatcagcggtcgggcggaagcaaagtgatctatcagggcacgggttcctccgacggactcaggcaggtcatcgcccgggcagtcgactttgcaggatcggacgcgccgctgaccgacgatcaactgaccagaaacggcttgcggcaatttccaaccgtgatcggtggcgtggtgccagtcatcaatcttccggggctcaaagccggcgaggtgatgctgacggggccggtcatcgccgacatctttcttggcaagatccagttctgggacgaccccgcgatcgtgcggctgaacccaaagatcaagatgccgaactatccgattgcggtggtgcgtcgccaggatggctcgggcacgacgctgatctggactcactaccttgcgcaggtcagtccggaatggaagcgcagggtcggcgaaggcaccagtgtgcgatggccgctcggcatcggcggcaagggcaacgagggcgtggccacctacgtcggctatctgcccggcgcattaggctatgtcgcatgggatttcacgaaacagaaccgcctgacgtaccttgccctgaccaatgcggcgggttatgtcgttcagcccagcgctacaacgttcaaggcagcggcggcgaacgccgactggtcgggctcgctctctcaattgctgaccaaccagccgggcaaggatgcctggccggtcatgggcgcgacctacgtgctgcttcccgcaacgccggtcaagccgcgccacgacgaagccacattgaagtttttcgactgggcgatgagtcatgacggaccggcgatcaacgcgctggactacatcccgctcccggacccggtcgtgacgaagatccgctcacaatggcccgtcagtgcggacgaaaagtcggcgcacaaagcgctcgtgatcccatga

SEQ ID NO: 3088 - protein, 345 aa, Burkholderia sp. H160
MKTLAAIMAVLIGCSCVAAACAADIRGAGSTFAAPLYTRWATDYQRSGGSKVIYQGTGSSDGLRQVIARAVDFAGSDAPLTDDQLTRNGLRQFPTVIGGVVPVINLPGLKAGEVMLTGPVIADIFLGKIQFWDDPAIVRLNPKIKMPNYPIAVVRRQDGSGTTLIWTHYLAQVSPEWKRRVGEGTSVRWPLGIGGKGNEGVATYVGYLPGALGYVAWDFTKQNRLTYLALTNAAGYVVQPSATTFKAAAANADWSGSLSQLLTNQPGKDAWPVMGATYVLLPATPVKPRHDEATLKFFDWAMSHDGPAINALDYIPLPDPVVTKIRSQWPVSADEKSAHKALVIP

SEQ ID NO: 3089 - DNA, 1038 bp, Burkholderia sp. H160
  CDS (1)..(1038): transl_table=11
atgcggttcaaacgaggattcgcagttcttgctattgctctgctgccgttcgcggccgcgcaagcgcaaaccgttgacatcaccggcgcgggcagcacttttgcggccccgatctacaacaagtgggccgacgcctttcacaaggcgggtggcggcaaggtcaactaccagggcattggttcctcgggcggcatcaagcagatcctcgcgaagactgtcgatttcgcaggctccgacgcgccgatgaaggacgacgaactggcgaagacaggcctgtttcaatttccgacggtggtcggcggcgtagttccggtcgtgaatctgccgggcgtaaagccggggcaacttgttctgtcgggtgcagtgctcggcgacatttatctggacaagatcaagaaatggaacgatccggcgatcgccgcgctgaatccgaatatgaagctgcccgatacggacgtcgccgtggtgcgccgcgccgacggctcgggcacgagcttcatctggacgaactttctgtcgaaggtgaaccccgagtggaagtcgaaggtcggcgaaggcacgacggtgaactggccgaccggaacgggcggcaagggcaatgatggggttgccgccttcgtgcaacgcctgccgggcgcggtcggctatgtcgagtgggcgtatgcgaagcaaaacaacatgatctacaccagcctgaagaattcggcgggtgccgtagttttgccgaagacggaaacctttaaggcggccgcagctggcgcggactggaagacctcgttctaccagattctgacgaacgagccgggcaaggatgcatggccggtcgtcggcgcgacattcgtgttgctgcatgcgacgcaagaaaagccggcacaaggtgcgggaacgctgaagttcttcgactgggcgttcaagaacggcgggcaggctgccagcgagctcgactacatctcgctgccggagtcggtcgtggaggaaatccgttcgcagtggaagacgaagatcaaggacgcttccggaaagccggtgtttcagtga

SEQ ID NO: 3090 - protein, 345 aa, Burkholderia sp. H160
MRFKRGFAVLAIALLPFAAAQAQTVDITGAGSTFAAPIYNKWADAFHKAGGGKVNYQGIGSSGGIKQILAKTVDFAGSDAPMKDDELAKTGLFQFPTVVGGVVPVVNLPGVKPGQLVLSGAVLGDIYLDKIKKWNDPAIAALNPNMKLPDTDVAVVRRADGSGTSFIWTNFLSKVNPEWKSKVGEGTTVNWPTGTGGKGNDGVAAFVQRLPGAVGYVEWAYAKQNNMIYTSLKNSAGAVVLPKTETFKAAAAGADWKTSFYQILTNEPGKDAWPVVGATFVLLHATQEKPAQGAGTLKFFDWAFKNGGQAASELDYISLPESVVEEIRSQWKTKIKDASGKPVFQ

SEQ ID NO: 3091 - DNA, 1032 bp, Burkholderia sp. H160
  CDS (1)..(1032): transl_table=11
atgaaattgatgcaaaccgtgttcgctggcgtcgctggcgcgctcttcgcaatcgcagcgcaagcagcagacatcaccggcgcgggcagcacgttcgcagcaccgatctacacgaagtgggctgacgcttatcagaagtccggcggcggcaaggttaactatcagggtatcggttcgtcgggcggcatcaagcagatcgtcgcgaagaccgtcgatttcgccggttcggacgctccgctgaaggacgacgaactcgcgaaggacggcctgttccagttcccgacggtggtcggcggcgtggtgccggcagtcaacgtgccgggcgtgaagccgggcgaactggtgctgtcgggtgaagtgctcggcgacatctacctgggcaagatcaagaagtggaatgacccggcaatcgccgcgctgaacccgaaggtcaagctgccggatctggacatcgccgtggtgcgccgcgcagacggttcgggtaccagcttcatctggacgaactacctgtcgaaggtcaacccggaatggaagacgaaggtcggtgaaggcaccacggtcaactggccgaccggtacgggcggcaagggcaacgacggtgtcgcggcattcgtgcagcgtctgccgggctcgatcggctatgtggagtgggcgtacgccaagcagaaccacatggactacgtcgcgatgaagaacgagtcgggcgcagtggttcagccgcaaaccgagacgttcaaggcagcggcagctggcgctgactggacgaagtcgttctaccagatcctgacgaacgagccgggcaagaacgcatggccgatcgtcggcgcgacgttcgtgctgctgcacacgacgcaggacaaggcaccgcaaggcgccgagacgctgaagttcttcgactgggcgttcaagaacggcaatcaggctgcgaacgagctggactacatctcgctgccggaatcggtcgtgtcggaaatccgcacgcagtggaagcagaaggtgaaggattcggcaggcaagtcgctcgccgagtaa

SEQ ID NO: 3092 - protein, 343 aa, Burkholderia sp. H160
MKLMQTVFAGVAGALFAIAAQAADITGAGSTFAAPIYTKWADAYQKSGGGKVNYQGIGSSGGIKQIVAKTVDFAGSDAPLKDDELAKDGLFQFPTVVGGVVPAVNVPGVKPGELVLSGEVLGDIYLGKIKKWNDPAIAALNPKVKLPDLDIAVVRRADGSGTSFIWTNYLSKVNPEWKTKVGEGTTVNWPTGTGGKGNDGVAAFVQRLPGSIGYVEWAYAKQNHMDYVAMKNESGAVVQPQTETFKAAAAGADWTKSFYQILTNEPGKNAWPIVGATFVLLHTTQDKAPQGAETLKFFDWAFKNGNQAANELDYISLPESVVSEIRTQWKQKVKDSAGKSLAE

SEQ ID NO: 3093 - DNA, 1005 bp, Campylobacterales bacterium GD 1
  CDS (1)..(1005): transl_table=11
atgttaaagaaaatacttggagttgcattagttgcagctgtttctgttagttcatctatcgcaagcgataagataaatggtgctggcgcatctttccctgctcctctatattatgattgggcttttaattataaaaaagagactaaaaatcttgttaactatcaatcaataggttctggcggtggaatcaaacagattactaaacgtattgtagattttggtgcatctgataagcctcttgattctaaaaaacttggtgcagcaaaacttttacagttcccagcagttattggttcaatcgttgtagcatttaacgtagatggaatcgctgatgaaactttaaaactttctaatgatgtagttgcagatatctttgcaggtaaaatcacttcttggaatgatccgaaaatagctgctaacaatagcggtctaaaacttccaaatcaaaaaatcatcgttgttcaccgttcagatggaagtggtactacttataactttacttattacctaagtggaagttcacagaactggaaaaatagttttggtactggtaaagctgttgactgggctgttggaatcggtgggaaaggtaacgagggtgttgccaacttagttaagcagactccttattcaatcggttacattgaaaacgcttataaagagaaaaataacttaagtgcagctatactcaaaactgcaaatggtaaatgggtaaaagctactgaagataacttcaaagctgctgctaaatatgcaagctggactaaagaagataacttctatgcaatgttagctctacagcctggtgatacttcttacccgattgttgctgctacatttattttacttccaactgagactcctgctatgaataaaaaagtaacagagttttatgattatgctttcaaaaatggtgacgcttcagctaaaaagctaggttatattccacttccagaagcaactaaaaaaatgattagagaatattgggcggctaatatcaaataa

SEQ ID NO: 3094 - protein, 334 aa, Campylobacterales bacterium GD 1
MLKKILGVALVAAVSVSSSIASDKINGAGASFPAPLYYDWAFNYKKETKNLVNYQSIGSGGGIKQITKRIVDFGASDKPLDSKKLGAAKLLQFPAVIGSIVVAFNVDGIADETLKLSNDVVADIFAGKITSWNDPKIAANNSGLKLPNQKIIVVHRSDGSGTTYNFTYYLSGSSQNWKNSFGTGKAVDWAVGIGGKGNEGVANLVKQTPYSIGYIENAYKEKNNLSAAILKTANGKWVKATEDNFKAAAKYASWTKEDNFYAMLALQPGDTSYPIVAATFILLPTETPAMNKKVTEFYDYAFKNGDASAKKLGYIPLPEATKKMIREYWAANIK

SEQ ID NO: 3095 - DNA, 1071 bp, Enterobacter cancerogenus ATCC 35316
  CDS (1)..(1071): transl_table=11
atgatttacgaaatccttgcaggagacattatgaaagttatgcgtaccactgtcgcaactgttgtcgccgcgaccttatctctgagcgctttctctgcctttgcagcagcaagcctgacaggcgcgggtgcaaccttccctgcgccggtgtatgccaaatgggcggatacctaccagaaagaaaccggcaacaaggttaactatcagggtatcggctcctccggtggcgtaaaacaaattaccgcaaacaccgtcgatttcggcgcgtccgatgctccgctgtctgatgacaagctggcgcaggaaggcctgttccagttcccgaccgtgattggcggcgtggtgctggcggtgaacatcccgggcctgaagtctggcgagctggtgctggacggtaaaaccctgggtgatatctacctcggcaaaatcaaaaaatgggatgacgaagccatcaccaaactgaacccgggcgtaaaactgccttcgcagaacatcgccgtggtgcgtcgtgctgacggttccggtacctccttcgtcttcaccagctacctggcgaaagtgaacgaagagtggaaatcgaaagtcggttctggttctaccgttaactggccaaccggtctgggcggcaaaggtaacgacggtatcgccgcgttcgtccagcgtctgccgggctccatcggttacgtagagtacgcttacgcgaagcagaataacctggcctataccaaactgatgtctgcggacggcaaaccggttagcccgaccgaagaaaacttcgctaacgccgcgaaaggcgctgactggagcaaatcctttgctcaggatctgacgaaccagaaaggcgatgacgcctggccaatcacctctaccaccttcattctggtccacaaagagcagaagaaacctgagcagggtgctgaagtgctgaagttcttcgactgggcatacaaaaacggcggcaaacaggcgaacgatctggattacgccagcctgccggacagcgtggttgagcagattcgtgctgcatggaaaaccaacgtaaaagacagcagcggtaaagcgctgtactaa

SEQ ID NO: 3096 - protein, 356 aa, Enterobacter cancerogenus ATCC 35316
MIYEILAGDIMKVMRTTVATVVAATLSLSAFSAFAAASLTGAGATFPAPVYAKWADTYQKETGNKVNYQGIGSSGGVKQITANTVDFGASDAPLSDDKLAQEGLFQFPTVIGGVVLAVNIPGLKSGELVLDGKTLGDIYLGKIKKWDDEAITKLNPGVKLPSQNIAVVRRADGSGTSFVFTSYLAKVNEEWKSKVGSGSTVNWPTGLGGKGNDGIAAFVQRLPGSIGYVEYAYAKQNNLAYTKLMSADGKPVSPTEENFANAAKGADWSKSFAQDLTNQKGDDAWPITSTTFILVHKEQKKPEQGAEVLKFFDWAYKNGGKQANDLDYASLPDSVVEQIRAAWKTNVKDSSGKALY

SEQ ID NO: 3097 - DNA, 1041 bp, Citrobacter rodentium
  CDS (1)..(1041): transl_table=11
atgaaagttatgcgtaccactgtcgcaactgttgtcgccgcgaccttatccatgagcgctttctctgtattcgcagcagcaagcctgacaggtgcaggtgcaacttttcctgcgccagtgtatgccaaatgggcggatacctatcagaaagagactggtagcaaagttaactaccagggtatcggctcctccggcggtgttaaacagattacggcaaacaccgttgatttcggcgcatctgatgcaccgttatctgacgaaaaactgaaccaggaagggctgttccagttcccgaccgtcatcggcggcgtggtgctggcggtaaacattccggggctgaaatcgggcgaactggtgctggacggtaaaaccctgggcgatatctacctcggcaaaatcaagaagtgggatgatgaagccatcaccagactgaatcctggcctgaaactgcctgcgcagaatatcgcggtggtgcgtcgcgccgacggttccggcacctcttttgtcttcaccagctacctggcgaaagtgaatgaagagtggaaaaccaaagtaggggctggctctaccgttaactggccgaccggtctgggcggtaaaggtaacgacggtatcgcggtattcgttcagcgtctgccaggctctatcggctacgttgagtacgcttacgccaaacagaacaatctggcctataccaaactgatctctgccgatggcaaaccggttagcccgacggaagagagcttctccaacgcggcgaaaggcgcagactggagcaaatccttcgctcaggacctgaccaaccagaaaggtgacgatgtgtggccgattacctctaccaccttcatcctggtgcacaaagagcagaagaaacctgagcagggcgctgaagtgctgaaattcttcgactgggcatacaaaaacggcggcaaacaggcgaacgatctggactacgccagcctgccggacagcgtggttgaacaggtccgcgcggcatggaagaccaacgtgaaggacagcagcggtaaagcgctgtactga

SEQ ID NO: 3098 - protein, 346 aa, Citrobacter rodentium
MKVMRTTVATVVAATLSMSAFSVFAAASLTGAGATFPAPVYAKWADTYQKETGSKVNYQGIGSSGGVKQITANTVDFGASDAPLSDEKLNQEGLFQFPTVIGGVVLAVNIPGLKSGELVLDGKTLGDIYLGKIKKWDDEAITRLNPGLKLPAQNIAVVRRADGSGTSFVFTSYLAKVNEEWKTKVGAGSTVNWPTGLGGKGNDGIAVFVQRLPGSIGYVEYAYAKQNNLAYTKLISADGKPVSPTEESFSNAAKGADWSKSFAQDLTNQKGDDVWPITSTTFILVHKEQKKPEQGAEVLKFFDWAYKNGGKQANDLDYASLPDSVVEQVRAAWKTNVKDSSGKALY

SEQ ID NO: 3099 - DNA, 1041 bp, Enterobacter cloacae
  CDS (1)..(1041): transl_table=11
atgaaagttatgcgtaccactgtcgcaactgttgtcgccgcgaccttatctctgagcgcgttctctgtatttgcagaagcaagcctgactggcgctggtgcaaccttccctgcgccggtgtatgccaaatgggcggatacctaccagaaagaaaccggtaacaaggttaactatcagggtatcggctcctccggtggcgttaaacaaattaccgcgaacactgttgatttcggcgcatcagacgctccgctgtctgatgacagactggctcaggaaggcctgttccagttccctaccgtgatcggtggtgtggttctggccatcaacctgccgggcgtgaagtcaggtgagctggtgttggacggcaagacgctgggtgacatctacctgggcaaaatcaaaaaatgggatgacgaagcgatcgctaaactcaacccaggcctgaagctgccttctcagaacatcgccgtggttcgccgcgcggatggttccggtacctcttttgtgttcaccagctacctggcaaaagtgaacgaagagtggaaatctaaagtcggctccggctctaccgttaactggccaaccggtctgggcggtaagggtaacgacggtatcgccgcgttcgtacagcgtctgcctggctcaattggttacgtagagtatgcgtacgctaagcagaacaacctgtcctacaccaaactggtatcagccgacggcaaaccggttagcccgaccgaagagaactttgctaacgcggcgaaaggcgctgactggagcaaatccttcgcgcaggatctgactaaccagaaaggcgaaggtgcatggccaatcacctctaccaccttcatcctggttcacaaagagcagaagaaacctgagcagggcgccgaagtgctgaagttcttcgactgggcgtacaaaaacggcggcaaacaggctaacgccctggattacgccaccctgccggacaacgtggttgagcagattcgcgctgcatggaaaaccaacgtgaaagacagcagcggtaaagcgctgtactaa

SEQ ID NO: 3100 - protein, 346 aa, Enterobacter cloacae
MKVMRTTVATVVAATLSLSAFSVFAEASLTGAGATFPAPVYAKWADTYQKETGNKVNYQGIGSSGGVKQITANTVDFGASDAPLSDDRLAQEGLFQFPTVIGGVVLAINLPGVKSGELVLDGKTLGDIYLGKIKKWDDEAIAKLNPGLKLPSQNIAVVRRADGSGTSFVFTSYLAKVNEEWKSKVGSGSTVNWPTGLGGKGNDGIAAFVQRLPGSIGYVEYAYAKQNNLSYTKLVSADGKPVSPTEENFANAAKGADWSKSFAQDLTNQKGEGAWPITSTTFILVHKEQKKPEQGAEVLKFFDWAYKNGGKQANALDYATLPDNVVEQIRAAWKTNVKDSSGKALY

SEQ ID NO: 3101 - DNA, 1041 bp, Mariprofundus ferrooxydans PV-1
  CDS (1)..(1041): transl_table=11
atgaaaaagatgattattgcagctttggctacattcgctttcggctttgccgtacaggcacacgccgcagccaccatcaatggtgctggcgcaaccttcccttacccggtctatggtaagtgggcacatgcctacaacaaggaaaccggcgttcgtctgaactatcaggccatcggttccggcggcggcatcaagcagatcaaggctaaaaccgttgacttcggtgcatccgatgcaccactcaaacctgaagcactggatgcagcaggtctgatgcagtacccaatgatcatgggcggcgtcgtgccggttgtgaacatcaagggtatcggcgctaaccagctggttctctccggcgacgtgctggcagacatctacctgaacaagatcaccaagtggaacgacaagcgcatcaaaaagctgaacccgagcgttaacctgccggatgatgcgatcgctgttgtccaccgtgcagacggttccggcactacctggatcttcaccaactacctgaccaaggtcagcgctgactgggccaaggatatcggcaacaacaaggctgtatcatggcctaccggtctgggcggcaagggcaaccagggcgtagctgcattcgtcagcaaggttccaggctccatcggctatgttgaatatgcctatgcgctgcagaaccacatgtcatctgttcgcctcgtcaaccacgaaggcaacgctgttgctccaactgccgagaactttcaggctgccgctgccggcgctgactgggctcatgccaagggttactacatggtgctgaccgaccagccaggtgctaaatcctggccgatcaccggcgcttcattcatcctgatgtacaagagccaggctaatgcagccaccgccaaagaagtactgaagttctttgactggagctacaagaatggttcaaagatggccatggagctggactacgtaccgatgccgaaaaaggttatcgatatggtcgagaagacatggtctgccgagatccgtactgccaacggcggtgcaatctggaagtaa

SEQ ID NO: 3102 - protein, 346 aa, Mariprofundus ferrooxydans PV-1
MKKMIIAALATFAFGFAVQAHAAATINGAGATFPYPVYGKWAHAYNKETGVRLNYQAIGSGGGIKQIKAKTVDFGASDAPLKPEALDAAGLMQYPMIMGGVVPVVNIKGIGANQLVLSGDVLADIYLNKITKWNDKRIKKLNPSVNLPDDAIAVVHRADGSGTTWIFTNYLTKVSADWAKDIGNNKAVSWPTGLGGKGNQGVAAFVSKVPGSIGYVEYAYALQNHMSSVRLVNHEGNAVAPTAENFQAAAAGADWAHAKGYYMVLTDQPGAKSWPITGASFILMYKSQANAATAKEVLKFFDWSYKNGSKMAMELDYVPMPKKVIDMVEKTWSAEIRTANGGAIWK

SEQ ID NO: 3103 - DNA, 1032 bp, Geobacter sp. FRC-32
  CDS (1)..(1032): transl_table=11
atgatcaacaaaatgaaaaaatatatggcaatactggcagcggtagccgtgacgctttcagccgggcagtcctttgccgagacggtactcaagggggcaggagcaacctttccgtatcctctgtacagtaagtggttcagggattacaccctggttgatccggtcgtggcatttacctatgatgccatcggcagcagcgggggggtaaagcaaatcatggcgcaggcggtgaatttcggcgcaagcgaccgctttctcacggatgaggagctggcagccgccccgggaaaactcctgcagatcccgacagtaatgggggcagtagtgctgagttacaatatcccgggcctgcattcggaactgaaacttaccccggaggccgtcagtgccatttatctgggtgaaatcagccgctggaacgattcccggctggtagctctgaacaaagagctgaagaccatcgatcagaaaatcattgttgtccaccgcagtgacggcagcggcaccaccagcatctttaccgattacctttccagtgtcagcagcgaatgggccggaaaggtaggcaagggtaacaccgtccaatggccggtcggcatagggggcaaggggagcaaagagatggtcgagcacatcagaacggtgcccttttccatcgcctacatggaaaatgcttataccatggtcaataatctccccacagccgtgctgaaaaacaagaccggccgctttgtcaacccgaccatgcgctccatcagggcagcggcggttgatgccataaaacatgtgaagaatgattaccgcgtatcactggtaaaccaggcgggcaaagacgcctatcccatagtcggactgacctggctgcttgtctatcaggaacagaaagacccggtgaagggaaaggcgcttgtggagtttttgaactgggagttgaagaaggcagaaaaaatgacctcgacgcttttttacacgccccttcccgaaaagctgggcagtatggtaaaccaggtgatccggagcatccgttactga

SEQ ID NO: 3104 - protein, 343 aa, Geobacter sp. FRC-32
MINKMKKYMAILAAVAVTLSAGQSFAETVLKGAGATFPYPLYSKWFRDYTLVDPVVAFTYDAIGSSGGVKQIMAQAVNFGASDRFLTDEELAAAPGKLLQIPTVMGAVVLSYNIPGLHSELKLTPEAVSAIYLGEISRWNDSRLVALNKELKTIDQKIIVVHRSDGSGTTSIFTDYLSSVSSEWAGKVGKGNTVQWPVGIGGKGSKEMVEHIRTVPFSIAYMENAYTMVNNLPTAVLKNKTGRFVNPTMRSIRAAAVDAIKHVKNDYRVSLVNQAGKDAYPIVGLTWLLVYQEQKDPVKGKALVEFLNWELKKAEKMTSTLFYTPLPEKLGSMVNQVIRSIRY

SEQ ID NO: 3105 - DNA, 1029 bp, Geobacter sp. FRC-32
  CDS (1)..(1029): transl_table=11
atgtcggtattttttcgcaaaaaacttgcagcagcgctgctcctggcgctgaccgccactggcggggcggcttcggccgaaacactcatcaacggcgccggggcgaccttcccctaccccctctattcaaaatggttcaccgaatatgccaaggtcgatccgtcggtcaaattcaactaccagtccatcggcagcggcggcggcatcaaacagatcaccgcccagaccgtcgatttcggcgcttccgacaaatttttgagcgatagcgacctgaaggccgctccaggtaagctgctccacatcccaacggtaatgggtgcggtggtcgtcacctacaacattcccggcgtagcaaaaggcttgaagctctcctccgaagatgtggccgatatcttcctgggcaagatcaccaaatggaacgatccgaagatctccaatgacaacccgggcgtcaatctccccaaccaaccgatcattgttgttcaccgctccgacggcagcggcaccaccagcatcttcaccgactacctctcgtctgtaagccaggaatggtccggcaaagtgggcaagggaagctcggtaaaatggccggtaggtcttggcggcaagggtaacgaaggggtcgccggacaggtcaaaaccacccagtacaccatcggctacgttgaactggcctatgccgtggaaaacaagctgccctatgcaagcctcaagaacaagagcggcgtcttcgtcgagccgaccatcaaatccaccagcgccgccgctgccggcgccgccaaatccatgcccgccgattaccgcgtctccctggtcaaccagccgggcaaagactcctaccccgttgtcggcttcacctggttgctcgtttaccaggatcagaaggacaaggccaaagggaagaagctggtcgagttcctcaactgggaactgaagcacggccagaagatggcagagaagattctctatgcgccccttccggccaatgtggcaaagatggtggaaaagaccatcaagaccatcaaataa

SEQ ID NO: 3106 - protein, 342 aa, Geobacter sp. FRC-32
MSVFFRKKLAAALLLALTATGGAASAETLINGAGATFPYPLYSKWFTEYAKVDPSVKFNYQSIGSGGGIKQITAQTVDFGASDKFLSDSDLKAAPGKLLHIPTVMGAVVVTYNIPGVAKGLKLSSEDVADIFLGKITKWNDPKISNDNPGVNLPNQPIIVVHRSDGSGTTSIFTDYLSSVSQEWSGKVGKGSSVKWPVGLGGKGNEGVAGQVKTTQYTIGYVELAYAVENKLPYASLKNKSGVFVEPTIKSTSAAAAGAAKSMPADYRVSLVNQPGKDSYPVVGFTWLLVYQDQKDKAKGKKLVEFLNWELKHGQKMAEKILYAPLPANVAKMVEKTIKTIK

SEQ ID NO: 3107 - DNA, 1029 bp, Geobacter sp. FRC-32
  CDS (1)..(1029): transl_table=11
atgttcaacttcgttcgaaacattttcctgaccttaagcatcacggcgataacggccatggccggtcaagcttcggctgcaaccctcatcaacggcgccggggcaaccttcccctaccccctctattcaaaatggttcaccgagtatgccaaggtcgacccctccgttaaattcaactaccagtccatcggcagcggcggcggcatcaagcagatcactgcccagaccgtggatttcggagcttcagacaaatttcttaatgatgacgaactgaagcgggtgcccggtaagctgctccatatcccgaccgtcatgggcgcagtggtcgtgacctacaatatacccggcatcggcaaggggctgaagctttcgtctgagaacctgaccgatatctacctgggcaagctgaacaagtggaacgatcccaggatcgtcaaagacaaccccggtctcaggctgccggcaaaagccatcattgtcgttcaccgctccgacggcagcggcaccaccagcatcttcaccgactatctctcctccgtcagccagcaatggggccgcaaagtgggcaagggaagctcggtaaagtggccggtaggactcggcggcaagggtaacgaaggggttgccggacaagtcaaaaccacccaatacaccatcggctacgttgaactggcctatgccgtggaaaacaagctgccatacgcttccctgaagaacaagagcggcgtcttcgtcgagccgaccatcaaatcaaccagcgccgctgctgccggcgccgccaagtccatgcccgccgatttccgcgtctctctggtcaaccagccgggcaaggactcctacccaatcgtcggcttcacctggttgctcgtttaccaggatcagaaggacaaggccaaggggaaaaagctggttgagttcctcaactgggaactgaagcacggccagaagatggctgagaagatcctctatgcgccgttgccggccaatgtggcaaagatggtggagaagacagtcaagacaataaagtag

SEQ ID NO: 3108 - protein, 342 aa, Geobacter sp. FRC-32
MFNFVRNIFLTLSITAITAMAGQASAATLINGAGATFPYPLYSKWFTEYAKVDPSVKFNYQSIGSGGGIKQITAQTVDFGASDKFLNDDELKRVPGKLLHIPTVMGAVVVTYNIPGIGKGLKLSSENLTDIYLGKLNKWNDPRIVKDNPGLRLPAKAIIVVHRSDGSGTTSIFTDYLSSVSQQWGRKVGKGSSVKWPVGLGGKGNEGVAGQVKTTQYTIGYVELAYAVENKLPYASLKNKSGVFVEPTIKSTSAAAAGAAKSMPADFRVSLVNQPGKDSYPIVGFTWLLVYQDQKDKAKGKKLVEFLNWELKHGQKMAEKILYAPLPANVAKMVEKTVKTIK

SEQ ID NO: 3109 - DNA, 1041 bp, Erwinia amylovora
  CDS (1)..(1041): transl_table=11
atgacttcgatgcacaaaactctggctcaatgcgttgcattaaccctttctctgagcgctgtttctgcgctggctgcgacgaatctgaccggcgctggcggcacctttccggctccggtttataacaagtgggcggcagagtaccacaccgccacgggcagccaggttaactatcagggtatcggctcttccggcggcgtgaagcaaattatcgcgaaaaccgccgactttggtgcgtcagatgcaccgatgaaagacgaagatttggctaaaaatggcctgttccagttcccgacggtgattggcggggtggtactggcggtcaatattcctggtatcaaatccggggagctgacgctggatggtaaaaccgtgggggatatctaccttggtactgtcaagaagtggaacgatccggctatcaccaaactcaacccgggcgtaaagttgcctgatgccaatatcaacgtggtacgccgcgctgatggttccgggacctcatttgtctttaccagctatctgtctaaagtgaacaaagactggagcagcaaagtcggcaaaggcagcaccgttaactggccggtgggcctgggcggtaaaggtaatgacggcgttgctgcattcgtacagcgtttgccaggatctgtcggctatgtcgaatacgcctatgctaaacagaacagcctcgcctacaccaaactggtcgatgccgacggcaaagcgattgccccgagcgagaaaagcttcagcgatgcggctaaaggcgcagactggagcacctcgttcgctcaggatctgaccttccagaaaggcgataacgcctggccgatcacctctaccacctttatcctggttcataaagagcaggccaacaccgcgaagggcgcagccgtgttgcagttctttgactgggcttataaaaacggtggcaaaaccaccagcgcgctggactatgcatcgctgccagctcccgtcgtggagcagatccgcgccgcctggaaaagcaacgtgaaagacagttccggcaaggcgttgtactga

SEQ ID NO: 3110 - protein, 346 aa, Erwinia amylovora
MTSMHKTLAQCVALTLSLSAVSALAATNLTGAGGTFPAPVYNKWAAEYHTATGSQVNYQGIGSSGGVKQIIAKTADFGASDAPMKDEDLAKNGLFQFPTVIGGVVLAVNIPGIKSGELTLDGKTVGDIYLGTVKKWNDPAITKLNPGVKLPDANINVVRRADGSGTSFVFTSYLSKVNKDWSSKVGKGSTVNWPVGLGGKGNDGVAAFVQRLPGSVGYVEYAYAKQNSLAYTKLVDADGKAIAPSEKSFSDAAKGADWSTSFAQDLTFQKGDNAWPITSTTFILVHKEQANTAKGAAVLQFFDWAYKNGGKTTSALDYASLPAPVVEQIRAAWKSNVKDSSGKALY

SEQ ID NO: 3111 - DNA, 1020 bp, Xanthomonas oryzae
  CDS (1)..(1020): transl_table=11
atgatccactccttcaagacccgtctggccgttggcgtactcgccgcttcgctggctctgtgcgcccaggctgccgatgtcaccggcgctggccggtcgtttatttacccggtgatgtccaagtggtcggccgactacaacgctgccaccaagaagcaggtcaactatcaatcgatcggttcaggcggcggtattgcccagatcaaggcggccagcgtggacttcggctcgtccgatgccccgctcaagccggaagaactggccgcagccggcctggcgcagtttccctcggtgatcggcggcgtggtgccggtggtcaacgtgccgggcgtggccgccggtgcgctcaagctggacggcaagaccctgggcgacatcttcctgggcaaggtcagcacctggaacgatccggccatcgccgcgctcaatccaggcgtgaagctgccggaaggcaagatcaccgtggtgcatcgctccgacggctcgggcaccagcttcaacttcaccaactacctgtccaaggtcaatccggactggaagagcaaggtgggcgaaggcactgccgtgcagtggccgaccggtatcggcggcaagggcaacgagggcgtcgctgcctacgtgaagcagatcaagggcggcatcggctacgtcgagctgtcgtacgcgctgcagaacaagatggcctacaccgcgatgaagaatgctgccggcaagttcgtgcagccgtccgatgaaaccttcgccgccgctgccaacagcgccgattggggcagcagcaaggacttctatctggtgatgaccaatgcggcgggcgacaacgcctggccgatcacggcgaccaattttatcttggtgcagaagaagccgaagaacccgaccggcctgaaaaacacgctggacttcttccgctgggtctacagcaagggcgacgcccaggccaagcagctggactacgtaccgctgccggacgcgctggtgacccagatcgaggcctactgggccacgaatctgcccaaataa

SEQ ID NO: 3112 - protein, 339 aa, Xanthomonas oryzae
MIHSFKTRLAVGVLAASLALCAQAADVTGAGRSFIYPVMSKWSADYNAATKKQVNYQSIGSGGGIAQIKAASVDFGSSDAPLKPEELAAAGLAQFPSVIGGVVPVVNVPGVAAGALKLDGKTLGDIFLGKVSTWNDPAIAALNPGVKLPEGKITVVHRSDGSGTSFNFTNYLSKVNPDWKSKVGEGTAVQWPTGIGGKGNEGVAAYVKQIKGGIGYVELSYALQNKMAYTAMKNAAGKFVQPSDETFAAAANSADWGSSKDFYLVMTNAAGDNAWPITATNFILVQKKPKNPTGLKNTLDFFRWVYSKGDAQAKQLDYVPLPDALVTQIEAYWATNLPK

SEQ ID NO: 3113 - DNA, 1041 bp, Edwardsiella tarda
  CDS (1)..(1041): transl_table=11
atgaaactgatgcgtaccgctgtcgccgggattgtcgccgcgaccgtctccctgagcgccatgcctgcctttgcggcggagagcctgacaggtgccggcgccaccttccctgcgccggtttacgccaagtgggcagactcctatcagaaagagaccggtaataaagtaaactatcaaggcattggctcctccggcggtgtgaagcagatcattgctaacaccgttgacttcggcgcctccgatgcgcccctgagcgaagaaaagctggcggcggacggcctatttcagtttccgacggttatcggcggcgtggtgatggccgttaacctgccgggtattacgtcgggcgagctgacgttggacggtgaaacgctgggtgatatctacctgggtaaaattaagaagtggaacgacgcggcaatcgctaagctgaacccgggggttaaactgccggatcaggcgattgccgtggtgcgccgcgccgatggttctggcacctcgtttgtctttaccagctacctgaacaaagtcaacgcacagtggaagagtgacgtcggcgccggctccaccgttaactggccgacgggcctgggtggaaaaggtaacgatggcgttgccgcctttgtacagcgtctgccgggcgccatcggctacgtcgagtatgcctatgccaagcagaataagctggcctacaccaagctgatctcctccgaggggcaggcggtcagtccgacggaggtcagcttcagcaatgcggcaaaaggcgccgactggagcgcatctttcgctcaggatctgacgaatcagcccggcgataacgtatggccgatcacctcgaccaccttcattctggttcataaagaatccagcaagcctaagcaaacggcagaggtgctgaagttcttcgattgggcctacagtaaaggggctaagcaggctaacgatctggactatgcgaccctgccggcgtcggtggtggagcatattcgtaccgcctggaaaagcagcgttaaggacagcggtggcaacgcgctgtactga

SEQ ID NO: 3114 - protein, 346 aa, Edwardsiella tarda
MKLMRTAVAGIVAATVSLSAMPAFAAESLTGAGATFPAPVYAKWADSYQKETGNKVNYQGIGSSGGVKQIIANTVDFGASDAPLSEEKLAADGLFQFPTVIGGVVMAVNLPGITSGELTLDGETLGDIYLGKIKKWNDAAIAKLNPGVKLPDQAIAVVRRADGSGTSFVFTSYLNKVNAQWKSDVGAGSTVNWPTGLGGKGNDGVAAFVQRLPGAIGYVEYAYAKQNKLAYTKLISSEGQAVSPTEVSFSNAAKGADWSASFAQDLTNQPGDNVWPITSTTFILVHKESSKPKQTAEVLKFFDWAYSKGAKQANDLDYATLPASVVEHIRTAWKSSVKDSGGNALY

SEQ ID NO: 3115 - DNA, 1041 bp, Edwardsiella tarda
  CDS (1)..(1041): transl_table=11
atgaaactgatgcgtaccgctgtcgccgggattgtcaccgcgaccgtctccctgagcgccatgcctgcctttgcggcggagagcctgacaggtgccggcgccaccttccctgcgccggtttacgccaagtgggcagactcctatcagaaagagaccggtaataaagtaaactatcaaggcattggctcctccggcggtgtgaagcagatcattgctaacaccgttgacttcggcgcctccgatgcgcccctgagcgaagaaaagctggcggcggacggcctatttcagtttccgacggttatcggcggcgtggtgatggccgttaacctgccgggtattacgtcgggcgagctgacgttggacggtgaaacgctgggtgatatctacctgggtaaaattaagaagtggaacgacgcggcaatcgctaagctgaacccgggggttaaactgccggatcaggcgattgccgtggtgcgccgcgccgatggttctggcacctcgtttgtctttaccagctacctgaacaaagtcaacgcacagtggaagagtgacgtcggcgccggctccaccgttaactggccgacgggcctgggtggaaaaggtaacgatggcgttgccgcctttgtacagcgtctgccgggcgccatcggctacgtcgagtatgcctatgccaagcagaataagctggcctacaccaagctgatctcctccgaggggcaggcggtcagtccgacggaggtcagcttcagcaatgcggcaaaaggcgccgactggagcgcatctttcgctcaggatctgacgaatcagcccggcgataacgtatggccgatcacctcgaccaccttcattctggttcataaagaatccagcaagcctaagcaaacggcagaggtgctgaagttcttcgattgggcctacagtaaaggggctaagcaggctaacgatctggactatgcgaccctgccggcgtcggtggtggagcatattcgtaccgcctggaaaagcagcgttaaggacagcggtggcaacgcgctgtactga

SEQ ID NO: 3116 - protein, 346 aa, Edwardsiella tarda
MKLMRTAVAGIVTATVSLSAMPAFAAESLTGAGATFPAPVYAKWADSYQKETGNKVNYQGIGSSGGVKQIIANTVDFGASDAPLSEEKLAADGLFQFPTVIGGVVMAVNLPGITSGELTLDGETLGDIYLGKIKKWNDAAIAKLNPGVKLPDQAIAVVRRADGSGTSFVFTSYLNKVNAQWKSDVGAGSTVNWPTGLGGKGNDGVAAFVQRLPGAIGYVEYAYAKQNKLAYTKLISSEGQAVSPTEVSFSNAAKGADWSASFAQDLTNQPGDNVWPITSTTFILVHKESSKPKQTAEVLKFFDWAYSKGAKQANDLDYATLPASVVEHIRTAWKSSVKDSGGNALY

SEQ ID NO: 3117 - DNA, 1041 bp, Edwardsiella tarda
  CDS (1)..(1041): transl_table=11
atgaaactgatgcgtaccgctgtcgctgggattgtcgccgcgaccgtctccttgagtgccaccccggccttcgccgctgagagcctgacaggtgccggcgctaccttcccggcgccggtttatgccaagtgggccgattcctaccagaaagaaaccggtaacaaagtgaattatcaaggtattggttcttctggcggcgtgaagcagatcatcgcgaacaccgtcgatttcggtgcctccgatgcaccgctaagcgatgagaagctggcggccgacggtctgtttcaattccctaccgtgatcggtggggtcgtgatggcagtgaacctaccgggggtgaagtcgggtgagttgacattagatggtgagacgctgggcgacatctacctgggtaagattaagaagtggaatgacgcggcgatcgccaaactcaatccgggcgttaaactgccggatcagaatattgccgtggtgcggcgtgcggatggttccggtacctctttcgtctttaccagctacttgagcaaagttaatccgcaatggaaggccgatgttggtgccggttcgacggtgaattggccgaccggtttagggggtaagggcaatgacggcgtcgccgcttttgtccagcgtctgccgggctctattggctacgtcgagtatgcctacgctaaacagaataagttggcgtacaccaaactggtttctgctgatggtcaagcggttagcccgacggaggtcagcttcagcaatgcggctaaaggggccgattggagccgctctttcgctcaggatctgacgaaccaggcgggcgataatgtatggccgatcacctcgacgacgtttattctggtgcataaggcatcgaccaagccaaagcagacggctgaggtactgaagttcttcgattgggcctataacgatggcgccaagcaggccaatgcattggattatgccaccttacccgcgtccgtggtggagcagatccgcgcggcctggaagacgagcgtcaaggatagcggcggtaacgccctgtattga

SEQ ID NO: 3118 - protein, 346 aa, Edwardsiella tarda
MKLMRTAVAGIVAATVSLSATPAFAAESLTGAGATFPAPVYAKWADSYQKETGNKVNYQGIGSSGGVKQIIANTVDFGASDAPLSDEKLAADGLFQFPTVIGGVVMAVNLPGVKSGELTLDGETLGDIYLGKIKKWNDAAIAKLNPGVKLPDQNIAVVRRADGSGTSFVFTSYLSKVNPQWKADVGAGSTVNWPTGLGGKGNDGVAAFVQRLPGSIGYVEYAYAKQNKLAYTKLVSADGQAVSPTEVSFSNAAKGADWSRSFAQDLTNQAGDNVWPITSTTFILVHKASTKPKQTAEVLKFFDWAYNDGAKQANALDYATLPASVVEQIRAAWKTSVKDSGGNALY

SEQ ID NO: 3119 - DNA, 1017 bp, Burkholderia sp
  CDS (1)..(1017)
atgaatctgttcaaaacgctggccatcggctttgccgcttcctgctataccctgcccgtgcacacggctgagattactggcgcgggcagtactttcgccgccccggtctatgcgcaatgggcgcacgcataccggaaagccagcggcgtcaaagtgaattatcagggaatcggctcatccgctggcctcaagcaaatcatcgcaaaaaccgttgattttgcggcgagcgatacgcccttgacggcgaatgcattatccaaggccggtctgcttcagtttccgaccatcgccggcggcgttgtaccggtggtgaatgttcctggtatccagccaggcgaaatggttctgagcggtcaggtattaggcgatatttatctgggcaaaatcacaaaatggaacgaccctgaaatcatcaaactcaatccggcgctgcacacacgcgcccggctgcccgatctcacgattgccgtggtgcggcgcgcggacggctcgggcaccagcgcgctctggacccattatttatcgcagaccaacgcgcaatggaaaaagaccgttggcgaaggcgcaaccgtcagctggccggcgggcatcgggggaaaaggaaatgacggcgtcgccgccttcgttgggcgtctgaaaggcgcaatcggttatatcgagtggtcctatgccaagcaaaacaagatatcctatgtcaggctgcgcaatccggagggcgcgatcgtggcgcccaacgtgcatacctttaaagcggccttggagcgcatagactggacaaaatcctctgaacctatggccccgattccgcgacaaaacgcctggccgattgtgggccttacttttgcgctcctgcatgcgacgcagccggtctcccagaacgccgcgcaggctttgaaattttttgactggtctttcagaaacggcgcacagctcgcaagcgatctcggttatataatgctgcccgcaacagccatcgatcaggtgcgtatacgatggccaatacgccttgaaaattag

SEQ ID NO: 3120 - protein, 338 aa, Burkholderia sp
MNLFKTLAIGFAASCYTLPVHTAEITGAGSTFAAPVYAQWAHAYRKASGVKVNYQGIGSSAGLKQIIAKTVDFAASDTPLTANALSKAGLLQFPTIAGGVVPVVNVPGIQPGEMVLSGQVLGDIYLGKITKWNDPEIIKLNPALHTRARLPDLTIAVVRRADGSGTSALWTHYLSQTNAQWKKTVGEGATVSWPAGIGGKGNDGVAAFVGRLKGAIGYIEWSYAKQNKISYVRLRNPEGAIVAPNVHTFKAALERIDWTKSSEPMAPIPRQNAWPIVGLTFALLHATQPVSQNAAQALKFFDWSFRNGAQLASDLGYIMLPATAIDQVRIRWPIRLEN

SEQ ID NO: 3121 - DNA, 1212 bp, Pasteurella multocida; identical to SEQ ID NO: 2683
  CDS (178)..(1212): transl_table=11

SEQ ID NO: 3122 - protein, 344 aa, Pasteurella multocida
MTKRAMLLAILFSTFALTTQAQTITGAGASFPYPIYAKWASMYEKQTGNKVNYQSIGSGGGQQQIIAKTIDFGASDDPMKAELLAQHQLLQFPAIIGGTVPVVNLPEITAGQLKLSGEVLADIFLGKIKKWNDPAIAKLNQGANLPDKAIIVVHRSDGSGTTFGWTNYLSKVSTEWKETVGQGKSVKWPTGQGGKGNEGVAAYVSKIKYSIGYVEYAYAKQNQLAWASLQNKAGQFVQPSAESFMAAAANAQWESAVGMGVILTNEEGDTSWPVTAASFILLHKHAEKPEITKAVFDFFDWAFKQGKVAATELDYVPLPEEVIQKIQAQWKTEVKSSDGKTLWQ

SEQ ID NO: 3123 - DNA, 1095 bp, Xylella fastidiosa
  CDS (1)..(1095): transl_table=11
atgaaagtacattttgctggtttcactctcctttgtttatgcactgccgtaacaatcaccggctgtaaaccttccaacgataaccagtcaacaggcgtcagtcaggatgcgaacagtacgacgcccccctctgccgagcaaaccaagagtgtgaagatttcaggcgcaggtgcctcatttatatatccactgatctcgcaatggtcagccgactacaacgccgccactggcaataaaattaactatcagtcaatcggctcaggcggtggtattgcccaaatcaaagccgccacaatcgattttggttcttctgacaagccacttgacagcagcgaactgaccaaagcgggtctagggcagtttccatcggccataggcggcgtcgtgccggtggtcaatctagacaacatcgaaccaggcaaactacgccttacaggccccctgcttgcagatattttcctggggaagatcagtaagtggaatgacgcagcaatcatcagcgccaatccggggttacatcttcccgacactaaaatcaacatcgtgcatcgttccgatggctctggcacgacattcaatttcagcaactatctatcaaaagtcagcgcggaatggaaacagaaagtgggtgaaggcacttcagtgcagtggcccggaggcgtcggcggtaaaggcaacgaaggtgtagcctcatatgttcaacagattaaaggctcgatcggctacgttgaactggcgtatgcgcttcagaacaaaatgtcatatacagcactccagaacgctgctggtcaatgggtacaaccaagcgcagaaagctttgcagccgccgcatccaacgcagactggagcaatgcaaaggatttcaatttggtcatcaccaacgctactggggaaggcgcttggccaatcacagccacaaactttatattgatgcccaagcaaactaaggatgcagcgcaaagaaaagccactctagacttcttcaagtggtgctttgaaaatgggcagaaacaagccaatgaattacactacgtgccattgccaccaaatctggtgaagcaaatcgaagcttattgggcaagcgaattcaagtaa

SEQ ID NO: 3124 - protein, 364 aa, Xylella fastidiosa
MKVHFAGFTLLCLCTAVTITGCKPSNDNQSTGVSQDANSTTPPSAEQTKSVKISGAGASFIYPLISQWSADYNAATGNKINYQSIGSGGGIAQIKAATIDFGSSDKPLDSSELTKAGLGQFPSAIGGVVPVVNLDNIEPGKLRLTGPLLADIFLGKISKWNDAAIISANPGLHLPDTKINIVHRSDGSGTTFNFSNYLSKVSAEWKQKVGEGTSVQWPGGVGGKGNEGVASYVQQIKGSIGYVELAYALQNKMSYTALQNAAGQWVQPSAESFAAAASNADWSNAKDFNLVITNATGEGAWPITATNFILMPKQTKDAAQRKATLDFFKWCFENGQKQANELHYVPLPPNLVKQIEAYWASEFK

SEQ ID NO: 3125 - DNA, 1095 bp, Xylella fastidiosa
  CDS (1)..(1095): transl_table=11
atgaaagtacattttgctggtttcactctcctttgtttatgcactgccgtaacaatcaccggctgtaaaccttccaacgataaccagtcaagaggtgtcagtcaggatgcgaacagtacgactccaccctctgccgagcaaaccaagagtgtgaagatttcaggcgcaggtgcctcatttatctatccactgatctcgcaatggtcagccgactacaacgccgccactggcaataaaattaactatcagtcaatcggctcaggcggtggtattgcccaaatcaaagccgccacaatcgattttggttcttctgacaagccacttgacagcagcgaactgacccaagcgggtctagggcagtttccatcggccataggcggcgtcgtgccggtggtcaatctagacaacatcgaaccaggcaaactacgcctaacaggccccctgcttgcagatattttcctggggaagatcagtaagtggaatgacgcagcaatcatcagcgccaatccggggctacatcttccagacactaaaatcaacatcgtgcatcgttccgatggctctggcacgacattcaatttcagcaactatttatcaaaagtcagcgcggaatggaaacagaaagtgggtgaaggcacttcagtgcagtggcccggaggcgtcggcggtaaaggcaacgaaggtgtagcctcatatgttcaacagattaaaggctcgatcggctacgttgaactggcgtatgcgcttcagaacaaaatgtcatatacagcactccagaacgctgctggtcaatgggtacaaccaagcgcagaaagctttgcagcggccgcatccaacgcagactggagcaatgcaaaggatttcaatttggtcatcaccaacgctactggggaaggcgcttggccaatcacagccacaaactttatattgatgcgcaagcaaactaaggatgcagcgcaaagaaaagccactctagacttcttcaagtggtgctttgaaaatgggcagaagcaagccaatgaattacactacgtgccattgccaccaaatctggtgaagcaaatcgaagcttattgggcaagcgaattcaagtaa

SEQ ID NO: 3126 - protein, 364 aa, Xylella fastidiosa
MKVHFAGFTLLCLCTAVTITGCKPSNDNQSRGVSQDANSTTPPSAEQTKSVKISGAGASFIYPLISQWSADYNAATGNKINYQSIGSGGGIAQIKAATIDFGSSDKPLDSSELTQAGLGQFPSAIGGVVPVVNLDNIEPGKLRLTGPLLADIFLGKISKWNDAAIISANPGLHLPDTKINIVHRSDGSGTTFNFSNYLSKVSAEWKQKVGEGTSVQWPGGVGGKGNEGVASYVQQIKGSIGYVELAYALQNKMSYTALQNAAGQWVQPSAESFAAAASNADWSNAKDFNLVITNATGEGAWPITATNFILMRKQTKDAAQRKATLDFFKWCFENGQKQANELHYVPLPPNLVKQIEAYWASEFK

SEQ ID NO: 3127 - DNA, 1044 bp, Nostoc punctiforme
  CDS (1)..(1044): transl_table=11
atgattttttcgaccaccaccttgaatcgtgtcattgctacttcattggtgacaacttctgttgcacttagtccattttttggtgcgatcgcacaagctgaaactctcaatggtgcaggagcaacttttccggctccgctttacgaacggtatgctcgtgaagtgaagaagaaatatccagacttgaaaattaactatcaagcaattggtagtggcggcggtattcgtcaagtcaccgctggaaccgttgactttggtggtagtgatgctgcaatgaaagatgatgaaatcagtaaagtcaagaacggtgtaatcttagtacctacagcaggtggtgccgtttctgttgtttataatcttccaggtgttaacgatctcaagttgtcccgtaagacactaccagaaattttctcaggtcaaattaccaaatgggatgacgcaaaaattaaagctgataatcccggtgtcaatctaccaagtcaagcaattaaatttgttgttcgcgctgatggtagcggtacaactttcattttcactaaccacttaagtgctaccagcggttattttaaaggcagagttggagctaacactgctccaaaatggaatctgccaaacgtcctgaaaggcaaaggcaatccaggcgtagctgctatagtatctcgtactcctggttctattggttatgtagaatatgcctacgccgtcaaaaacaatctgaaatcagcactagtacaaaataagaaaggagaatttgttgctccttctttagagtctgcaaatgcagctttgtcaactgtcacttttccagacaattaccgtgtttttgtaggagaaccagcacaaggttatccgatcgttggccttacttggatgatggtttacaaacagtatgctaatgctgctaaagctgatgcaattaagaaatggattaattgggtattgaaggacggtcaacagtataacgatgacctcaactacaccaaaattccatctgatgtagcaaatcgggtgcttcaaacagtgaatagctctgtcaaaccttaa

SEQ ID NO: 3128 - protein, 347 aa, Nostoc punctiforme
MIFSTTTLNRVIATSLVTTSVALSPFFGAIAQAETLNGAGATFPAPLYERYAREVKKKYPDLKINYQAIGSGGGIRQVTAGTVDFGGSDAAMKDDEISKVKNGVILVPTAGGAVSVVYNLPGVNDLKLSRKTLPEIFSGQITKWDDAKIKADNPGVNLPSQAIKFVVRADGSGTTFIFTNHLSATSGYFKGRVGANTAPKWNLPNVLKGKGNPGVAAIVSRTPGSIGYVEYAYAVKNNLKSALVQNKKGEFVAPSLESANAALSTVTFPDNYRVFVGEPAQGYPIVGLTWMMVYKQYANAAKADAIKKWINWVLKDGQQYNDDLNYTKIPSDVANRVLQTVNSSVKP

SEQ ID NO: 3129 - DNA, 1155 bp, Psychrobacter arcticus
  CDS (1)..(1155): transl_table=11
atgcgttattcattcatggcagtagcaatcgctagcactttggtattagccgcttgtaaccaaacgaccagcaacaacgagagcgataaaaccaacgagcctgctacagcagcgccagcaaatgccgctgctagtggcgacgctagtgctagctcagctgaaagtgcatcgatgaacattactggtgctggtgcctcttttccgcagcctatctatgctaaatggtcagatgcttacaataaagccaccggtggtcaggtgaactatcagtccattggctcatctggcggtatcaaacaaatcgttgcgaagaccgtggattttggagcatctgatgcgcctatgacaccagaagagttaaacgaagctggtctgattcagttcccaactgtcattggtggcgtagtgcctatcgtcaatatcgatggcatcaaggctggtcagttaaagctcgatggcaaaatgcttgccgatatttatttgggcaaaatcagtaaatggaacgaccctgccatcgcggctatgaatccagaacttaaattaccagacgctgccattaccacggtatttcgctcggatggttctggtacgacttttaacttcactgactatctagcaaaagtttcaagcgattggaatgacagtgtgggtgtcgataaaacagtcaaatggccaacatcggctaccggtgctggtggtaaaggcaacgagggtgtgtcgagctacgtcacacgcatgaaaaactctatcggctatgttgaatatgcttacgctaagcaaaacggtatggcacacgtcgcccttaaaaacgctgcaggcaatatcgtacaaccttctgcccaaacttttgcagcggcaggcgacattgactggtcaaagcaagaaggcttctataaagttattaccaactctgaaacagcgcaagcttggccaatcgccgcggcgacttttatcttagtacataagcagccacaagatgccaagcaagtcgccggcgtattaaagttctttgactgggcttatactcaaggtgatgacgatgcaatggcgcttgattacgtgccgttttctgatactgccgttgctttgtttaaagcaaaatggaatgaggtaaaaggcagcgacggccaacctgtctataagcctgcacaataa

SEQ ID NO: 3130 - protein, 384 aa, Psychrobacter arcticus
MRYSFMAVAIASTLVLAACNQTTSNNESDKTNEPATAAPANAAASGDASASSAESASMNITGAGASFPQPIYAKWSDAYNKATGGQVNYQSIGSSGGIKQIVAKTVDFGASDAPMTPEELNEAGLIQFPTVIGGVVPIVNIDGIKAGQLKLDGKMLADIYLGKISKWNDPAIAAMNPELKLPDAAITTVFRSDGSGTTFNFTDYLAKVSSDWNDSVGVDKTVKWPTSATGAGGKGNEGVSSYVTRMKNSIGYVEYAYAKQNGMAHVALKNAAGNIVQPSAQTFAAAGDIDWSKQEGFYKVITNSETAQAWPIAAATFILVHKQPQDAKQVAGVLKFFDWAYTQGDDDAMALDYVPFSDTAVALFKAKWNEVKGSDGQPVYKPAQ

SEQ ID NO: 3131 - DNA, 1026 bp, Burkholderia sp.
  CDS (1)..(1026): transl_table=11
atgaacatccggatcttgattccctgcaccctggttcttgttgccctcagtgctcacgctgcggatatcaccggcgcgggcagcacatttgccgcaccgatctacgcaaagtgggccgatgcgtacaagaagtcgggcggtggcaaggtcaactatcaaggtatcggctcgtcgggcggcttgaagcaaatcaacgcgaagaccgtcgattttgccggttcggacgctccgctgaaggatgacgagctcgcgaaggcaggcctgttccagttcccgacggtggtcggtggcgtggtgcccgtcgtcaacgtgccgggcgtgaaggccggcgaactgacactgtcgggcccggtgctcggcgacatctacctcggcaagatcacgaagtggaacgaccccgccatcaccgcactgaacccgaaggtcaagctgtcggatacggacatcgctgtagttcgccgcgccgacggttcgggcacgagcttcatctggacgaactacctgtcgaaggtgaacggcacatggaagtcgaaggtcggcgaaggcacgacggtcaactggccgacgggcaccggcggcaagggcaatgacggcgttgcagcgttcgtgcagcgcctgccgggcgcgatcggctacgtcgaatgggcatacgcgaagaagaacaacatggtctacaccgcgctgaaaaactcgacgggcacggtggtcgagccgaagacggaaacgttcaaggccgctgcggcaggtgcgaactggtcgaagtcgttctaccagatcctgacggacgagccgggcaaagacgcgtggccggtcgtcggcgcgacgttcgtgctgctgcacgcaacgcaagagaaaccggcacaaggtgcagaaacgctcaagttcttcgactgggcatttcacaacggcaatcaggccgcctcggatctggactacatctcgcttcccgattccgtggtggccgaaattcgcaagcaatggaaagcgaaggtcaaggatgcctccggtaagccggttgcaaactga

SEQ ID NO: 3132 - protein, 341 aa, Burkholderia sp.
MNIRILIPCTLVLVALSAHAADITGAGSTFAAPIYAKWADAYKKSGGGKVNYQGIGSSGGLKQINAKTVDFAGSDAPLKDDELAKAGLFQFPTVVGGVVPVVNVPGVKAGELTLSGPVLGDIYLGKITKWNDPAITALNPKVKLSDTDIAVVRRADGSGTSFIWTNYLSKVNGTWKSKVGEGTTVNWPTGTGGKGNDGVAAFVQRLPGAIGYVEWAYAKKNNMVYTALKNSTGTVVEPKTETFKAAAAGANWSKSFYQILTDEPGKDAWPVVGATFVLLHATQEKPAQGAETLKFFDWAFHNGNQAASDLDYISLPDSVVAEIRKQWKAKVKDASGKPVAN

SEQ ID NO: 3133 - DNA, 1041 bp, Methylibium petroleiphilum
  CDS (1)..(1041): transl_table=11
atgaacgtttctctcctccgctccaccctcgcggcggtcgcgctgatcgccgtggccggcactgcctcggcgcaggacatcaccggcgccggcgcctccttcccggccccggtctattcgaagtgggccgatgcgtacaacaaggccaccggcgcgcgcctcaactaccagtcgatcggttcgggcggcgggatcaagcagatcaaggccaagacggtcgatttcggtgcgtccgatgcgccgctgaaggacgaagagctggccaaggacggcatggtgcagttcccgaccgtgatcggcggcgtggtcccggtcgtcaacatcaagggcatcgccccaggccagatgaagctgaccggccaggtgctgggtgacatctatctggggaagatcaccaagtggaacgaccccgcgatcgccgcgctcaacgccggcgtgacgctgcccgatgcctcgatcgccgcggtgcgccgcgccgacggttcgggcaccaccttcctgttcacgaactacctgtccaaggtcaacgcggaatggaagaccaaggtcggtgaaggcaccgcggtcaactggccgaccggcgctggcggcaagggcaacgagggcgtgtcggctttcgtgcagcgtctgccgaactcgatcggctatgtcgagtacgcgtacgccaagcagaacaagatgtcgcacgtgatgctgaagaacagggacggccagttcgtcggtccggacgaagacaacttcaaggccgccgccgccggcgcggaatgggcgaagagcttctaccaggtcctgaccgagcagccgggcaaggaagcctggccgatcaccggcgcgaccttcatcctgatgcacaagtctcaggacaagcccgagagtgcctccaacgcgctgaagttcttcgagtgggcctacagcagcggcgacaagatggcggccgacctcgactacgttccgatgcccgacaccgtcaagacgatgatccgcaagctgtgggcggacaacatcaaggacgcctccggcaaggccgtcgcctacaagtga

SEQ ID NO: 3134 - protein, 346 aa, Methylibium petroleiphilum
MNVSLLRSTLAAVALIAVAGTASAQDITGAGASFPAPVYSKWADAYNKATGARLNYQSIGSGGGIKQIKAKTVDFGASDAPLKDEELAKDGMVQFPTVIGGVVPVVNIKGIAPGQMKLTGQVLGDIYLGKITKWNDPAIAALNAGVTLPDASIAAVRRADGSGTTFLFTNYLSKVNAEWKTKVGEGTAVNWPTGAGGKGNEGVSAFVQRLPNSIGYVEYAYAKQNKMSHVMLKNRDGQFVGPDEDNFKAAAAGAEWAKSFYQVLTEQPGKEAWPITGATFILMHKSQDKPESASNALKFFEWAYSSGDKMAADLDYVPMPDTVKTMIRKLWADNIKDASGKAVAYK

SEQ ID NO: 3135 - DNA, 1002 bp, Ralstonia metallidurans
  CDS (1)..(1002): transl_table=11
atgggcagacacatcgcggcgctggcgctgctattcgccgcggtcagtgcatttgccggagatgtcactggggctggttccacattcgtctacccgctgatggcgaaatgggcggccacgtattacgccaggacaggccggcagatcgattaccaacccatcggctcaggcaacggcatccggcagatcaaggcggcaagcatcacgttcggcaccacggacatgccgctcaaacccgaagagctcgagcgcgcaggactggcccagtttcccatcgcggtaggcggcgtcgtgccggtgatcaacctgcagggcattggcgcggggcagatccacatgacgggcgcgctgctggccgatatctatcgcggcaagatcgccaactggaacgatgcggccattgcgtcggccaatcccggcgtgcagtttcccgacctgaagatcacggtggtccatcgcagcgacggctcgggcaccacgttcaactggaccgactacctttccaaggtcagccccgaatggaaggcggcagtcggggcaggcaccacggtgcgttggcccatcgggatgaacgcgagcggcaatgagggcgtatcgctctatatccacaatattcgcggcgcgatcggctatgtggaactgacctacgcgctgcagaagagcctgccctatgcgttggtccagaaccgcgatggtctctacgtgaagccttcgcgcgaatcgttcagcgccgcggtgacggccgtggaatggaacccgcggctcgacttctatcaggtgctgaccaatgcgccgggcccgaacgcgtggccgatcacgggcacggtcttcgtgctgatgcagcgttccgccgcgcacccgtcgaatacgaaggatgcgctggcgttctttcagtgggcgcttgccgaagggcaatccgatgcgtcggccgagcactacgtggcactgccgccggaactggtgaagcaggtgatcgcgtactgggcggagaccttcaagtag

SEQ ID NO: 3136 - protein, 333 aa, Ralstonia metallidurans
MGRHIAALALLFAAVSAFAGDVTGAGSTFVYPLMAKWAATYYARTGRQIDYQPIGSGNGIRQIKAASITFGTTDMPLKPEELERAGLAQFPIAVGGVVPVINLQGIGAGQIHMTGALLADIYRGKIANWNDAAIASANPGVQFPDLKITVVHRSDGSGTTFNWTDYLSKVSPEWKAAVGAGTTVRWPIGMNASGNEGVSLYIHNIRGAIGYVELTYALQKSLPYALVQNRDGLYVKPSRESFSAAVTAVEWNPRLDFYQVLTNAPGPNAWPITGTVFVLMQRSAAHPSNTKDALAFFQWALAEGQSDASAEHYVALPPELVKQVIAYWAETFK

SEQ ID NO: 3137 - DNA, 1032 bp, Ralstonia metallidurans
  CDS (1)..(1032): transl_table=11
atgaagctagtcaagactgccgtagcaggcatcgtgtcgattgtggtggcgggtactgcgttcgcggcggaaattaccggtgctggcgcttccttcccggcgcctgtgtattccaagtgggctgatgcctaccaaaaagcaacgggcaacaaggtcaactatcaatctatcggctcgtcgggtggtatcaagcagattggcgccaagaccgtcgatttcggcgcttcggacgctccgctgaaggacgacgagctggcaaagggcaacctgatccagttcccgaccgtgatcggtggcgtggtgccggtgattaacctgcaaggcgtgaagccgggcgagctcatcatcacgggtgacgtgctggccaacatctacctgggcaagatcaagaagtgggacgatcccgcgatcaaggccctgaacccgaaggtccacctgccgagccaggacatcctgccggtgcgtcgtgccgacggctcgggcacgacgttcatcttcacgaactacctctcgaaggtcagtcctgactggaagaactcggtgggcgaaggcaccacggtgaactggccgggcggtggcacgggcggcaagggtaacgaaggcgttgccgccttcgtgcagcgtctgaatggcgccatcggctacgtcgagtatgcctatgccaagcagaacaagatgacgtacctgacgatgaagaactcggccggcgagatcgtcaagcctagcgacgaagccttcaaagcggccgctgccggcgctgactggagcaagtcgttctaccagatcctgacgaacgagccgggcaagaccgcatggccgatcgctggcgccaccttcatcctgctgcacaagacgcaggataaggcggcacaaggccaggaagtcatgaagttcttcgactgggcctacaagagcggtggcacgatggctgctgagctggactacgtaccgctgccggaatcggtcgtgaaccagattcgctcgacctggaagagcagcgtcaaggacggttcgggtaaggcactgtactaa

SEQ ID NO: 3138 - protein, 343 aa, Ralstonia metallidurans
MKLVKTAVAGIVSIVVAGTAFAAEITGAGASFPAPVYSKWADAYQKATGNKVNYQSIGSSGGIKQIGAKTVDFGASDAPLKDDELAKGNLIQFPTVIGGVVPVINLQGVKPGELIITGDVLANIYLGKIKKWDDPAIKALNPKVHLPSQDILPVRRADGSGTTFIFTNYLSKVSPDWKNSVGEGTTVNWPGGGTGGKGNEGVAAFVQRLNGAIGYVEYAYAKQNKMTYLTMKNSAGEIVKPSDEAFKAAAAGADWSKSFYQILTNEPGKTAWPIAGATFILLHKTQDKAAQGQEVMKFFDWAYKSGGTMAAELDYVPLPESVVNQIRSTWKSSVKDGSGKALY

SEQ ID NO: 3139 - DNA, 1026 bp, Burkholderia xenovorans
  CDS (1)..(1026): transl_table=11
atgaatctcaagcaacttacgctgattctatgtgcgttgtgtgccagcgccgcgcacgccgcagacatcaccggcgcgggcagcacctttgccgcgccgatttacacgaagtgggccgacgcctatcagaaaacgggcggcggcaaagtcaattatcagggtattggttcgtcgggcggcatcaagcagatcctcgccaagacggtggacttcgccggctcggacgccccgctgaaagacgacgaattagccaaagacggcctgttccagtttcccacggtggttggcggcgtggtgcctgccatcaacgtgccgggactgaaggcgggcgaactggtgctgtcgggtgaagtactcggcgacatctatctgggcaagatcaagaagtggaacgatccccagatagccgcgttgaacccgaagatcaagttgccggatacggacattgccgtggttcgccgtgccgatggttcgggtacgagcttcatctggacgaactacctgtccaaggtgaatccggagtggaaatccaaagtgggcgaaggcgcgacggtgaactggcctaccggcactggcggcaagggtaacgacggcgtcgccgcattcgttcagcgcctgccgggcgcgataggctatgtcgaatgggcgtatgcgaagcagaaccacatgacctacgcctcgatgaaaaatgcttcgggcaccatagtcgagccgacaaccgacaccttcaaggccgcagcggcgggcgccgactggtcgaagtcgttctatcagatcctgacgaacgagccgggcaagaacgcgtggcccgtggtcggcgcaacattcgtgctgctgtatacgacgcaggacaaagcagcgcaaggcgccgaaacgctgaagttcttcgattgggcgttcaggaacggcggcaaggcagccgacgatctcgactatatttcgctgccggaatcggtaacggctgaaatccgcgcgcagtggaagcagaaggtgaaggacgcgtcgggcaagccggtcgcgccataa

SEQ ID NO: 3140 - protein, 341 aa, Burkholderia xenovorans
MNLKQLTLILCALCASAAHAADITGAGSTFAAPIYTKWADAYQKTGGGKVNYQGIGSSGGIKQILAKTVDFAGSDAPLKDDELAKDGLFQFPTVVGGVVPAINVPGLKAGELVLSGEVLGDIYLGKIKKWNDPQIAALNPKIKLPDTDIAVVRRADGSGTSFIWTNYLSKVNPEWKSKVGEGATVNWPTGTGGKGNDGVAAFVQRLPGAIGYVEWAYAKQNHMTYASMKNASGTIVEPTTDTFKAAAAGADWSKSFYQILTNEPGKNAWPVVGATFVLLYTTQDKAAQGAETLKFFDWAFRNGGKAADDLDYISLPESVTAEIRAQWKQKVKDASGKPVAP

SEQ ID NO: 3141 - DNA, 1029 bp, Geobacter metallireducens
  CDS (1)..(1029): transl_table=11
atgctcaaagcattacggaaaagtctcgcgatcctcgcgactctggcagtaaccgccgcggccggccaggccggtgcggaaaccctcatcaacggcgcaggcgccaccttcccctacccgctctactccaagtggttcagcgagtacgccaagatcgatccctcggtgaaattcaactaccagtccatcggcagcggcggcggcatcaagcagatcactgcccagaccgtcgacttcggcgccagcgacaagttcctgagcgatgcggaactgaaggcggcccccggcaagctcctccacattccgaccgtcatgggtgcggtcgtcgtaacctacaaccttccgggcgctccgaaggggctgaagctcaaggctgaagacgtggccgacatcttcctcggcaagatcagcaagtggaacgatccgcgcatcgcagacgacaaccccggcgtcaagcttcccaatagcccgatcatcgtcgtgcaccgctccgacggcagcggcaccaccagcatcttcaccgacttcctctccggcgtgaaccaggagtgggccaagaaggtcggcaaaggtgcctcggtcaagtggcccatcggcctcggcggcaaggggaacgagggtgttgccggccagatcaagaccactgcaaactccatcggctatgttgagcttgcctatgccttcgagaacaagctcccctacgcgaccctcaagaacaagagcggcagctgggtagtcccctccatccagacgacgagcgcagcggcagccgcagccgtcaaacacatgccggctgattaccggatctccctggtgaaccagccgggcaaggacgcctaccccatcgtcggcttcacctggctcctcgtgtacgaaaagcagaaagacgccgtcaaagggaaaaagctggtggaattcctgaactggagcctccgcaacggccagaagatggcagcaccgctcctctacgcgccgctccccgagaacgtcaagaagatggtggagaagaccatcaagaccgtcaagtaa

SEQ ID NO: 3142 - protein, 342 aa, Geobacter metallireducens
MLKALRKSLAILATLAVTAAAGQAGAETLINGAGATFPYPLYSKWFSEYAKIDPSVKFNYQSIGSGGGIKQITAQTVDFGASDKFLSDAELKAAPGKLLHIPTVMGAVVVTYNLPGAPKGLKLKAEDVADIFLGKISKWNDPRIADDNPGVKLPNSPIIVVHRSDGSGTTSIFTDFLSGVNQEWAKKVGKGASVKWPIGLGGKGNEGVAGQIKTTANSIGYVELAYAFENKLPYATLKNKSGSWVVPSIQTTSAAAAAAVKHMPADYRISLVNQPGKDAYPIVGFTWLLVYEKQKDAVKGKKLVEFLNWSLRNGQKMAAPLLYAPLPENVKKMVEKTIKTVK

SEQ ID NO: 3143 - DNA, 1077 bp, Trichodesmium erythraeum
  CDS (1)..(1077): transl_table=11
atgaaattttgtataaatctttctaggataactcatcttactgcaaaagtatctgccgttgtcctaacaattggtttaacagcttgtagtagtagtgatcttggaagttctcaagtaagccttttaggtgcgggagcttcttttccatcacctatatatcaacgttggtttcaagacttggggaacagtggcctaaacctacaagtagattatcagtcagtaggtagcggcgctggtgttgagagatttactcaagaactagtagattttggtgcttctgacgtcgcaatgaaagatgaggaaatttccaaagtaaaccgaggagttatcctgctaccaatgactgcaggtagtattgttttagcttacaacttgccgaatgtttctaatctcaaactttccagggaagcttatgtagatatccttttgggtaaaattaaaaaatggaatgacccgaagatcaaagcaattaaccctggcgtaactctcagagatcaaaaaattacagttatatatcgctctgatggtagtggtacaactggagttttcacaaagcatttgagtgctattagtccagaatggaaacagacagtaggggaaggtaaaaccgttcaatggcctgtaggtattggtggtgccaagaacgatggtgtaactgctcaaattactcaaactgaaggagcaataggatatgttgagtatggttatgctaagaatgctggtttgaatatggcttccctacaaaacaaatctggtaaatatataaatcctacttttgaatcagcagaagcaactttaggagcagttgcactacctgaaaatttacgagcttttattagtgacccagaaggggataattcttatccaattgtaacttacacttggattcttgcctatagtaaatatgatgacgcagccaaagctcaaggtgtggaaaaaatgattgaatatggtttaaatgaaggtcaaaaagttagttctgagttaggttatattcctttacctaagaatgtacgtcaaaaagttctagaaactgcggataaaattagtcaagattacaacatgaccctcaaatag

SEQ ID NO: 3144 - protein, 358 aa, Trichodesmium erythraeum
MKFCINLSRITHLTAKVSAVVLTIGLTACSSSDLGSSQVSLLGAGASFPSPIYQRWFQDLGNSGLNLQVDYQSVGSGAGVERFTQELVDFGASDVAMKDEEISKVNRGVILLPMTAGSIVLAYNLPNVSNLKLSREAYVDILLGKIKKWNDPKIKAINPGVTLRDQKITVIYRSDGSGTTGVFTKHLSAISPEWKQTVGEGKTVQWPVGIGGAKNDGVTAQITQTEGAIGYVEYGYAKNAGLNMASLQNKSGKYINPTFESAEATLGAVALPENLRAFISDPEGDNSYPIVTYTWILAYSKYDDAAKAQGVEKMIEYGLNEGQKVSSELGYIPLPKNVRQKVLETADKISQDYNMTLK

SEQ ID NO: 3145 - DNA, 24 bp, Artificial sequence
  primer
atgaaagttatgcgtaccaccgtc

SEQ ID NO: 3146 - DNA, 24 bp, Artificial sequence
  primer
atgaaagttatgcgtaccaccgtc

SEQ ID NO: 3147 - protein, 357 aa, Artificial sequence
  consensus sequence
  Variant (4)..(5): Xaa in position 4 to 5 is any amino acid
  Variant (7)..(8): Xaa in position 7 to 8 is any amino acid
  Variant (10)..(10): Xaa in position 10 is any amino acid
  Variant (12)..(13): Xaa in position 12 to 13 is any amino acid
  Variant (15)..(17): Xaa in position 15 to 17 is any amino acid
  Variant (19)..(23): Xaa in position 19 to 23 is any amino acid
  Variant (24)..(31): Xaa in position 24 to 31 is any or no amino acid
  Variant (35)..(36): Xaa in position 35 to 36 is any amino acid
  Variant (39)..(40): Xaa in position 39 to 40 is any amino acid
  Variant (42)..(43): Xaa in position 42 to 43 is any amino acid
  Variant (46)..(48): Xaa in position 46 to 48 is any amino acid
  Variant (54)..(54): Xaa in position 54 is any amino acid
  Variant (57)..(57): Xaa in position 57 is any amino acid
  Variant (59)..(62): Xaa in position 59 to 62 is any amino acid
  Variant (63)..(67): Xaa in position 63 to 67 is any or no amino acid
  Variant (69)..(72): Xaa in position 69 to 72 is any amino acid
  Variant (73)..(80): Xaa in position 73 to 80 is any or no amino acid
  Variant (82)..(82): Xaa in position 82 is any amino acid
  Variant (84)..(84): Xaa in position 84 is any amino acid
  Variant (86)..(88): Xaa in position 86 to 88 is any amino acid
  Variant (90)..(91): Xaa in position 90 to 91 is any amino acid
  Variant (93)..(95): Xaa in position 93 to 95 is any amino acid
  Variant (97)..(97): Xaa in position 97 is any amino acid
  Variant (98)..(98): Xaa in position 98 is any or no amino acid
  Variant (100)..(101): Xaa in position 100 to 101 is any amino acid
  Variant (102)..(111): Xaa in position 102 to 111 is any or no amino acid
  Variant (113)..(113): Xaa in position 113 is any amino acid
  Variant (115)..(121): Xaa in position 115 to 121 is any amino acid
  Variant (123)..(123): Xaa in position 123 is any amino acid
  Variant (126)..(129): Xaa in position 126 to 129 is any amino acid
  Variant (131)..(131): Xaa in position 131 is any amino acid
  Variant (133)..(134): Xaa in position 133 to 134 is any amino acid
  Variant (136)..(138): Xaa in position 136 to 138 is any amino acid
  Variant (141)..(142): Xaa in position 141 to 142 is any amino acid
  Variant (143)..(147): Xaa in position 143 to 147 is any or no amino acid
  Variant (150)..(152): Xaa in position 150 to 152 is any amino acid
  Variant (154)..(155): Xaa in position 154 to 155 is any amino acid
  Variant (157)..(157): Xaa in position 157 is any amino acid
  Variant (159)..(159): Xaa in position 159 is any amino acid
  Variant (165)..(168): Xaa in position 165 to 168 is any amino acid
  Variant (170)..(170): Xaa in position 170 is any amino acid
  Variant (173)..(177): Xaa in position 173 to 177 is any amino acid
  Variant (178)..(179): Xaa in position 178 to 179 is any or no amino acid
  Variant (181)..(182): Xaa in position 181 to 182 is any amino acid
  Variant (183)..(184): Xaa in position 183 to 184 is any or no amino acid
  Variant (186)..(186): Xaa in position 186 is any amino acid
  Variant (188)..(189): Xaa in position 188 to 189 is any amino acid
  Variant (190)..(190): Xaa in position 190 is any or no amino acid
  Variant (192)..(192): Xaa in position 192 is any amino acid
  Variant (195)..(197): Xaa in position 195 to 197 is any amino acid
  Variant (198)..(202): Xaa in position 198 to 202 is any or no amino acid
  Variant (204)..(204): Xaa in position 204 is any amino acid
  Variant (208)..(208): Xaa in position 208 is any amino acid
  Variant (211)..(213): Xaa in position 211 to 213 is any amino acid
  Variant (215)..(220): Xaa in position 215 to 220 is any amino acid
  Variant (226)..(227): Xaa in position 226 to 227 is any amino acid
  Variant (230)..(231): Xaa in position 230 to 231 is any amino acid
  Variant (233)..(242): Xaa in position 233 to 242 is any amino acid
  Variant (243)..(250): Xaa in position 243 to 250 is any or no amino acid
  Variant (252)..(252): Xaa in position 252 is any amino acid
  Variant (253)..(253): Xaa in position 253 is any or no amino acid
  Variant (255)..(255): Xaa in position 255 is any amino acid
  Variant (257)..(263): Xaa in position 257 to 263 is any amino acid
  Variant (266)..(280): Xaa in position 266 to 280 is any amino acid
  Variant (281)..(295): Xaa in position 281 to 295 is any or no amino acid
  Variant (297)..(299): Xaa in position 297 to 299 is any amino acid
  Variant (300)..(300): Xaa in position 300 is any or no amino acid
  Variant (302)..(305): Xaa in position 302 to 305 is any amino acid
  Variant (307)..(308): Xaa in position 307 to 308 is any amino acid
  Variant (310)..(322): Xaa in position 310 to 322 is any amino acid
  Variant (323)..(331): Xaa in position 323 to 331 is any or no amino acid
  Variant (333)..(334): Xaa in position 333 to 334 is any amino acid
  Variant (336)..(339): Xaa in position 336 to 339 is any amino acid
  Variant (340)..(341): Xaa in position 340 to 341 is any or no amino acid
  Variant (343)..(344): Xaa in position 343 to 344 is any amino acid
  Variant (345)..(345): Xaa in position 345 is any or no amino acid
  Variant (347)..(347): Xaa in position 347 is any amino acid
  Variant (348)..(350): Xaa in position 348 to 350 is any or no amino acid
  Variant (352)..(352): Xaa in position 352 is any amino acid
  Variant (354)..(355): Xaa in position 354 to 355 is any amino acid
GAGXXFXXPXYXXWXXXYXXXXXXXXXXXXXNYQXXGSXXGXXQIXXXTVDFGXSDXPXXXXXXXXXLXXXXXXXXXXXXLXQXPXXXGXXVXXXNXXGXXXXXXXXXXXXLXLXXXXXXXIXLGXXXXWXDXXIXXXNPXXXXXXXLPXXXIXXVXRXDGSGTXXXXTXYLXXXXXXXWXXXXGXGXXXVXWPXXXXXXXXGXKGNXGVXXXVXXXXXXIGYVEXXYAXXNXXXXXXXXXXXXXXXXXXGXXVXPXXXXXXXAAXXXXXXXXXXXXXXXXXXXXXXXXXXXXXXGXXXXPXXXXTXXLXXXXXXXXXXXXXXXXXXXXXXFXXWXXXXXXGXXXAXXXXLXYXXLP

SEQ ID NO: 3148 - protein, 28 aa, Artificial sequence
  protein pattern
  Variant (2)..(2): Xaa in position 2 is any amino acid
  Variant (3)..(3): Xaa in position 3 is any or no amino acid
  Variant (5)..(5): Xaa in position 5 is any amino acid
  Variant (6)..(6): Xaa in position 6 is any or no amino acid
  Variant (8)..(8): Xaa in position 8 is Ala or Ser
  Variant (14)..(14): Xaa in position 14 is Ser or Thr
  Variant (15)..(16): Xaa in position 15 to 16 is any amino acid
  Variant (17)..(17): Xaa in position 17 is Phe or Trp
  Variant (18)..(18): Xaa in position 18 is Ser, Thr or Val
  Variant (19)..(20): Xaa in position 19 to 20 is any amino acid
  Variant (22)..(22): Xaa in position 22 is Ala, Asp, Asn, Ser, Thr or Val
  Variant (23)..(27): Xaa in position 23 to 27 is any amino acid
IXXVXXRXDGSGTXXXXXXXLXXXXXXW

SEQ ID NO: 3149 - protein, 27 aa, Artificial sequence
  protein pattern
  Variant (4)..(4): Xaa in position 4 is Gly or Ser
  Variant (5)..(5): Xaa in position 5 is Ile or Val
  Variant (8)..(8): Xaa in position 8 is any or no amino acid
  Variant (10)..(10): Xaa in position 10 is any or no amino acid
  Variant (12)..(13): Xaa in position 12 to 13 is any amino acid
  Variant (14)..(14): Xaa in position 14 is any or no amino acid
  Variant (16)..(20): Xaa in position 16 to 20 is any amino acid
  Variant (21)..(21): Xaa in position 21 is Ile, Leu or Val
  Variant (22)..(22): Xaa in position 22 is any amino acid
  Variant (24)..(24): Xaa in position 24 is Ala or Gly
  Variant (25)..(25): Xaa in position 25 is Ala, Gly or Ser
  Variant (26)..(26): Xaa in position 26 is Ser or Thr
NYQXXGSXGXGXXXQXXXXXXXFXXXD

SEQ ID NO: 3150 - protein, 25 aa, Artificial sequence
  protein pattern
  Variant (3)..(3): Xaa in position 3 is Asn or Ser
  Variant (4)..(4): Xaa in position 4 is Ala, Asp, Glu, Gln or Ser
  Variant (5)..(5): Xaa in position 5 is Ala or Gly
  Variant (6)..(6): Xaa in position 6 is Ile or Val
  Variant (7)..(15): Xaa in position 7 to 15 is any amino acid
  Variant (16)..(16): Xaa in position 16 is Ala, Gly, Ser or Thr
  Variant (17)..(17): Xaa in position 17 is Ile or Val
  Variant (22)..(23): Xaa in position 22 to 23 is any or no amino acid
KGXXXXXXXXXXXXXXXGYVEXXYA

SEQ ID NO: 3151 - protein, 24 aa, Artificial sequence
  protein pattern
  Variant (2)..(8): Xaa in position 2 to 8 is any amino acid
  Variant (10)..(10): Xaa in position 10 is Asp, Asn or Ser
  Variant (12)..(13): Xaa in position 12 to 13 is any amino acid
  Variant (15)..(17): Xaa in position 15 to 17 is any amino acid
  Variant (19)..(22): Xaa in position 19 to 22 is any amino acid
IXXXXXXXWXDXXIXXXNXXXXLP

SEQ ID NO: 3152 - protein, 14 aa, Artificial sequence
  protein pattern
  Variant (4)..(4): Xaa in position 4 is Ala or Ser
  Variant (5)..(5): Xaa in position 5 is Ser or Thr
  Variant (7)..(8): Xaa in position 7 to 8 is any or no amino acid
  Variant (10)..(10): Xaa in position 10 is Ile, Leu or Val
  Variant (11)..(11): Xaa in position 11 is any amino acid
  Variant (12)..(12): Xaa in position 12 is Ala, Glu, Gly, Asn, Gln, Ser or Thr
  Variant (13)..(13): Xaa in position 13 is any amino acid
GAGXXFXXPXXXXW

SEQ ID NO: 3153 - DNA, 321 bp, Saccharomyces cerevisiae
  CDS (1)..(321)
atgtaccaaacctcgcctctttctttgttctattttcaggttcttgtaccaaaatttttggagtgttttctgtgtttcccatatcataaaataagtttagtggctcttcttagtttcttttattgccaacttcagacaaacatgatcatattattgagccaaataaagcgtttcctgtataggcagataatgattgcattgaaaataaaagccaaaaaattttggttcatatttaagtattttaatgtcagttgtgacgctagacttttcaatgaactcttttatatctttcaaacgtatgtctccgtggattcaaaatag

SEQ ID NO: 3154 - protein, 106 aa, Saccharomyces cerevisiae
MYQTSPLSLFYFQVLVPKFLECFLCFPYHKISLVALLSFFYCQLQTNMIILLSQIKRFLYRQIMIALKIKAKKFWFIFKYFNVSCDARLFNELFYIFQTYVSVDSK

SEQ ID NO: 3155 - DNA, 24 bp, Artificial sequence
  primer
atgtaccaaacctcgcctctttct

SEQ ID NO: 3156 - DNA, 25 bp, Artificial sequence
  primer
ctattttgaatccacggagacatac

SEQ ID NO: 3157 - DNA, 3402 bp, Saccharomyces cerevisiae
  CDS (1)..(3402)
atgctaagaacaagaaccacaaagacccttagcacagtggcgaggaccacaagagctatccaatattaccgatctatcgctaagactgctgcagtttctcaaagaaggttcgcatcgaccttgaccgtgcgtgacgtagagaatatcaaacctagccatattattaagagtccaacatggcaagagttccagcatcaattgaaggatccaaggtacatggaacactttgcacaacttgatgcacagtttgctcggcatttcatggctacaaacagcggcaaaagtattctggcgaaagatgatagtacatctcagaaaaaggatgaagatgtcaagatagtacctgatgaaaaagatacagacaatgatgttgagcccacgcgagatgatgaaattgttaataaggaccaagaaggtgaagcttcgaaaaactccagaagctccgcttctggaggtggacagtcatcatccagtcgatcggattctggagatggaagttcgaaacaaaagcctccaaaggatgtaccagaagtatacccgcaaatgctagcattaccaatagccagacggcccttatttccagggttctacaaggcggttgtgatatcggacgaaagagttatgaaggcaatcaaggaaatgttagaccgccagcaaccctacattggcgctttcatgttgaagaactcggaagaagatactgatgtaatcacagataaaaatgatgtatacgatgttggtgttctggctcaaataactagcgctttcccgagtaaagacgaaaagacgggcactgaaacaatgactgctcttttatatcctcacaggagaataaaaattgatgaattatttccaccaaacgaggaaaaggaaaaatcaaaagaacaagcaaaggatacggatactgaaacgaccgtcgttgaagacgctaacaacccagaagaccaagaaagcaccagccctgctacgcctaagttggaggatattgtggtggagaggataccagactcagaattgcaacatcataagagagtagaagccactgaagaagagtctgaagaattagacgatattcaagaaggtgaggacattaaccccacagaattcttaaaaaattataatgtttcccttgtcaatgtgttgaatttagaagatgaaccgtttgatagaaagtcacccgttattaatgcgctaacatcagaaatattgaaggtatttaaagaaatttctcaattgaacacgatgttcagagaacaaattgcaactttttctgcttcaattcaatctgcgaccacgaacatttttgaggaaccagctagattggcagattttgccgctgctgtttctgccggcgaagaagacgaattacaagacatactgtcatctttaaacattgagcacagactagaaaagtcgctactagtccttaagaaagaattgatgaatgccgaattacagaacaaaatctccaaagatgtagagacaaagattcaaaagagacaaagagaatactatttgatggaacaattaaagggcatcaaaagagaattaggtattgacgacggccgtgacaaattgattgacacttataaagaaagaatcaagtcattaaaattgcctgatagcgttcaaaaaattttcgatgatgagataactaaattaagtaccttggagacttctatgtccgaatttggcgttatcagaaactatttggattggttaacatcgatcccatggggaaaacattccaaagaacagtattccattccgagagcaaagaaaattttagatgaagatcattatggtatggtagatgtcaaggatcgtatcttggagtttattgccgtcggtaaactattgggtaaagtcgatggtaaaatcatatgtttcgtaggacccccaggtgttggtaaaacgtccataggtaaatctatcgctagagctcttaacaggaaattcttccgattttctgtaggcggtatgacggacgtggcagaaataaaaggtcataggagaacgtatattggtgccttacctggcagagtagttcaagcattaaagaagtgccaaactcaaaatcctttgattttgatagatgaaatcgataagattggacacggcggcatacacggcgatccgtccgcggcattgttagaagtattggaccctgaacaaaacaacagcttcttggataactacttggatattcctattgacttatcaaaagtgcttttcgtttgcactgctaactctttggaaactattccaagacctttactggatcgtatggaagtcattgagttgacaggatatgttgctgaagacaaggttaagattgccgagcagtatttagttccaagtgccaagaaaagcgctggtctagaaaactctcatgttgatatgacagaagatgcaataacagcgttaatgaagtactactgtagagaaagtggtgtaaggaatttgaaaaaacacatcgagaaaatataccgtaaagcagccctacaagtggtaaagaagttgagtattgaagattccccaacgtcatcagccgacagcaagcctaaagaaagcgtttcttccgaagaaaaggcggaaaataacgccaaaagctcatcggagaagactaaggacaataattcggaaaagacaagcgatgacattgaagccttaaagacctctgaaaagatcaatgtttccatatcccagaaaaacctaaaagattacgttgggcctccagtctacactacagaccggttatacgaaacaactccaccaggggtagttatggggttggcgtggactaatatgggaggttgctcactttatgtagaatctgtccttgaacaacctttacacaactgcaagcatccaacatttgaaaggaccgggcaactgggagatgttatgaaggaatcatcaaggcttgcttattcattcgccaagatgtatttagcacaaaaattccctgagaacagattttttgaaaaggcgtctatccacttgcattgtcctgaaggtgctacccctaaagatggtccatctgcaggtgtcactatggccacttccttcctttccctagcattgaataagtcgattgacccaacggttgcgatgaccggtgaattgacacttaccggtaaagttttacgtatcggtgggttgagagaaaaagctgtggccgctaaaagatctggtgccaagactattattttccctaaagataacttaaatgattgggaggaacttccagacaatgtaaaggaagggttggaacctttagctgctgattggtataatgatatattccaaaaattattcaaggatgtgaatacgaaagaaggtaattcagtatggaaggctgaatttgagattttggatgctaaaaaggaaaaggactaa

SEQ ID NO: 3158 - protein, 1133 aa, Saccharomyces cerevisiae
MLRTRTTKTLSTVARTTRAIQYYRSIAKTAAVSQRRFASTLTVRDVENIKPSHIIKSPTWQEFQHQLKDPRYMEHFAQLDAQFARHFMATNSGKSILAKDDSTSQKKDEDVKIVPDEKDTDNDVEPTRDDEIVNKDQEGEASKNSRSSASGGGQSSSSRSDSGDGSSKQKPPKDVPEVYPQMLALPIARRPLFPGFYKAVVISDERVMKAIKEMLDRQQPYIGAFMLKNSEEDTDVITDKNDVYDVGVLAQITSAFPSKDEKTGTETMTALLYPHRRIKIDELFPPNEEKEKSKEQAKDTDTETTVVEDANNPEDQESTSPATPKLEDIVVERIPDSELQHHKRVEATEEESEELDDIQEGEDINPTEFLKNYNVSLVNVLNLEDEPFDRKSPVINALTSEILKVFKEISQLNTMFREQIATFSASIQSATTNIFEEPARLADFAAAVSAGEEDELQDILSSLNIEHRLEKSLLVLKKELMNAELQNKISKDVETKIQKRQREYYLMEQLKGIKRELGIDDGRDKLIDTYKERIKSLKLPDSVQKIFDDEITKLSTLETSMSEFGVIRNYLDWLTSIPWGKHSKEQYSIPRAKKILDEDHYGMVDVKDRILEFIAVGKLLGKVDGKIICFVGPPGVGKTSIGKSIARALNRKFFRFSVGGMTDVAEIKGHRRTYIGALPGRVVQALKKCQTQNPLILIDEIDKIGHGGIHGDPSAALLEVLDPEQNNSFLDNYLDIPIDLSKVLFVCTANSLETIPRPLLDRMEVIELTGYVAEDKVKIAEQYLVPSAKKSAGLENSHVDMTEDAITALMKYYCRESGVRNLKKHIEKIYRKAALQVVKKLSIEDSPTSSADSKPKESVSSEEKAENNAKSSSEKTKDNNSEKTSDDIEALKTSEKINVSISQKNLKDYVGPPVYTTDRLYETTPPGVVMGLAWTNMGGCSLYVESVLEQPLHNCKHPTFERTGQLGDVMKESSRLAYSFAKMYLAQKFPENRFFEKASIHLHCPEGATPKDGPSAGVTMATSFLSLALNKSIDPTVAMTGELTLTGKVLRIGGLREKAVAAKRSGAKTIIFPKDNLNDWEELPDNVKEGLEPLAADWYNDIFQKLFKDVNTKEGNSVWKAEFEILDAKKEKD

SEQ ID NO: 3159 - DNA, 3125 bp, Glycine max
  CDS (1)..(2925)
atgttgaagctcattgcatcctcctcgcgcatccaccgggtgcaccccacggtgctccgtcccgcacacgattccgcctcgccgctgctcagagtgctgagttctctcgtcgggttaagctggagaaacactaatgttggaggcagcgacagctccgatcgcgtggttgacgccggagtccaagccgccgatgagtccgagtcaaaggcctccgctatcgttcccacatatcccagacccgaagattatctcactgttttggcactaccattgatacatagaccacttttcccaggattttacatgccagtctttgttaaggatcccaaattattagcagctttacaggaaagtcgagaacgacaagccccatatgctggtgctttcctccttaaggacgagccagaggctgatcctagtgcagtatctagctctgacacagataagaatgtatatgatttaaaaggaaaagagttgtttaaccgtcttcacgaagttgggactcttgctcagatttcaagtatccatggggaccaggtgatcctgattggtcatcggcgtctacgtataacagagatggttagtgaggatccacttactgtaaaagttgatcatctcaaggataaaacttataacaaagacgatgatattataaaggccacgtcttttgaggttatatcaaccctaagagatgttcttaaaacaagttccctttggagagatcatgtccagacttacactaagcatataggtgattttacttatccaaggcttgcagattttggtgctgcaatatccggggcaaataaattgcaatgccaacaagttcttgaagagctagatgtgtataagcgattaaaacttacactggagttggtaaagaaagagatggaaataagcaaaattcaggcttgtgttgattcttgtcaggaatcaattgctaaagcaattgaagaaaagataagtggtgagcagcgtcgttacttgttaaatgagcagcttaaggccataaagaaggaactgggactggagactgatgacaaaacagctcttactggtaaattcagggaaaggattgagccaaagagagaaaaatgcccacctcatattttacaagttatagatgaagaacttgcaaagctacagctgttggaggctagttctagtgaattcagtgttacccgtaactacttagactggttgactgcactgccttgggctacttcaaatctcttgaattttaatcagttaattcccctatccagtgatgagaactttgatgttactcgggcgcaaaagattcttgatgaagaccattatggattaactgatgtgaaggaaaggatactggaattcatagctgttgggaaattaagagggacttcacaagggaaaattatctgtctttctggtccacctggagtgggcaaaacaagtattggtcgttcaattgcacgtgccttgaaccgaggattagctgatgtggctgaaatcaagggtcatcgtcgaacctatattggtgctatgccagggaagatggtacaatgccttaagaatgtgggcactgccaaccctcttgttttgattgatgagattgacaaattgggcagaggacatgctggtgatccagcaagtgctttgttagagcttctggatccagagcagaatgctaattttctggatcactatcttgatgttaccattgatctatcaaaggttctttttgtttgcactgcaaatgttgtggaaatgatacctaatcccctgttggatagaatggaggttgttgctattgctgggtatattactgatgagaagatgcatattgctagagattatctggagaagaccactcgtgaagcttgtggaataaagcctaaacaagtggaagtgactgatgctgctattcttgccctaatagaaaactactgccgagaagcaggggtcaggaatcttcaaaagcacatagaaaaaatttaccgaaagatagcgctacaactcgtgaggcaaggggaaatgattgatgcaaccgtggaaccaataaaagaaaatatagactctgatgaatttggtcaaaatacagttcaaaataagaactccgagttggtggagggtagtgatcctgaaaaagagggtgaaacctctgataaagttgacaaggtgcaaacagatctatcatctgatgaatctcaatgcctcgaggttgcaaaagaaagcgaggaagataaggaaattaaaacaaagactatagaaaaagtattggttgatgagtctaatttaactgactttgttggcaagcctgtcttccatgctgagcgcatctatgatcagacacccgttggtgttgttatgggtcttgcttggactgcaatgggtggttccacactgtatatagagaccacacttgttgaagaaggggagggaaaaggaacactgcaccccactggtcaattaggagatgtgatgaaagaaagtgctcagatagctcacactgttgccagagcaatactactggaaaaagaaccagaaaatcctttctttgcaaactcaaaactacacctccatgtccctgcaggggctacaccaaaggatggaccaagtgctggttgcacgatgaccacttcactgttgtcccttgccatgaagaagcctgtgaagaaggatctagcaatgactggggaagtgactcttacggggaagattcttcccattggcggggttaaagagaaaaccatagctgcaagaaggagtgaagttaagactattatattcccttcagctaacaggagagattttgatgagctagcacctaatgtgaaagaaggtcttgatgttcattttgttgatgactacatgcagatatttaatttggctttgggtgatgatcaatctcagaatatagagagagtcattaatgttctgtaggatcttgagatgaaacttgattctttgttgagctgggaaccagctaaatttggtactatattaatttagtaccaatggtttttggagtttctattcatcgcttgggctcaaggtcttgttctattatttccatttttcagacattccaattgtaataccatgtatatttatatttgagggattttttttaaaaaaaatta

SEQ ID NO: 3160 - protein, 974 aa, Glycine max
MLKLIASSSRIHRVHPTVLRPAHDSASPLLRVLSSLVGLSWRNTNVGGSDSSDRVVDAGVQAADESESKASAIVPTYPRPEDYLTVLALPLIHRPLFPGFYMPVFVKDPKLLAALQESRERQAPYAGAFLLKDEPEADPSAVSSSDTDKNVYDLKGKELFNRLHEVGTLAQISSIHGDQVILIGHRRLRITEMVSEDPLTVKVDHLKDKTYNKDDDIIKATSFEVISTLRDVLKTSSLWRDHVQTYTKHIGDFTYPRLADFGAAISGANKLQCQQVLEELDVYKRLKLTLELVKKEMEISKIQACVDSCQESIAKAIEEKISGEQRRYLLNEQLKAIKKELGLETDDKTALTGKFRERIEPKREKCPPHILQVIDEELAKLQLLEASSSEFSVTRNYLDWLTALPWATSNLLNFNQLIPLSSDENFDVTRAQKILDEDHYGLTDVKERILEFIAVGKLRGTSQGKIICLSGPPGVGKTSIGRSIARALNRGLADVAEIKGHRRTYIGAMPGKMVQCLKNVGTANPLVLIDEIDKLGRGHAGDPASALLELLDPEQNANFLDHYLDVTIDLSKVLFVCTANVVEMIPNPLLDRMEVVAIAGYITDEKMHIARDYLEKTTREACGIKPKQVEVTDAAILALIENYCREAGVRNLQKHIEKIYRKIALQLVRQGEMIDATVEPIKENIDSDEFGQNTVQNKNSELVEGSDPEKEGETSDKVDKVQTDLSSDESQCLEVAKESEEDKEIKTKTIEKVLVDESNLTDFVGKPVFHAERIYDQTPVGVVMGLAWTAMGGSTLYIETTLVEEGEGKGTLHPTGQLGDVMKESAQIAHTVARAILLEKEPENPFFANSKLHLHVPAGATPKDGPSAGCTMTTSLLSLAMKKPVKKDLAMTGEVTLTGKILPIGGVKEKTIAARRSEVKTIIFPSANRRDFDELAPNVKEGLDVHFVDDYMQIFNLALGDDQSQNIERVINVL

SEQ ID NO: 3161 - DNA, 2847 bp, Oryza sativa Japonica Group
  CDS (1)..(2847)
atgctgcgcgccgcggccgccaccaccgccgggttcctcccgccgcgtctggccgccgagacggcgcccgcggcaagggttgtggcggcggcgggtgccgaggtgaggtcgtcgccgctcctcagggctctaggggtgccgagaggcggcgccggcattgggagcgccacgccggggaggaggatgtacttcgcctccggctccgactcctccggaagcgccgccgacagcgactcggaggcgtcgtccgccgctggcgctggggaggaggagagcgagggcaacaggtcgtcctccgctgtcgctcccgccattatccgacccgaggactgccacacggtcatagctttgcctttgccacatcagccactatttccaggattttttatggcaatgtctgtaaaggatccgaagttgttgaaagctttagttgaaaaccacaaaagatctttcccatatgctggggcctttcttgtcaagaatgaggaagatactgacagtaacactgtcacacgttcagatccaaagaaaagcattcatggtctgaaagggaaagaattattgaagcatcttcatgaaattggcactcttgctaagataacaagcattcaaggagatcaggtgttgctacttggtcactgccgtttacggataactgaaatggttgaggaggacccacttacagttaaagttgaccatctaaaggtgtctaagcgtttgatgttgacccttgaattagtaaagagggaattggagattactaagttgcagcaatccatagcaaaagcaattgaagaaaaagtaactggcgagcagcgccgctacttattgaatgagcaacttaaagcaatcaagaaggagctaggcttggagactgatgataaaacagcgttgtcagaaaaatttaggaaaaggattgaatcgagaaaagagaaatgcccatctcatatcttacaagtcattgaagaagagctcactaaacttcaattactggaagctagttctagcgagttcagtgttaccagcaattatttagactggctaacagtattgccatggggggattacagtgatgaaaactttgatgttcttcgtgctcaacgcattcttgatgaagatcactatggtctaactgatgtaaaagaaagaatattggagtttatagcagttggaaaattaagaggaagctcacaaggtaaaattatatgtctctgtggaccacctggcgttggtaaaactagtattggacgatcagttgcacgtgcattaaaccggaagttctacagattttctgttgggggtttgtctgatatagcagaaatcaagggtcatcgacggacctatgttggggcaatgccagggaagatggttcagtgtctgaaatcagtcggaacttcaaatcctctggttttgatagatgagatcgacaagctagggagagggtattctggtgatccagccagtgcactgttggaacttcttgatcctgaacagaatgctaactttcttgatcattatcttgatgttcctattgacctctccaaggttctgtttgtttgcactgcaaatgtcatagagatgataccaggccctctactggacaggatggagatcattactattgccggttatataaccgatgagaagatgcatattgcacgggattacctagaaaagaacacaagggaggcttgtggcatcatgcctgaacaggttgaggttacggatagtgctcttcttgctcttattgaaaactattgccgggaagccggtgtgcgtaaccttcaaaaacagattgaaaaagtttaccggaagatagctctgcaacttgttcgtcaaggggtatcaaatgagccagctcgggagatcacattggtggaaccaagtgaacaacctactggtgttagcattgcaacagaagtggaaaacaagagccagagggacagtcttgcagaagatgtttcagtgcatgttattccaactgatttttcttgtgagaagattaatgtagtatccttaacaaccaagtcagaagtagaccactatgagcatccaaaaggagtatctaaagaaacttctgcagatgacaaagctacaccaacgaatacatcaggcaaaatggaggccaatgaacacacagaggaagtaatggaagcacttgtagatgaagcacttgtagacaagactgtggagaaagtagttgttgatgcatcaaatctggataactttgttgggaaggctgtattccaaccagagcgtatatacgatcaaactcctgttggggtagtcatgggtttagcttggaatgctatgggtggttctaccttgtatattgagacagcaaaagttgaggacggcgaaaaaaaaggtgcacttgtggtgacaggccagcttggagatgtcatgaaagagagtgctcaaattgcacatacaatttgcagatctatattacatgagaaagaaccaaataacaccttttttacaaagtcaaagcttcacttacatgttcctgcaggggctactccaaaggatggccccagtgctggatgcacgatggttacatcgatgctgtctttagccatgggaaagctggtaaagaaagacctcgcaatgactggggaagtaacattgactggacgaattctcccaattggtggggtgaaggagaaaaccatcgctgccaggagaagtgggataaagacgatcatattcccagcagcgaacagaagagatttcgacgagcttgctcctaatgtaaaagaaggtcttgaagtccactttgttgacaaatacagtgaaatatatgatttagcttttccaagtgatagtcaggcattagcaagctag

SEQ ID NO: 3162 - protein, 948 aa, Oryza sativa Japonica Group
MLRAAAATTAGFLPPRLAAETAPAARVVAAAGAEVRSSPLLRALGVPRGGAGIGSATPGRRMYFASGSDSSGSAADSDSEASSAAGAGEEESEGNRSSSAVAPAIIRPEDCHTVIALPLPHQPLFPGFFMAMSVKDPKLLKALVENHKRSFPYAGAFLVKNEEDTDSNTVTRSDPKKSIHGLKGKELLKHLHEIGTLAKITSIQGDQVLLLGHCRLRITEMVEEDPLTVKVDHLKVSKRLMLTLELVKRELEITKLQQSIAKAIEEKVTGEQRRYLLNEQLKAIKKELGLETDDKTALSEKFRKRIESRKEKCPSHILQVIEEELTKLQLLEASSSEFSVTSNYLDWLTVLPWGDYSDENFDVLRAQRILDEDHYGLTDVKERILEFIAVGKLRGSSQGKIICLCGPPGVGKTSIGRSVARALNRKFYRFSVGGLSDIAEIKGHRRTYVGAMPGKMVQCLKSVGTSNPLVLIDEIDKLGRGYSGDPASALLELLDPEQNANFLDHYLDVPIDLSKVLFVCTANVIEMIPGPLLDRMEIITIAGYITDEKMHIARDYLEKNTREACGIMPEQVEVTDSALLALIENYCREAGVRNLQKQIEKVYRKIALQLVRQGVSNEPAREITLVEPSEQPTGVSIATEVENKSQRDSLAEDVSVHVIPTDFSCEKINVVSLTTKSEVDHYEHPKGVSKETSADDKATPTNTSGKMEANEHTEEVMEALVDEALVDKTVEKVVVDASNLDNFVGKAVFQPERIYDQTPVGVVMGLAWNAMGGSTLYIETAKVEDGEKKGALVVTGQLGDVMKESAQIAHTICRSILHEKEPNNTFFTKSKLHLHVPAGATPKDGPSAGCTMVTSMLSLAMGKLVKKDLAMTGEVTLTGRILPIGGVKEKTIAARRSGIKTIIFPAANRRDFDELAPNVKEGLEVHFVDKYSEIYDLAFPSDSQALAS

SEQ ID NO: 3163 - DNA, 2958 bp, Arabidopsis thaliana (thale cress)
  CDS (1)..(2958)
atgaagggctttgatactaatcttcgtctacaggcttcttctccagaattctccaatggtttcttgcctaaaaggcaaaactttataaaactcaatcgcagaaattgttaccccagatcttctttctctcccaccatgttaaagctcttcacttcctccgcctctcgagtccaccatttgactccggtaagtagggtcgtcgggtcttctccagtggagtctccattgttcaaagcgttgagtcaaatcactgggtggaatcggcgatctacttcgttgggtcatcgtgctttcttctgctctgagcctaccaatggagaggcggcggctgaagctgaaactaaggcggtggagtccgattctgaagtgtctgactccaaatcttcgtctgcgattgtgcccactaaccctaggcctgaagattgtttaacggttctagcattgccggtgccacataggccgctttttcctggtttttacatgccaatctatgtcaaggatcctaaagtactcgcagccttacaagagagcagaagacgacaagctccatatgcaggagctttccttctgaaggatgacccatcagctgattcatcttcaagcactgacgcagaaaaaaacataaatgagctgaaagggaaagagttgcttaaccggcttcacgaagttggcacacttgctcagatttcaagtatccaaggagaccaagttatccttgttggtcacaggcgacttcgcataaaagagatggtgagcgaagaaccacttaccgtcaaagtcgatcatcttaaggataatccgtttgacatggacgatgatgtcgtcaaggcaacatcttttgaagttatttcaactcttagggatgtactgaagacaagttcactatggagagatcacgttcagacatatacccagcatataggtgatttcacttatccacgactagctgattttggagcggcgatatgtggcgcaaataggcatcaagctcaagaagttcttgaagaactggatgttcacaaacgtctgcggttgacgctggaattgatgaaaaaagaaatggaaattagcaagatacaggaaaccatagcaaaagcaattgaagaaaaaattagcggtgagcaacgtcgttacttgctaaatgagcagctcaaggctataaagaaggagcttggtgtggagacagatgacaaatctgcactttctgcaaagtttaaggaaaggattgagcctaacaaggaaaaaattccagcgcatgtattacaagtcatagaagaagagcttacaaagctgcagctgttagaggcgagttcaagcgagtttaacgtgacgcgtaactaccttgattggttgaccatattgccttggggaaattacagtaatgaaaactttgatgttgcacgggcgcaaacaattcttgacgaggatcactatggcttatctgacgtaaaggaaagaatactggaatttattgcagtgggaagacttagaggcacttcacaagggaaaatcatctgcctctccggccctcctggagtaggcaaaactagtattgggcggtctattgcacgtgctcttaatcgcaaatttttccggttctctgttggagggttagcagatgtcgctgagatcaaggggcatcgtcggacatatgttggcgccatgccaggaaagatggtgcaatgtctaaagagtgtggggacagcaaatcctcttgttctaatcgatgagattgataagctggggagaggccatgctggtgacccggccagtgctttgttggagcttctggatccagagcaaaacgcaaattttctggaccactatctcgacgttactatagatctatcaaaggttttatttgtgtgcacagcaaatgtgatagacatgattccaaatcctttgctagacagaatggaggtgatttctattgctgggtatatcactgatgaaaaagttcatatcgcaagagactatttggaaaaaactgcacgtggagattgtggtgtcaagcctgaacaggttgaggtgagtgatgcagcgcttctttccttgatagaaaattactgcagagaagcaggtgttaggaatctccagaaacagatcgagaagatttaccgtaagattgcacttaaattagtgcgtgaaggagcagtccccgaagagcctgcagttgcaagtgatcctgaagaagctgaaatcgtggctgatgttggcgaatccatagagaatcatactgtcgaagaaaacactgtgtcctctgctgaagaaccaaaggaagaggcccaaaccgagaagatagctattgaaacggttatgattgatgagtcaaaccttgcggattatgtaggaaaaccggtattccatgcagagaagctctatgagcagacaccggtaggtgttgtgatgggtctagcttggacatcaatgggtggttcaacattgtacatagagacgactgttgtggaggaaggggaaggtaaaggtggcctgaatataacgggtcagctcggtgatgtgatgaaagaaagtgcacaaattgctcacacagtcgccagaaagatcatgctagagaaagaaccagagaatcagttctttgcaaactccaagcttcatctccatgttcctgcaggagccactcccaaggatggtccaagtgcaggctgcaccatgatcacatctttactatcacttgccacgaagaaacccgttaggaaggaccttgcaatgactggagaagtcacactaaccggaagaattcttcctattggtggggtgaaagagaaaactatagcggcgaggcggagtcagattaaaacaataatatttccagaggcaaaccggagagactttgatgagctggcagagaatgtgaaagaagggcttaatgttcacttcgtggatgactatggaaagatcttcgagcttgcctttggctatgacaaacaagaagactga

SEQ ID NO: 3164 - protein, 985 aa, Arabidopsis thaliana (thale cress)
MKGFDTNLRLQASSPEFSNGFLPKRQNFIKLNRRNCYPRSSFSPTMLKLFTSSASRVHHLTPVSRVVGSSPVESPLFKALSQITGWNRRSTSLGHRAFFCSEPTNGEAAAEAETKAVESDSEVSDSKSSSAIVPTNPRPEDCLTVLALPVPHRPLFPGFYMPIYVKDPKVLAALQESRRRQAPYAGAFLLKDDPSADSSSSTDAEKNINELKGKELLNRLHEVGTLAQISSIQGDQVILVGHRRLRIKEMVSEEPLTVKVDHLKDNPFDMDDDVVKATSFEVISTLRDVLKTSSLWRDHVQTYTQHIGDFTYPRLADFGAAICGANRHQAQEVLEELDVHKRLRLTLELMKKEMEISKIQETIAKAIEEKISGEQRRYLLNEQLKAIKKELGVETDDKSALSAKFKERIEPNKEKIPAHVLQVIEEELTKLQLLEASSSEFNVTRNYLDWLTILPWGNYSNENFDVARAQTILDEDHYGLSDVKERILEFIAVGRLRGTSQGKIICLSGPPGVGKTSIGRSIARALNRKFFRFSVGGLADVAEIKGHRRTYVGAMPGKMVQCLKSVGTANPLVLIDEIDKLGRGHAGDPASALLELLDPEQNANFLDHYLDVTIDLSKVLFVCTANVIDMIPNPLLDRMEVISIAGYITDEKVHIARDYLEKTARGDCGVKPEQVEVSDAALLSLIENYCREAGVRNLQKQIEKIYRKIALKLVREGAVPEEPAVASDPEEAEIVADVGESIENHTVEENTVSSAEEPKEEAQTEKIAIETVMIDESNLADYVGKPVFHAEKLYEQTPVGVVMGLAWTSMGGSTLYIETTVVEEGEGKGGLNITGQLGDVMKESAQIAHTVARKIMLEKEPENQFFANSKLHLHVPAGATPKDGPSAGCTMITSLLSLATKKPVRKDLAMTGEVTLTGRILPIGGVKEKTIAARRSQIKTIIFPEANRRDFDELAENVKEGLNVHFVDDYGKIFELAFGYDKQED

SEQ ID NO: 3165 - DNA, 3021 bp, Drosophila melanogaster (fruit fly)
  CDS (1)..(3021)
atgttagcccgcgctatccgagtgcgccccatgatgcgtggcatcgcctcgtcgtcagtgtggaaccggaatcgtcccattcagagttccctgatgcaatactgccgggatcggtcgttgcgcctccagcggctccacggagccaatttgatggtgcagcgcttctacagccgcaagcgggatgattccaacggggatattattatgggacccgatcttatgtccgatcaagatacccatcttccggcaactgtggcggtgccggacgtgtggccacatgttccgttgttggccatgcgcaagaatcctctctttccccgctttatgaagatagtggaggtatccaatcccatcatcatggatctactccgtcgcaaagtcaagctgaatcaaccttacgtaggcgtcttccttaagaaaactgatggcgaagaggagcttatcaccaatttgaatgatgtctacaatctcggaacatttgcacaaatccaagagctgcaggatctcggtgataagctgcgcatggttgtggtggcccatcgtcgtattcgtataacaggtcaggtggtagaggacgtgccacctcctaagcccgctgaagatcaaagcactgatcaagcggatgcggcacctataaaatcaagatccgacccagcccgaaagccccgtggccgaattcccaggagtcggaccggaaaatcacgtgaatcggcggctgctgaagaacttatacaaaaccagactctggagccgccactgaaatcaggcaaagtcgagtcatcgagcttgccaaagcctccaacagaagaaaagatagtggaacctgagactggtgccaaagaaaatgttaatcaatctgcgcccagcgcccaacctgttcttattgttgaagtggagaacgtaaagcaaccgatctataaacaaacggaagaggtgaaggcattaactcaggagataatcaagactcttcgggacataatcacaatgaatcccttgtatagagagagtctacagcagatgctgcaccaaaatcaacgagttgtcgacaaccccatttatctgtgcgatttaggagcatccctttccgctggagaaccagctgagctgcaaaaaattcttgaggaaacagatatcccagaacgtctacaattggccttaactttactcaaaaaggagttggaactctccaggctccaacaaaaaattggacgcgaagtagaggaaaaagtcaagcagcaacatcgcaaatatatactccaggaacagttgaaagtcatcaaaaaagaactgggcatcgaaaaagacgacaaggatgccattggtgaaaagtaccgcgaaaagctgaaggataaggtggttcccgaagctattatgacggttattgatgaagaactcaccaagctgaacttcctggagagtcatagttccgagtttaatgtaactcgcaattacctcgactggcttacttccctaccttggggcgttatcagcaccgaaaatctctgcctggagaaggccactgaaacactaaacgacgatcactacggaatggaggatatcaagaagcgtattttagaatttattgccgtcagttccctcaagggctctacgcagggcaagatcttgtgctttcatggaccccctggtgtgggcaagacaagcatagcaaagtccattgcacgcgctttgaatcgcgagtacttccgctttagtgtgggcggcatgacagacgttgctgagatcaagggacatcgccgcacctatgtgggcgcaatgccgggtaaactgattcagtgcctgaagaagactaagattgaaaatcctctggtactcatcgacgaggtggacaagatcggcaagggctaccagggagatcctagctcagcattgttagagctactagatcccgagcagaatgcgaatttcctggaccactacctcgatgtgccggtagacctctcgcgagtgctcttcatctgcacagctaatgtgatcgacactattcccgagcctttaagagatcgcatggaattgattgagatgtctgggtatgttgccgaagagaagatcgccatcgctcgtcagtatctgatgccacaagcgatgaaggactgtggattaacggacaagcatatcaacatttccgaggatgccctaaacatgctgattcgcagttattgccgggaatccggggtgcgaaacctgcaaaagcatatcgagaaagttattcgcaaggtggccttccgagtggtcaaaaaagaaggcgagcactttccggttaacgctgataatctgaccacattcctgggcaaacaaatctttagctcagatcgcatgtacgcaaccacaccggtgggtgtagtcatgggtctggcctggaccgccatgggtggttcatcgctttacatcgaaacctcaaggcgtcacattcgccagggggcaaaaacagatccgaacactgtcgccggatcgctgcacatcaccggaaatttgggagatgtcatgaaggagtcggcccaaatagccttaacggtggcgcgcaactttttatattcgctggaacccaataatctgttcttagagcaagagcacattcacctccatgttcctgaaggtgccacaccgaaagatggccccagtgcgggcatcaccattattacagctctcgtatcgttggccactggaaagccggtgcgccaagatatcgctatgacgggcgaagtatccctgaagggaaaagtgctacccgtgggtggtattaaggaaaagacgattgcagcacgtcgtagtggagtgaattgtcttattctgcctgtggataacaagaaagacttcgaggagttgcccacgtacattacagatggtctggaggttcactttgccaccacctacgaggatgtctacaagatagcgtttactgatgtaaccgaaacgacaaccaacaatgttgaagagcaggagccgctgcagaagctttccagtgcggccgctgccaaatcggagacgtggccttattcttag

SEQ ID NO: 3166 - protein, 1006 aa, Drosophila melanogaster (fruit fly)
MLARAIRVRPMMRGIASSSVWNRNRPIQSSLMQYCRDRSLRLQRLHGANLMVQRFYSRKRDDSNGDIIMGPDLMSDQDTHLPATVAVPDVWPHVPLLAMRKNPLFPRFMKIVEVSNPIIMDLLRRKVKLNQPYVGVFLKKTDGEEELITNLNDVYNLGTFAQIQELQDLGDKLRMVVVAHRRIRITGQVVEDVPPPKPAEDQSTDQADAAPIKSRSDPARKPRGRIPRSRTGKSRESAAAEELIQNQTLEPPLKSGKVESSSLPKPPTEEKIVEPETGAKENVNQSAPSAQPVLIVEVENVKQPIYKQTEEVKALTQEIIKTLRDIITMNPLYRESLQQMLHQNQRVVDNPIYLCDLGASLSAGEPAELQKILEETDIPERLQLALTLLKKELELSRLQQKIGREVEEKVKQQHRKYILQEQLKVIKKELGIEKDDKDAIGEKYREKLKDKVVPEAIMTVIDEELTKLNFLESHSSEFNVTRNYLDWLTSLPWGVISTENLCLEKATETLNDDHYGMEDIKKRILEFIAVSSLKGSTQGKILCFHGPPGVGKTSIAKSIARALNREYFRFSVGGMTDVAEIKGHRRTYVGAMPGKLIQCLKKTKIENPLVLIDEVDKIGKGYQGDPSSALLELLDPEQNANFLDHYLDVPVDLSRVLFICTANVIDTIPEPLRDRMELIEMSGYVAEEKIAIARQYLMPQAMKDCGLTDKHINISEDALNMLIRSYCRESGVRNLQKHIEKVIRKVAFRVVKKEGEHFPVNADNLTTFLGKQIFSSDRMYATTPVGVVMGLAWTAMGGSSLYIETSRRHIRQGAKTDPNTVAGSLHITGNLGDVMKESAQIALTVARNFLYSLEPNNLFLEQEHIHLHVPEGATPKDGPSAGITIITALVSLATGKPVRQDIAMTGEVSLKGKVLPVGGIKEKTIAARRSGVNCLILPVDNKKDFEELPTYITDGLEVHFATTYEDVYKIAFTDVTETTTNNVEEQEPLQKLSSAAAAKSETWPYS

SEQ ID NO: 3167 - DNA, 2925 bp, Drosophila pseudoobscura pseudoobscura
  CDS (1)..(2925)
atggtgatgtctcagcgtttctacagtcgccgacgcgacgatcccgacgacaagaaagcgccagcgggaccagaaggtccgtccgagcgagactcgcacttgcctgccacagtggtggtgcccgacgtatggccacatgttccgctgctggccatgcggaagaatcccttgtttccgcgcttcatgaagattgtggaggtgtccaatccaattgttatggatctgctgcgtcgcaaagttagccttaatcagccctacgttggggttttcctcaagaaagtcgacggggaagaggaggtcgtccagaatctggacgaggtctatcacctgggcacttttgcacagatccaagagattcaagatttgggcgacaggatgcgccttgtggtgctggcccatcgtcgcatacgcatcacaggacaggtggtcgaggatctaccgaatccaaaaaagccagctgaagatcaaacaacaaacaacaaatcatcgacaacgtcacagtcgtccagtgaacgccgtaaaacgcgtcgcgcaattaagcaaaaattacaagagactgcggctgccgctgacgctgacgctgacaccacaaacccaatggacgaatttgaattgaaacagcgttcgcatatctcagagaaatttaaagctatcaaagcggcagccaaagccgccctcgatgccgaagcgggtacatcagctacccccgatgcagagtccggtgccgagtctgctgcaccttccggatcaccgcctgtgctcattgtagaggtggagaatgtgaagctaccggtttacaaacaaaccccagaagtcaaggcgctaacacaagagattatcaagactctacgcgacatcatcaccatgaatcccctgtatagggagagtctccatcaaatgctgcatcagaatcaacgagttgtggacaatcccatctacctatgcgacttgggtgcctccctgtcgtccggggacccagaggagctgcaaaatatcctagaggaaacagatatcccaaaacgcctgcaactgtccctgacattactcaaaaaggagcaggagctatcgagactgcaagcgaaaattggacgcgaggtagaggaaaaagtcaagcagcagcaccgaaaatacatactgcaggaacagctgaaggttatcaaaaaggagctgggcatcgagaaagacgacaaggatgccatcggtgaaaagtatatggaaaaactcaaagacaaaatcgttccagaaagtattaagctggtcatcgatgaggaactggccaaactgaacttcctggagagtcatagctctgaatttaatgtaacccgcaactacctcgactggctcacctcgctaccctggggcgtcattagcactgagaatctctgcctggacaaagccaacgagatcctaaaccacgatcactacggaatggaggatatcaagaagcgcatcctagagtttatcgccgtcagttctctgaagggcagcacgcagggcaagattctgtgcttccatggaccacctggtgtgggcaagacgagtatagccaagtccattgctcgggccctgaatcgtgagtacttccgcttcagtgtgggcggcatgacggatgtggctgagatcaagggacatcgtcgcacctacgtgggcgcaatgcctggcaagctgatacagtgcttgaaaaagactaagacggagaatcctctagtgctcattgatgaggtggacaagattggcaagggctatcagggagatcccagctcggcgctgttggagctactcgatcccgagcagaatgccaatttcctggaccactatctggacgtgccaatcgatctgtcgcgtgtgctattcatttgcacggccaacgtgatcgataccataccagagccgctgagggatcgcatggagctgattgagatgtccggctatgtggccgaggagaaggtggccattgcccgtcagtatctgataccgcagtcgatgaacgactgtggcctgaccgacgagcatatcagcataaccgagaaagccctgaatatgctgatacgcagctattgccgcgagtccggagtgcgtaacttgcagaagcagatcgagaaggtcattcgcaaagtggccttccttttggtcaagaaggagggtaccaacttcccagtggatgccgaaaacctgaccacattcctgggcaagcagatctttacctcggatcgcatgtacgagacgacgccgccgggcgtggtcatgggcctagcctggacagccatgggtggctcatcgctgtacattgagacatcgccacggaacaaacagaaaagccagggccccaaatcagaagccagcggtgtaggcagagttggcactttgtatattaccggaaaccttggagatgtgatgaaggaatcggcccaaatagcccttacggtagcccgcaattttatccaaattcgctatcctgacaaccagtacctggagctggaaaacgttcacctgcacgttcctgagggggccgtaccaaaggatggacccagtgctggagtcaccataatcacagccttaatttcgttggccaccaacaagcctgtgcgtaaggatgtggccatgacgggcgagatatcgctgaagggcaaggttctgcccgtaggaggaatcaaggagaaggccatagccgcacgtcgcagtggcgtcaactgtctcatcctgcccgcggacaacaagaaggacttcgaggagttgcccaagttcataaccgaaggcctggaggttcactttgcggccaactacgatgatgtctacaacatcgccttctccgaacccaccaaaaacgaggccgaggcccaagtattgccggcgccggatcaggagcccctcgaaaaggtgtccagcgcggccagtgcgtccagcgccatgcctttcaggccttaa

SEQ ID NO: 3168 - protein, 974 aa, Drosophila pseudoobscura pseudoobscura
MVMSQRFYSRRRDDPDDKKAPAGPEGPSERDSHLPATVVVPDVWPHVPLLAMRKNPLFPRFMKIVEVSNPIVMDLLRRKVSLNQPYVGVFLKKVDGEEEVVQNLDEVYHLGTFAQIQEIQDLGDRMRLVVLAHRRIRITGQVVEDLPNPKKPAEDQTTNNKSSTTSQSSSERRKTRRAIKQKLQETAAAADADADTTNPMDEFELKQRSHISEKFKAIKAAAKAALDAEAGTSATPDAESGAESAAPSGSPPVLIVEVENVKLPVYKQTPEVKALTQEIIKTLRDIITMNPLYRESLHQMLHQNQRVVDNPIYLCDLGASLSSGDPEELQNILEETDIPKRLQLSLTLLKKEQELSRLQAKIGREVEEKVKQQHRKYILQEQLKVIKKELGIEKDDKDAIGEKYMEKLKDKIVPESIKLVIDEELAKLNFLESHSSEFNVTRNYLDWLTSLPWGVISTENLCLDKANEILNHDHYGMEDIKKRILEFIAVSSLKGSTQGKILCFHGPPGVGKTSIAKSIARALNREYFRFSVGGMTDVAEIKGHRRTYVGAMPGKLIQCLKKTKTENPLVLIDEVDKIGKGYQGDPSSALLELLDPEQNANFLDHYLDVPIDLSRVLFICTANVIDTIPEPLRDRMELIEMSGYVAEEKVAIARQYLIPQSMNDCGLTDEHISITEKALNMLIRSYCRESGVRNLQKQIEKVIRKVAFLLVKKEGTNFPVDAENLTTFLGKQIFTSDRMYETTPPGVVMGLAWTAMGGSSLYIETSPRNKQKSQGPKSEASGVGRVGTLYITGNLGDVMKESAQIALTVARNFIQIRYPDNQYLELENVHLHVPEGAVPKDGPSAGVTIITALISLATNKPVRKDVAMTGEISLKGKVLPVGGIKEKAIAARRSGVNCLILPADNKKDFEELPKFITEGLEVHFAANYDDVYNIAFSEPTKNEAEAQVLPAPDQEPLEKVSSAASASSAMPFRP

SEQ ID NO: 3169 - DNA, 2940 bp, Nasonia vitripennis (jewel wasp)
  CDS (1)..(2940)
atgcggctgctcatgaacacgaggctcctgccggtctttaggcaccgaatgacaaaactcgccgagcagaaatcgtcgaggttctcgccgatacttggagttctgagaggaaatcttcgagaatgtcgtggaagcgccgctgcgatcgtcgtcaggacgttttcctctaggaacccttctgataagaacccaccaaatgaaaatgatgttgatgtccaaccagaagattatccaacagctctgccagcaactgttgttgtaccagaagtgtggccaaatgttccagtaattgctatcaaccgaaaccctgtctttccacgattcatcaaattgattgaactcaccaatcccattctcatggatttgataaggcgcaaagtaaagctcaaccaaccatatgtaggaatcttcttgaaaaaaaacgaagaaaatgaagcagagttggtggaaaatgtagatgatgtgtatccagttggaacttttgcacaaattcatgaagtacaagatttaggagatcgcttgaggcttgttgtgatggcacatagaagaatcaaaattgtaaatcaaatcatagaagacttaaatccgaagcaagaaactgacgatgctatggcaggtggaaagaaaagtcgtagagagattcgacgaaagaagttggaaggtaaactccaggaccaagctgagaagcctgaaaaagtagaagaagctacagattctgtggttgcagaagaaaagcccattgagaaacctgtggagacagctgaaccaattgaacaacaagtggttgaaccagtagttcaaaaagaatctgcacaacctttgcttatggttgaagttgtgaacatcacccatgataagttcagacaaacagaagaaataaaggcacttactcaagaactcatcaaaacaatcagagatatcataagcatgaattctttataccgggagtccctccaacaaatgcttcatcaaggacaaagagttgttgataatccagtatatcttagtgatctcggagcagcgttaactggagcagatgcccaagaattgcaggcagttttagaagaaatggatattactaaaaggttgagattatccttagcactgttgaaaaaagaatatgaattgagcaagttgcaacaaaagataggaagggaagtagaagaaaaagttaaacagcaacaccgaaagtatattctacatgagcagctgaaagttataaagaaagaactaggattagaaaaagatgataaagatgcgatcgaagaaaagtatcgagaacgaatcaaagataaagttgtacccaaacctgtgatggatgtcatagaagaggaattgaataaattaagttttctagaaagtcatagtagtgaattcaacgttacgagaaattatctcgattggctcacatcaataccatggggtgtgatgagtcccgaaaatctggagcttcaacaagcgattgaaattcttgataaagaccattatggaatggaagatatcaagaaacgaattttagaattcattgctgtaagtcaattaaaaggatcgacacaaggaaaaattctttgtttccacggaccccctggtgttggaaaaacttccatagctagatcgatatcgcgagctttgaacagagaatacttccgatttagcgttggcggtatgaccgacgttgctgaaatcaaaggccacagaagaacttacgtaggagcgatgcctggaaaaattatccaatgcttgaagaaaacaaaaacggagaatcccttggttttgatcgacgaggtcgataaaattggaaaaggtcatcaaggagatccagcttcagctttgttagaaatgctcgatcctgagcagaacgcgaatttcttagatcactaccttgacgtagcagtcgacctttctaaggttttgtttatctgcactgccaatgtaatcgatacgattccagagccactaagggaccgtatggaaatgattgatatgtcgggctatgtggctgaagagaaattagctattgccaaacagtacctcgtacctcagtctatgaaggactcaggtctcactgaagatcacatcaaaattgaagataacgctctagtcaccctcatcaaatcttactgccgtgaatctggtgtcagaaatttacaaaagcacattgaaaaagttcaccgaaaagtagcttttaaagtcgtcaagaaggaagctgaacgtctcgacgtcactgctgagaatctaacagattttgtgggtaaacctgtatttacgcacgacaggatgtacgacgtaacgccaccaggtgtggtcatgggattagcttggacagctatgggtggctctacgctttttattgaaacgacaataagaaagccgaacgatacttctaagaaattcgatggaaccttcgaggtcacgggtcatttgggagacgtaatgaaggagtctatcagaatagcaatgacggtagctagaaactttctccaaaagacagatccaacgaatacctttttgtacgacgcccatttgcacttgcacgttcccgaaggagcgacgcccaaggatggaccaagcgcaggcacgacaatagctacggctttcctttcgctggctaaaaataaatccgttcgtcaagacgttgctatgactggagagctcagtcttatgggcaaggttttacctgttggcggaatcaaagaaaagacgatcgctgctaagcgcgttggagtcaaatgtattatattgccagaagaaaacaaaaaagactttgaagacttgccaaagtatataacggatggactcgaagttcattttgtcacctgctttgatgatatttacaggatatgcttccttgatggacaaagctcacaaacacctgagcaaaatactgatgacgacacgtcgacatttaattctaagcagcaagctcctctgcaggcataa

SEQ ID NO: 3170 - protein, 979 aa, Nasonia vitripennis (jewel wasp)
MRLLMNTRLLPVFRHRMTKLAEQKSSRFSPILGVLRGNLRECRGSAAAIVVRTFSSRNPSDKNPPNENDVDVQPEDYPTALPATVVVPEVWPNVPVIAINRNPVFPRFIKLIELTNPILMDLIRRKVKLNQPYVGIFLKKNEENEAELVENVDDVYPVGTFAQIHEVQDLGDRLRLVVMAHRRIKIVNQIIEDLNPKQETDDAMAGGKKSRREIRRKKLEGKLQDQAEKPEKVEEATDSVVAEEKPIEKPVETAEPIEQQVVEPVVQKESAQPLLMVEVVNITHDKFRQTEEIKALTQELIKTIRDIISMNSLYRESLQQMLHQGQRVVDNPVYLSDLGAALTGADAQELQAVLEEMDITKRLRLSLALLKKEYELSKLQQKIGREVEEKVKQQHRKYILHEQLKVIKKELGLEKDDKDAIEEKYRERIKDKVVPKPVMDVIEEELNKLSFLESHSSEFNVTRNYLDWLTSIPWGVMSPENLELQQAIEILDKDHYGMEDIKKRILEFIAVSQLKGSTQGKILCFHGPPGVGKTSIARSISRALNREYFRFSVGGMTDVAEIKGHRRTYVGAMPGKIIQCLKKTKTENPLVLIDEVDKIGKGHQGDPASALLEMLDPEQNANFLDHYLDVAVDLSKVLFICTANVIDTIPEPLRDRMEMIDMSGYVAEEKLAIAKQYLVPQSMKDSGLTEDHIKIEDNALVTLIKSYCRESGVRNLQKHIEKVHRKVAFKVVKKEAERLDVTAENLTDFVGKPVFTHDRMYDVTPPGVVMGLAWTAMGGSTLFIETTIRKPNDTSKKFDGTFEVTGHLGDVMKESIRIAMTVARNFLQKTDPTNTFLYDAHLHLHVPEGATPKDGPSAGTTIATAFLSLAKNKSVRQDVAMTGELSLMGKVLPVGGIKEKTIAAKRVGVKCIILPEENKKDFEDLPKYITDGLEVHFVTCFDDIYRICFLDGQSSQTPEQNTDDDTSTFNSKQQAPLQA

SEQ ID NO: 3171 - DNA, 2871 bp, Aedes aegypti (Stegomyia aegypti)
  CDS (1)..(2871)
atgaaccaactagtgtgtagaataagtcgaccaacggcgaatgttttagctcgccatgtgaagcagcattccagtttcagtgcgctgcgattcggatccaatgccggtgttgtcggtggccggagtgagcgagcattggtggaccgtgcccgagggatgttggcggggaactactggagcaatgtgcccatgcggaatgcgttgtgctccgtgcaggttttagcttctcgttcctattgcgccaagcgagatccggacgatgatgaaacggttccagaaccggagccggtgcaattctcaagtcagcttccagccactgtggccatcccggaggtgtggccgcatttgcctgtgatcgccaccaagcggaatcctgtgtttccaagatttatgaaaattctggaggtcaccaaccccatgctgatagatttgattagacggaaggtcaagttgaatcagccctacgctggcattttcctcaagaaagacgacgagaacccaaacgaagtggtggacaacttgacggaaatttacaacgttggaacgttcgcacagattcaggaaatgcaagatctgggtgacaaactgcggctcgttgtgaccgctcatcggcgtatcaaaatcgttggccaactgtacgaagatctggacgccacccaagagggaaagctggacgaaagtgatgccgagaagcgacgacggaagcacaaaaatcgtaacaagaaagtgattcggaacgcaaacaacgacagcaccgtggatggagaaccggtcgaggaacctccgaagcgaagactgctcaaggacggagaacaacagccggtgctgatggtggaagtggaaaacgttaagcacgaatcgttcaaacacaccgaagaagtgaaagccctgacgcaggaagtcatcaagaccattcgggacatcattacaatgaatccgctttatcgagaaagcttgcagcaaatgttaaaccaaaatcaacgggtcgttgataatccggtttatctgtgcgatttgggagcttcgttatcggctgcggatccaccagaacttcaagatattctcgaagaaatggatataccaaaacgattaatgttgtcactgtcgctcctgaaaaaggaactggaactgtccaaactgcaggcaaaaatcggccgcgaagtggaagaaaaggtcaaacaacagcaccgtaaatacatcctgcaggagcaactcaaagtcatcaaaaaggaactgggaatcgagaaggaagataaagatgccattggggaaaagtaccgtgaacgcatcaaggacaaggttgttccgaaagccgtcgccgacgtaatcgaggaagagctgaacaagctcaattttttggaaagtcacagctcggagttcaacgttacccggaactacctagactggctgacgactctgccgtggggtgtaatgagtgaagagaatctggacattgatcgtgccacggaaatcctcgactccgaccattacggaatggaggacattaaaaagcgcattttggagttcatagccgtgagtcaacttaaaggtacaactcagggaaagattttgtgcttttatggcccacccggtgttggtaaaacgagtattgcgcgatcgattgcccgggcattgaatagggagtacttccggttcagcgttggaggaatgaccgatgtcgctgaaatcaagggacaccgaaggacgtacgtcggagctatgccaggaaaattgatccagtgcctgaaaaagaccaaaacggagaatccgctagttctgatcgacgaggtcgacaaaattggaaagggttatcagggtgatcctagttcggcgcttttggaacttctggatccggagcagaacgtaaacttcctcgaccattacctcgatgttcccgtggacctgtccaaggtgttgttcatttgtactgccaacgtcattgaaaccatccccgagcctttgcgagatcgtatggaaatgattgatatgtcaggatacgtagccgaagagaaggtagccatagcaaagcaatatctcattccacaagcgaagaataattgcggtcttgaggacaagcacatcaacatcaccgacgaagcactaaacgtactaattcgctcctactgccgggaatctggagtgcgaaatctccagaaacagatcgaaaaagtcgtacgcaaagtgactttcaaaatcgtgcgcaaagaagttgaatctgccgaagtcaccggagacaatctcaacgagctgctaggtaaaccaattttcacccacgatcgaatgtacgattcaacgccaccgggagtggtcatgggtctggcctggactgccatggggggttctgcgttatatattgaaacggccaagagacggttgatcgaggcaaaggagaaaatcggcgatggctctcttgaactaaccggtcatttgggtgacgtaatgaaggaatcggcgcgaattgcacttacagtagcgcgaaactacattaagcagcatgatcagagcaatgatttcctcgaatctagtcatattcacttgcacgttccggagggagcaacgcccaaagacggccccagtgccggagttacgatagttacagcattgctgtcccttgcgaagggtaaacccattcgccaaaacgtggccatgaccggtgaagtgtctctcatgggtaaggttttgccagttggaggtatcaaagagaaaaccattgctgccaaacgaagtggggttgactgtataatcctacccgaagagaataaaaaggattacacggacctgccgaaatacattaccgatggcttggaagtgcattttgttgatcattactcagacgtgtataaaattgtgttcgccgaagacggcaaatag

SEQ ID NO: 3172 - protein, 956 aa, Aedes aegypti (Stegomyia aegypti)
MNQLVCRISRPTANVLARHVKQHSSFSALRFGSNAGVVGGRSERALVDRARGMLAGNYWSNVPMRNALCSVQVLASRSYCAKRDPDDDETVPEPEPVQFSSQLPATVAIPEVWPHLPVIATKRNPVFPRFMKILEVTNPMLIDLIRRKVKLNQPYAGIFLKKDDENPNEVVDNLTEIYNVGTFAQIQEMQDLGDKLRLVVTAHRRIKIVGQLYEDLDATQEGKLDESDAEKRRRKHKNRNKKVIRNANNDSTVDGEPVEEPPKRRLLKDGEQQPVLMVEVENVKHESFKHTEEVKALTQEVIKTIRDIITMNPLYRESLQQMLNQNQRVVDNPVYLCDLGASLSAADPPELQDILEEMDIPKRLMLSLSLLKKELELSKLQAKIGREVEEKVKQQHRKYILQEQLKVIKKELGIEKEDKDAIGEKYRERIKDKVVPKAVADVIEEELNKLNFLESHSSEFNVTRNYLDWLTTLPWGVMSEENLDIDRATEILDSDHYGMEDIKKRILEFIAVSQLKGTTQGKILCFYGPPGVGKTSIARSIARALNREYFRFSVGGMTDVAEIKGHRRTYVGAMPGKLIQCLKKTKTENPLVLIDEVDKIGKGYQGDPSSALLELLDPEQNVNFLDHYLDVPVDLSKVLFICTANVIETIPEPLRDRMEMIDMSGYVAEEKVAIAKQYLIPQAKNNCGLEDKHINITDEALNVLIRSYCRESGVRNLQKQIEKVVRKVTFKIVRKEVESAEVTGDNLNELLGKPIFTHDRMYDSTPPGVVMGLAWTAMGGSALYIETAKRRLIEAKEKIGDGSLELTGHLGDVMKESARIALTVARNYIKQHDQSNDFLESSHIHLHVPEGATPKDGPSAGVTIVTALLSLAKGKPIRQNVAMTGEVSLMGKVLPVGGIKEKTIAAKRSGVDCIILPEENKKDYTDLPKYITDGLEVHFVDHYSDVYKIVFAEDGK

SEQ ID NO: 3173 - DNA, 2706 bp, Physcomitrella patens subsp. patens
  CDS (1)..(2706)
ttgcaggtggtagctgttccattaacaaggaggccattatttcccggattctatgtccccgtgtctatcaaggatcaaaagcttgcagataagctttcggagttaaaatctgctggaacaccctgggttggaacattcttgcttaaagatcagaaagctagaacagatggctctcaggtgttgtctacagctgaggggggagaaggcgaaatacttcgtggagaagagcttttcaaacggcttcatgaatacggcacatttgcacaggtgaatattagccaatgtgctactcaaattcttctcatggggcatcgtcgtcttcgaattactggcatgctggatactgagccgctgtcagtgggcgtcgaccatcttagagataaaccttatgattcaactcaagatgaattaaaagccactatcctggaagttgtcacaacgatgaaggaccttatgaggctaaaccctctgtataaggaacacattcagatgtttgtgcagcagcacatgggcgaatttaatgcctcaaaattggcagacttcggagctgcgcttacaactgcagatgagcccgtgttgcaagaggttcttgaagagctcgatgttctgagacgattacatttgacgcttgttctgctaaagaaagagttcgaacttagcaagcttcagcaatcgatcgcaaaaggagtagaggagaaaatgaccggggatcagcggaagtatttcttgatggagcagttgaaagccatcaaaaaggagctgggattggagactgatgacaaaacggcactgacagccaagttccgggagagattggagccgcgtcgaaaagactgtcctcctcatgtcctgcaagtgattgatgaagagttaaacaagctgcaaggactagagtctagttccagcgaattcaatgttactcgcaattatcttgattggctcacgtctttaccatggggtcatttcagtgaggagaattttgatgtcaaccgagcacagaagattttagatgaggagcactacggcctggaggatgtgaaggagcgcattcttgaatttatagctgttggtcgattacgagggaaaactcaagggaaaattatctgtttagcagggccaccaggtgttggcaagacgagcattgggcggtccatagcccatgctctcaatcgtcaattctacagattctctgttggaggattgggtgatgttgctgagatcaaggggcatcgtcgaacatatgttggagctatgcccgggaagatggtacagtgtctgaaagctactggtacttctaatccgttggtgttgattgatgaaatcgacaagctggggcgtgggcattctggagatcctgccagtgcacttctggagcttttagatcctgaacaaaatgccaactttttggatcattatcttgatgtaccaattgatttgtcaaaggttcttttcgtatgtactgccaatctagtggaaaatattccaggtcctctattggaccgaatggaagttatccgccttgtgggctacattactgctgaaaaaactcatatagcccgtggatatttagagaaagcagcacgtgaaggttcaggtgtcgaggctgagcaggtggacttgagtgatggagcattacatacgctgattgaaacgtactgtcgggaagccggagtacgaaatcttcagaaacacatagagaggatatatcgcaaggttgctttgaaactggttaggaaggaattggaagcactaggtacaggtaaggaggtacctctcacaattgaagaagtgccagttctcactggaactgcgactgaaatggaacaggaaggaagcgctgagaagacaagctcggatgttgtactagttgagaacttccgtgtgagttgtagacttgaacttgatcttgaagtcattgtaaaatctctaagtgttgacccagcattcttgcagagagacgtgaaggaagatggtccagttgaaccagtggagaagctgcttattaatgaaaccaatcttcctgactatgtgggtcctccaattttccaaagtgatcgtctctatgagcagactcctgtgggtgttgtgatggggctagcttggacagctatgggaggatccacgttgtatgtagaaacgagcctagtagagcagggggaaggaaaaggtacactacaaatgacgggacaattgggagatgtaatgaaggaaagtgcatcaattgcccacacacttgctcgtcaaattttgagggaaaaagaaccagaaaacaacttttttgccaattcaaggatgcatctacatgttcccgctggggccaccccaaaggacggacctagtgcaggatgcactatgattacatcgatgctctctctggctatgaatatgcctgtgaagaatgatgtagcaatgacaggcgaagttactctaacaggacgtgttttaccaattggaggggtcaaggagaagactgttgcagcaagaagaagtggggtcaagatggtaatcttcccgtctggaaataaacgagattatctcgagcttccagctcatgtgaaggagggtctagaagttcattttgtagatcattatagtgaaatcttcactctcgcttttgatgtcaaaccagagtcggagaaacaattgactcccattgaatctactgtagtgtcacaaaatgacccaggagtacttttacattcatag

SEQ ID NO: 3174 - protein, 901 aa, Physcomitrella patens subsp. patens
LQVVAVPLTRRPLFPGFYVPVSIKDQKLADKLSELKSAGTPWVGTFLLKDQKARTDGSQVLSTAEGGEGEILRGEELFKRLHEYGTFAQVNISQCATQILLMGHRRLRITGMLDTEPLSVGVDHLRDKPYDSTQDELKATILEVVTTMKDLMRLNPLYKEHIQMFVQQHMGEFNASKLADFGAALTTADEPVLQEVLEELDVLRRLHLTLVLLKKEFELSKLQQSIAKGVEEKMTGDQRKYFLMEQLKAIKKELGLETDDKTALTAKFRERLEPRRKDCPPHVLQVIDEELNKLQGLESSSSEFNVTRNYLDWLTSLPWGHFSEENFDVNRAQKILDEEHYGLEDVKERILEFIAVGRLRGKTQGKIICLAGPPGVGKTSIGRSIAHALNRQFYRFSVGGLGDVAEIKGHRRTYVGAMPGKMVQCLKATGTSNPLVLIDEIDKLGRGHSGDPASALLELLDPEQNANFLDHYLDVPIDLSKVLFVCTANLVENIPGPLLDRMEVIRLVGYITAEKTHIARGYLEKAAREGSGVEAEQVDLSDGALHTLIETYCREAGVRNLQKHIERIYRKVALKLVRKELEALGTGKEVPLTIEEVPVLTGTATEMEQEGSAEKTSSDVVLVENFRVSCRLELDLEVIVKSLSVDPAFLQRDVKEDGPVEPVEKLLINETNLPDYVGPPIFQSDRLYEQTPVGVVMGLAWTAMGGSTLYVETSLVEQGEGKGTLQMTGQLGDVMKESASIAHTLARQILREKEPENNFFANSRMHLHVPAGATPKDGPSAGCTMITSMLSLAMNMPVKNDVAMTGEVTLTGRVLPIGGVKEKTVAARRSGVKMVIFPSGNKRDYLELPAHVKEGLEVHFVDHYSEIFTLAFDVKPESEKQLTPIESTVVSQNDPGVLLHS

SEQ ID NO: 3175 - DNA, 2799 bp, Acyrthosiphon pisum (pea aphid)
  CDS (1)..(2799)
atgttgcatcgtatctgccaagctggtttgaaaaagcagcttatggttgatcgtcgatttgttcgatgtgctagtgtgataatttcgaacaatgatagatcagcattggttcagaaaaaccatacatctaatcgcctttgtgtggtttcggctattaatgttccggtacgttatagaaggtttgacaataaaaaagaagatgataatccagaagaagtagaagaatctcaaactgtaagagctgtttatgatattaaatccaaccctgatacttcaattgcgactattcaagtaccagatgaattgccattcctaccgttagttacaatagcaaaaccacctttatatcctagattgtttagaattgttgagatcagtgatcctagattgattgcattgatcaaaagaaaaaaagctttaaatcaaccttttattggtctttttatgagaaaaaacattgatacagttccagataatatagttacaaatattgatgaagtatatagtgttgggtcacttggtagaataaatgaaatgcgagaatttggaaataaattacatatgctcatacaatgttttaggcgtataaagctgaccaagccactttttgaagaccaagatatagataaaagtaatgtttatgctaattattgtacaactataaaacgtaataaaaaacaatctcgtaataagggatcttcaagcacacctgaaatagagccaattactgaaacagaaaaatttcaggaacaagtgcttatgattgaagtagaaaatctaaaagatgaaccttatgataaaacaatggagattaaagcattatctcaagaaataatcaaaactattcaatcaattattagcataaatccaatatataaagaaatattacatccaatgttgcaacatggcaatgtatcagatgatccttcatatttatctgacattgcagctgccatagctgattgtgagactcacgaatatcaagaaattttagaagaaattaatgttcccaaacgtcttttacttgcgcttggttgtgtaaaaaaacttttagaacttagcgaaattcaaataaaaattagtaaagaagtcgatgaaaaagttaaacaacagcatcgtaaatttattcttcaagaacaactcaaagtaattaaaaaagagcttggtcttgagaaagatgataaagattcaattgtggaaaagttcagagatagaataaaagacaaacaagtaccaattaaagttatggaggttattgaagaagaattaactaaactatcatttctggaacagcattcatcagaatttaatgttacgagaaattaccttgattggttaacacaattaccatggggtacaacaagtgatgaaaattttgatttaaaaagggctacaactattttagacgaagatcattatggaatggaagaagtaaaaaaacgaattctagagtttattgcagtaagcaaattaaaaggttcaactcatggtaaaattctttgtttccatggaccaccaggtgttggaaaaacaagtatagcaaaatcaattgcaagagccttaaatcgagaatactttagatttagtgttggaggtatgactgatgtggctgagataaaaggtcatcgtaggacatatgtaggtgccatgccaggtaaaatgattcaatgtctgaaaaaaacttcaactgaaaatccattagtattaattgatgaagttgataaaattgggaggggacatcagggtgatccttcatctgcactattagaaatgcttgatcccgaacaaaatgctaatttcttagaccattatttggatgtgtcagtcgacttatctaaagttctatttatttgtactgctaatgtaatcaacacaattccagaaccacttagggatcgtatggaacttatagacgtgtctggatatgtagcggaagaaaaaatggctattgcaaaacaatacttaattcctcaagggcttaagtctactggcctgaaaaaagaacaaatagaaattgctgatgatagtctatctactcttattaaatcatattgtcgtgaaagtggtgtacgtaaccttcaaaaacatgttgaaaagatgttacgaaaagttgcattgaaaatagttgaaggtgaatcggaaaaaataattattagcagtgataaattatatgattttgttggtaatcctatatttacaaaaaatcgaatgtatgaagatccaatgcctggagttgttatgggattggcttggactgcaatgggtggggctttgatgtatattgaaactgagtggacaaaagatccggcgacaattacagataaggataaagctgttggaaacattatattaactggtcgcttaggtgaaactatgcaagaatcagcaaaaactgcatatactgtggcaaaacgatttttaagtgaacttgatccacaaaaccaatcactgttgactggaaacgtacatctacatgttcctgaaggtgctacacctaaagatggacccagtgctggatgtacaattgttactgctttgttatcattggctttaaacattcctattcgcaataatgtggctatgactggagagatctctctcaaaggaaaagttatgccagtaggaggtatcaaagaaaaaacaattgctgccaaaagagaaaatgttaattgtttgatactgcctgacgaaaataaaaaagactttaatgaacttccaaagtttataactgatgggattgaagtgcattttgtttcatactataaagacatttttaaaatagtctttgaaaacaaataa

SEQ ID NO: 3176 - protein, 932 aa, Acyrthosiphon pisum (pea aphid)
MLHRICQAGLKKQLMVDRRFVRCASVIISNNDRSALVQKNHTSNRLCVVSAINVPVRYRRFDNKKEDDNPEEVEESQTVRAVYDIKSNPDTSIATIQVPDELPFLPLVTIAKPPLYPRLFRIVEISDPRLIALIKRKKALNQPFIGLFMRKNIDTVPDNIVTNIDEVYSVGSLGRINEMREFGNKLHMLIQCFRRIKLTKPLFEDQDIDKSNVYANYCTTIKRNKKQSRNKGSSSTPEIEPITETEKFQEQVLMIEVENLKDEPYDKTMEIKALSQEIIKTIQSIISINPIYKEILHPMLQHGNVSDDPSYLSDIAAAIADCETHEYQEILEEINVPKRLLLALGCVKKLLELSEIQIKISKEVDEKVKQQHRKFILQEQLKVIKKELGLEKDDKDSIVEKFRDRIKDKQVPIKVMEVIEEELTKLSFLEQHSSEFNVTRNYLDWLTQLPWGTTSDENFDLKRATTILDEDHYGMEEVKKRILEFIAVSKLKGSTHGKILCFHGPPGVGKTSIAKSIARALNREYFRFSVGGMTDVAEIKGHRRTYVGAMPGKMIQCLKKTSTENPLVLIDEVDKIGRGHQGDPSSALLEMLDPEQNANFLDHYLDVSVDLSKVLFICTANVINTIPEPLRDRMELIDVSGYVAEEKMAIAKQYLIPQGLKSTGLKKEQIEIADDSLSTLIKSYCRESGVRNLQKHVEKMLRKVALKIVEGESEKIIISSDKLYDFVGNPIFTKNRMYEDPMPGVVMGLAWTAMGGALMYIETEWTKDPATITDKDKAVGNIILTGRLGETMQESAKTAYTVAKRFLSELDPQNQSLLTGNVHLHVPEGATPKDGPSAGCTIVTALLSLALNIPIRNNVAMTGEISLKGKVMPVGGIKEKTIAAKRENVNCLILPDENKKDFNELPKFITDGIEVHFVSYYKDIFKIVFENK

SEQ ID NO: 3177 - DNA, 3018 bp, Drosophila ananassae
  CDS (1)..(3018)
atgttgactcgcgccatccgagtgcgtcccgttatccggggcatcgcgtcgacggctgtttggacccgcaatcatccggcccagagttctctgatgcactactaccgggatcgtgccacccgcctccatcagttttatggcgctaacatgatggtgcagcgcttctacagtcgcaagcgcgacgactctgacccagatctagtctctgaccatggtcccgaactgatcacagagcgagatccccaactgccggctactgtggctgttcccgatgtctggccacatgttcctctgctggccatgcgcaagaatcctctctttccgcgtttcatgaagatcgttgaggtctcgaatcccatcatcatggacctgttacggcgcaaagtgaagctgaaccaaccgtacgtaggcgtgtttctcaagaagtctgatggcgaggaggagctcatccacaatctggacgacgtctataacctcggcaccttcgcacaaattcaggagctgcaggatctcggcgacaagctgcgcatggtggttgtggcccacaggcgtattcgcataaccggccaggtggtcgaggatgtgacacctccgaagccggctgaagatcagacaactgagcaagaggatactcatgcaaggacacggcccgaggcgggacgaaagccgcgcggtcgagctccaaggcgaccaccgcaaaagccacgcgatcaggctaatatggaggagatagcccagaagcagaccctggaaccgccattaaaatctggcaaaattgatccaacctctgtactcaaacctccgcccacccaggctaagaaggcagaaactaccgcagaggcgggagccgagggagatgataaggcggcttccggcccacaacctattctcgtcgtggaagtggagaatgtgaagcagccagtttataagcaaactgaggaggtcaaggctttgacgcaggaaatcatcaaaactcttcgcgacatcatcaccatgaatcccttgtatagagagagcctccagcagatgctgcaccagaaccaacgggttgtcgacaatcccatctacctgtgcgacttgggtgcttccctgtccgctggtgagccggcggaactgcagcggattttggaagagacggatatcccagagcgactccagctagccctgaccctgcttaaaaaggagcttgaactttcgagactgcaacagaagatcggccgcgaagtggaggagaaggtgaagcagcagcatcgcaaatacatacttcaggaacagctaaaggttatcaagaaggaactgggcatcgagaaagacgacaaggacgccattggcgagaaatatcgcgaaaaactcaaagacaaaactgtacccgaaagtataatgacggtcatagatgaagagctgaccaagctgaacttcctggagagccatagttcggagtttaatgtcacccgcaactacctcgactggctgacctcgctgccatggggcgtcattagtacagagaacctgtgcctggaaaaagccaccgaaatcctgaacaacgatcattacggcatggaggacattaagaaacgtatcttggagttcatagctgtcagctcccttaagggcactacgcaaggaaagatcctttgcttccacggacctcctggtgtgggcaaaaccagcatagccaagtccattgcaagagccttgaatcgcgaatacttccgctttagtgtgggcggaatgacggacgtggcagagatcaagggacaccgacgcacctatgtgggtgccatgccaggcaagctaatccaatgcctgaaaaagaccaagatcgaaaacccgctggttctgatcgatgaggtggacaaaattggaaagggctaccaaggagaccctagctccgccctgttggaactgctcgatcctgagcagaacgccaacttcctggaccactatctggacgtccccgtagacctttcgcgagtgctcttcatctgcacagccaatgtgatcgacacaattcccgaacccctcagggatcgcatggagctgatcgaaatgtcggggtatgtggccgaggagaagatcgccattgcacgccagtatctgataccgcaagccatgaacgactgcggactgacggatgagcaaatcaaaatcaccgaagatgccctcaacatgctgatccgtagctattgccgtgaatccggcgtccggaacctgcagaaacacatcgagaaggtcattcgcaaggtggccttccgcttggttaagaaggagggcgaacacttcccggtgaactctgaaaatctcaccacattccttggcaaacagatctttagctcggatcggatgtatgacactaccccggttggtgtggtcatgggtctggcctggacggccatgggcggctcatcgctgtacatcgagacctctaggcgccatatccgccacttggacaagccggacgctcctattaccggtggaactcttcatattaccggaaatctaggagatgtcatgaaggagtcggcacaaatagctattacggtggcacgcaactttctgcactcacatgatcctaataatctcttcctcgagcaagagcacattcatctgcacgtacctgaaggagccacgcccaaagatggccccagtgcgggaattactatcatcactgcgctggtctccttggcgacaggcaagcctgtccgacaagacgtggccatgacaggggaggtgtccctcaagggaaaagttctgaccgttggtggtattaaggagaagactatagcagcccgtcgcagtggagtcaattgcctcatcctgcctgtggataacaaaaaggacttcgaagagctgcccacgtacataacagagggtctggaagtgcacttcgcagccagctacgaggatgtctataagatagccttttccgacaccagtgacacgactagcaagacagatgctgtagaacaggagccgctccggaaaatttccagtgcagcagcggccaagtcgacatag

SEQ ID NO: 3178 - protein, 1005 aa, Drosophila ananassae
MLTRAIRVRPVIRGIASTAVWTRNHPAQSSLMHYYRDRATRLHQFYGANMMVQRFYSRKRDDSDPDLVSDHGPELITERDPQLPATVAVPDVWPHVPLLAMRKNPLFPRFMKIVEVSNPIIMDLLRRKVKLNQPYVGVFLKKSDGEEELIHNLDDVYNLGTFAQIQELQDLGDKLRMVVVAHRRIRITGQVVEDVTPPKPAEDQTTEQEDTHARTRPEAGRKPRGRAPRRPPQKPRDQANMEEIAQKQTLEPPLKSGKIDPTSVLKPPPTQAKKAETTAEAGAEGDDKAASGPQPILVVEVENVKQPVYKQTEEVKALTQEIIKTLRDIITMNPLYRESLQQMLHQNQRVVDNPIYLCDLGASLSAGEPAELQRILEETDIPERLQLALTLLKKELELSRLQQKIGREVEEKVKQQHRKYILQEQLKVIKKELGIEKDDKDAIGEKYREKLKDKTVPESIMTVIDEELTKLNFLESHSSEFNVTRNYLDWLTSLPWGVISTENLCLEKATEILNNDHYGMEDIKKRILEFIAVSSLKGTTQGKILCFHGPPGVGKTSIAKSIARALNREYFRFSVGGMTDVAEIKGHRRTYVGAMPGKLIQCLKKTKIENPLVLIDEVDKIGKGYQGDPSSALLELLDPEQNANFLDHYLDVPVDLSRVLFICTANVIDTIPEPLRDRMELIEMSGYVAEEKIAIARQYLIPQAMNDCGLTDEQIKITEDALNMLIRSYCRESGVRNLQKHIEKVIRKVAFRLVKKEGEHFPVNSENLTTFLGKQIFSSDRMYDTTPVGVVMGLAWTAMGGSSLYIETSRRHIRHLDKPDAPITGGTLHITGNLGDVMKESAQIAITVARNFLHSHDPNNLFLEQEHIHLHVPEGATPKDGPSAGITIITALVSLATGKPVRQDVAMTGEVSLKGKVLTVGGIKEKTIAARRSGVNCLILPVDNKKDFEELPTYITEGLEVHFAASYEDVYKIAFSDTSDTTSKTDAVEQEPLRKISSAAAAKST

SEQ ID NO: 3179 - DNA, 3024 bp, Drosophila erecta
  CDS (1)..(3024)
atgttagcccgcgctatccgagtgcgccccatgatgcggggcatcgcctcggcgtcagtgtggacacggaatcgtcccgtacagagttccctgatgcaatactgccgcgatcgctcgctgcgcctccagggattccacggatccaatttgatagtgcagcgcttctatagccgcaagcgggatgattctgacgaggatcttatgtcggagagtcagggacccgaacttatatccgaacgggattcccagcttccggcaaccgtggcggtgccggacgtgtggccacatgtcccactgttggccatgcgcaagaatcctctctttccccgctttatgaagattgttgaggtatccaatcccataatcatggacctgctgcgtcgcaaagtcaagctgaatcaaccttatgtgggtgtcttccttaaaaaaactgatggcgaagaggagcttattaccaatttggatgatgtctacaatctcgggtcatttgcgcaaatccaagagctccaggatctgggtgataagctccgcatggttgtggtggcccaccgtcgtattcgaatcacaggccacgtggtagaggacgtaccacctcctaagcccgctgaagatcaaagcactgatcaagcggatgcgacgcctataaaatcaaggcccgacacagcccgaaagcctcgtggccgaatacccaggaatcggtccggaaaatcacgtgaatcggcggccgctgaagaacttgcacagaaccagactctagagccgccactgaaatcaggcaaagtagagtcatcgagttcgccaaagcctccaacacaaggagagaaagtggatcctgagactgcagcggaaggaaatgccaatcaatctgcgcccagcgcccaacctgttctaattgtagaagtggagaacgtgaagcaaccgatttataaacaaaccgaagaggtaaaggcattaactcaggagataattaagactcttcgggacataatcacaatgaatcccttgtacagggagagtctacagcagatgctgcatcaaaatcaacgagttgtcgacaaccccatttatctgtgtgatttgggagcttccctttccgctggagaaccagctgagctgcaaaaaattcttgaggaaaccgatatcccagaacgtctacagttagccttaactctactcaagaaagagttggaactctctagactgcaacaaaaaattggacgcgaagtagaggaaaaagtcaagcagcaacatcgcaaatatattctccaggagcagttgaaagttatcaaaaaagaacttggcatcgaaaaagacgacaaggatgccattggtgaaaagtaccgcgaaaagcttaaggataaagtggttcccgaagccattatgacagttattgacgaagagcttaccaagctgaacttcctggagagtcacagctccgagtttaatgtaacacgtaattacctcgactggcttacttccctaccttggggcgttatcagcaccgaaaatctctgcctggaaaaggcaactgaaatactaaacgacgatcactacggaatggaggatatcaagaagcgtatattggaattcattgcggtcagttctctaaagggctcgacgcagggcaagatcttatgctttcatggaccacctggtgtgggaaagacaagcatagcgaagtccattgcgcgcgctttgaaccgcgagtacttccgcttcagtgtgggcggaatgacagacgtggccgagatcaagggtcatcgtcgcacctatgtgggcgctatgcctggtaaactgattcagtgcctgaagaagactaagatagaaaatccactggtactaatcgacgaggtggacaagatcggcaagggctaccagggagatcctagctcagcattgttagagctactagatcccgagcagaatgcgaatttcctggaccactacctcgatgtgccagtggatctttcgcgagtgctgtttatttgtacagctaatgtgatcgacactattcccgagccgttaagagatcgcatggaattgattgagatgtctgggtatgttgccgaagaaaagatcgccatcgctcgtcagtatctcatgccacaggcaatgaaggactgtggattgacggataagcagatcaacatttccgaggatgccttaaacatgctgatccgcagttattgtcgggaatccggggtgcgaaacctgcagaagcatatcgagaaagttattcgcaaggtggccttccgactggtcaagaaggaaggcgagcactttccggttaacgctgataatctgaccacattcctgggtaaacaaatcttcagctcagatcgcatgtatgcgacaacaccggtgggtgtagtcatgggtctggcctggacggccatgggcgggtcatcgctttacatcgaaacctcgaggcgtcacatacgccaggggacgaaagcagatccgaatgctgttggtggatcgctgcacatcaccggaaatttgggagatgttatgaaggagtcggctcaaatagccttaacggtagcgcgcaactttttgtattcgcttgaacccaataacttgttcttagagcaagaacacattcacctccatgttcctgaaggggccacaccgaaagacggtcccagtgctggcatcaccattattacagctctcgtttccttggccactggaaagccggtgcgccaagacgtcgctatgacgggcgaagtatccctgaagggaaaagtgctacccgttggtggtattaaggaaaagacgattgcagcccgtcgtagtggagtgaattgccttattctgcctgtggataacaagaaagacttcgaggagttgcccacgtacattacagaaggtctggaggttcactttgctacaacctacgaggacgtctacaagatagcgtttactgatgtaaccaaaacgacaaccaacgatgttgtggagcaggagccactgcagaaagtttccagtgcggccgctgcccagtcggggacatggccttag

SEQ ID NO: 3180 - protein, 1007 aa, Drosophila erecta
MLARAIRVRPMMRGIASASVWTRNRPVQSSLMQYCRDRSLRLQGFHGSNLIVQRFYSRKRDDSDEDLMSESQGPELISERDSQLPATVAVPDVWPHVPLLAMRKNPLFPRFMKIVEVSNPIIMDLLRRKVKLNQPYVGVFLKKTDGEEELITNLDDVYNLGSFAQIQELQDLGDKLRMVVVAHRRIRITGHVVEDVPPPKPAEDQSTDQADATPIKSRPDTARKPRGRIPRNRSGKSRESAAAEELAQNQTLEPPLKSGKVESSSSPKPPTQGEKVDPETAAEGNANQSAPSAQPVLIVEVENVKQPIYKQTEEVKALTQEIIKTLRDIITMNPLYRESLQQMLHQNQRVVDNPIYLCDLGASLSAGEPAELQKILEETDIPERLQLALTLLKKELELSRLQQKIGREVEEKVKQQHRKYILQEQLKVIKKELGIEKDDKDAIGEKYREKLKDKVVPEAIMTVIDEELTKLNFLESHSSEFNVTRNYLDWLTSLPWGVISTENLCLEKATEILNDDHYGMEDIKKRILEFIAVSSLKGSTQGKILCFHGPPGVGKTSIAKSIARALNREYFRFSVGGMTDVAEIKGHRRTYVGAMPGKLIQCLKKTKIENPLVLIDEVDKIGKGYQGDPSSALLELLDPEQNANFLDHYLDVPVDLSRVLFICTANVIDTIPEPLRDRMELIEMSGYVAEEKIAIARQYLMPQAMKDCGLTDKQINISEDALNMLIRSYCRESGVRNLQKHIEKVIRKVAFRLVKKEGEHFPVNADNLTTFLGKQIFSSDRMYATTPVGVVMGLAWTAMGGSSLYIETSRRHIRQGTKADPNAVGGSLHITGNLGDVMKESAQIALTVARNFLYSLEPNNLFLEQEHIHLHVPEGATPKDGPSAGITIITALVSLATGKPVRQDVAMTGEVSLKGKVLPVGGIKEKTIAARRSGVNCLILPVDNKKDFEELPTYITEGLEVHFATTYEDVYKIAFTDVTKTTTNDVVEQEPLQKVSSAAAAQSGTWP

SEQ ID NO: 3181 - DNA, 3000 bp, Drosophila grimshawi
  CDS (1)..(3000)
atgattacacgtgccgtctgtgttcgttccatgctgcgtggcttgtccacagtggcggcctgtgcgcgcaatcgccatacacaaagctccatggttgaatatttcaatgaggtgcggcttctgcgatacaatggagccgctttaatgatgcagacacagcgcttctacgccagccggaagcgtggcgatggcgatgatgcgatggctgagggcgagcccgaactgttgtcagatcatcgagattcgcagcagctgccggcaactgttgccgttccagatgtgtggccccacgtgccaatgctggcgatgcgccggaatcccctctttccccgtttcatgaagatagtcgaggtctccaatccgattataatggacctgttacggcgcaaagtgaagctaaatcagccgtatgtgggcgtctttctcaagaaatcagacggcgaggaggagattatacacgatatagacgatgtgtattccgtgggctgctttgcacagatacaggagctgcaggacttgggcgataagttgcgcatggttgttgtcgcccatcgacgcatcaaaatcaccggtcaaatattggaggaagtgcagccaccggcgaaatcagctgaagatcaaacgactagcgattccacattcaaatcggtcagtagaagcgcacgcaaagcacggggacgcgcaccccggcgacaaacgcagaatctaagcgatgctgccaccaccgaggaggttgcccagagtcagacgctggaggcaccactggccagcggtcgtgtggagccagcagctgcaccaaccaaaccgctagagaatgacgcgacagcctctgctgatgttgctgaagagtctacagccccaaatggaccgccagtgctgattgtggaggtagagaatgtcaagcagccggcgtacaaacaaaccgaagaagtcaaagctttaacgcaagagattattaaaaccttgcgcgatatcatcaccatgaatcctttgtacagagaaagcttacagcaaatgctgcatcagaatcaacgagttgtcgataatcccatttatttgtgtgatttgggcgcctcactctcctcgggcgagccagctgagctgcagaaaattctcgaggaaaccgatatacctcagcgattattactcgcattggcactccttaaaaaggaattggagttgtctcgattgcagcaaaagattggacgcgaagtggaggagaaggtcaagcagcagcatcgcaaatatatactgcaggagcagctgaaggtcatcaaaaaggagctgggcattgagaaggatgacaaggatgccatcggtgagaaatatcgcgacaaactcaaggacaaaacagtgccggagaacatcaaaactgtcattgacgaggaactgaccaagctgaacttcttagaaagtcacagttccgaattcaacgttacacgaaattatttagactggctcacctcattgccttggggcgttattagtcccgagaacttgtgccttgacaaagccaccgaaattttaaacaacgatcattatggcatggaagacatcaagaagcgtattttggaatttattgctgttagctctctaaagggtacgacgcaaggcaaaattctgtgtttccatgggccgcctggagttggcaagacgagcatagcgaaatcaatagcgaacgccttgagtcgcgagtatttccgctttagtgtgggcggaatgacggatgtagcggagatcaagggtcatcggcgcacctacgtaggcgccatgcccggtaagctgatacagtgtctgaaaaagaccaaaacggagaatcctctggtgctcatcgatgaggtcgataagattggaaaaggctatcagggtgatcctagctctgctctgctcgagttgctggatcccgagcaaaatgccaatttccttgaccattatttggatgtgcccgttgatctgtcccgtgtcttattcatttgcacagcgaatgtgatagataccatacccgagccactgcgggatcgtatggaactcatcgaaatgtctggatatgttgccgaagagaaggtagccattgcgcgccagtatctgataccacaggccatgaatgactgcggtctaacggataaacaggttaacataaccgaggatgcgctaaaaatgctcatacgcagctattgtcgcgaatctggtgtgcgtaatctgcagaagcaaatcgagaaggtcatacgcaaggtggccttccggctggtcaaaaaagagggcgaagagttcccagtgaatgccgacaatctaacaacgttcctgggcaaacaagttttcagttcggatcgcatgtacgcaacgacaccagccggtgttgtcatgggcttggcctggacagccatgggcggatcatcgttgtacattgagacatcccggcgtcacattcgttcagagaaacccgaagcgaacagtggagcattacacctaacgggcaatctgggcgatgtaatgaaggaatctgcacaaattgccttgactgtggcccgaaactttttgtacacatatgatccaaagaacaagttcctagagcaagaacacattcacctgcatgtgcctgagggcgccacaccgaaagatggacctagcgctggtgttactataatcacagcattggtttcactagccaccggcaagccagtgcgtccggatgtggcaatgacgggcgaggtttccctaatgggaaaggttttgactgtaggcggcataaaagagaaaaccattgctgctcgtcgcagcggcgtcacatgtcttattctgccctttgacaataagaaggactttgatgagctgcccagcttcattaccgatggactggaagtgcactttgccagcaactatgatgatgtctataggattgcctttgcagatccacagctattagaaacagatagcaaaagtgaatctgcggcgccgcttgaaaagatagccagtgtttcggctaagcaagccagcacatag

SEQ ID NO: 3182 - protein, 999 aa, Drosophila grimshawi
MITRAVCVRSMLRGLSTVAACARNRHTQSSMVEYFNEVRLLRYNGAALMMQTQRFYASRKRGDGDDAMAEGEPELLSDHRDSQQLPATVAVPDVWPHVPMLAMRRNPLFPRFMKIVEVSNPIIMDLLRRKVKLNQPYVGVFLKKSDGEEEIIHDIDDVYSVGCFAQIQELQDLGDKLRMVVVAHRRIKITGQILEEVQPPAKSAEDQTTSDSTFKSVSRSARKARGRAPRRQTQNLSDAATTEEVAQSQTLEAPLASGRVEPAAAPTKPLENDATASADVAEESTAPNGPPVLIVEVENVKQPAYKQTEEVKALTQEIIKTLRDIITMNPLYRESLQQMLHQNQRVVDNPIYLCDLGASLSSGEPAELQKILEETDIPQRLLLALALLKKELELSRLQQKIGREVEEKVKQQHRKYILQEQLKVIKKELGIEKDDKDAIGEKYRDKLKDKTVPENIKTVIDEELTKLNFLESHSSEFNVTRNYLDWLTSLPWGVISPENLCLDKATEILNNDHYGMEDIKKRILEFIAVSSLKGTTQGKILCFHGPPGVGKTSIAKSIANALSREYFRFSVGGMTDVAEIKGHRRTYVGAMPGKLIQCLKKTKTENPLVLIDEVDKIGKGYQGDPSSALLELLDPEQNANFLDHYLDVPVDLSRVLFICTANVIDTIPEPLRDRMELIEMSGYVAEEKVAIARQYLIPQAMNDCGLTDKQVNITEDALKMLIRSYCRESGVRNLQKQIEKVIRKVAFRLVKKEGEEFPVNADNLTTFLGKQVFSSDRMYATTPAGVVMGLAWTAMGGSSLYIETSRRHIRSEKPEANSGALHLTGNLGDVMKESAQIALTVARNFLYTYDPKNKFLEQEHIHLHVPEGATPKDGPSAGVTIITALVSLATGKPVRPDVAMTGEVSLMGKVLTVGGIKEKTIAARRSGVTCLILPFDNKKDFDELPSFITDGLEVHFASNYDDVYRIAFADPQLLETDSKSESAAPLEKIASVSAKQAST

SEQ ID NO: 3183 - DNA, 2889 bp, Drosophila mojavensis
  CDS (1)..(2889)
atgcagacacagcgcttcttcagccgcaagcgcaacgataacgaggatgacttgatggccgaggctgaacctgagctgctggccgatcatcgagactcgcaacaactgccggcgacggttgccgtgcccgatgtatggccccacgtgccgatgttagcgatgcgacgaaatccactgttcccgcggttcatgaagatagtcgaggtctcgaatccaattatcatggatcttttgcgacgcaaggtgaagctcaaccagccttatgtgggcgtgtttcttaagaaaaccgatggggaagaggagctcatacataatctggacgatgtttattcggttggcacctttgctcaaatccaggagctgcaggatctgggagataagctgcgaatggtcgttgtagctcacagacgtatcaaaataacagggcaagttgtggacgatgcaccatcaaagtcagctgaagatcaatcaactgatggcgctaatgctactggcaaatcgaataatcgaggcatacgcaagactcgaggacgtgctccacgtcgacaaacacaaaaattaaacgaggccgccagcgctgaggagatggcccagcgtcaaacgctggagccaccgttgcctagtggacgtgtcgagcaaacgacagcagcgacagcaaaaaagaatgtggaagatgtgaaatcatctacggcagagacgacagataacagcaccgaaacatccacaggcggcccaacaacgccacccgtgcttattgtagaagtggagaacattaagcagccggtgtataagcaaacggaagaggtcaaggctctgacacaggagattataaaaaccttgcgcgatattattaccatgaacccattgtacagagaaagcttgcagcaaatgctgcatcagaatcagcgagtggttgataatcccatctatttgtgtgacttgggcgcctccttgtccgctggtgagccaagcgaactgcaaaagattctggaggaaactgatatacctcaacgtcttctgttggcattggcgttgcttaaaaaagaattggaactgtcgcgcttgcagcaaaagattgggcgcgaagtggaggagaaagtcaagcagcagcatcgcaaatacatactccaggagcagctgaaggtgattaagaaggagctgggcattgaaaaagatgataaggatgccattggcgaaaagtatcgcgaaaaactcaaggacaaaactgtaccagagagcatcaaaactgttattgacgaagagctcaccaagttgaacttcttggagagtcacagctcagagtttaatgttactcgcaactatctggactggcttacctctttgccttggggcgtcattagtcccgaaaacctgtgccttgacaaagccaccgaaattttaaacaacgatcactacggcatggacgacattaagaagagaatattggaatttattgctgttagttcactgaagggcacgacgcagggcaagatcttgtgcttccatggaccgccaggcgtgggcaaaacgagcatagcaaagtccattgcgcgcgccctgaatcgcgagtatttccgcttcagtgttggcggaatgacagatgtggcagagattaagggacatcgtcgcacctatgtgggcgccatgcctggcaagctaatacagtgccttaagaagaccaagacggagaatccgctggttctcatcgacgaagtggacaagattggcaagggctatcagggtgatccgagctcagccctattggagctgctggatcccgaacaaaatgccaatttccttgaccattatctggatgtacccgtggatctgtcacgagtgcttttcatctgcacagcaaatgtggttgataccataccagagccactgcgcgatcgcatggagctcatcgaaatgtccggctatgtggctgaagagaaggtggctattgcccgtcaatacctgataccgcaggcaatgaaagactgtggcctaacagagaagcaggtcaacattacggaggatgcgttgaacatgcttatacgcagctattgccgagagtcaggtgtgcgtaatctgcagaagcagatcgagaaggtcattcgcaaagtggccttccgcctggtcaagaaagagggcgatgagttccccgtgaatgccgacaacttgacaacgttcctgggcaaacaggttttcagttccgatcgtatgtacaacgtaacgcccgctggtgttgtgatgggcttggcctggaccgcaatgggcggttcttcattatacattgagacttccaggcgtcacatacgcgccgagaagcccgaatccacagctggagtattacacttaactggtaacttgggtgatgtaatgaaggaatccgcacaaattgctctgaccgtggctcgaaactttttgtacacgtatgatccaaagaacaagttcctggagcaggaacacattcacctgcatgtgcctgaaggatcgacgcccaaagatggacccagcgctggtgtcactataatcacggctttggtttcccttgctaccggaaagccagtgcgtccagatgtggccatgacgggtgaggtttcactaaagggcaaagttttgactgtggggggtatcaaggaaaagaccattgcggcccgacgcagcggcgtcacctgtttaattttacctgctgacaataagaaggactttgaggagctgcccagcttcattaccgacggcttggaagtgcactttgccagcgaatacgaggatgtctataagattgctttctctgacccggactttacctcaacgaaaaacgaaacaagcagcacaactgaggcgatgcgcgttaagatcccaaccgctgccacagccgctgcaaagccgaccagctcctga

SEQ ID NO: 3184 - protein, 962 aa, Drosophila mojavensis
MQTQRFFSRKRNDNEDDLMAEAEPELLADHRDSQQLPATVAVPDVWPHVPMLAMRRNPLFPRFMKIVEVSNPIIMDLLRRKVKLNQPYVGVFLKKTDGEEELIHNLDDVYSVGTFAQIQELQDLGDKLRMVVVAHRRIKITGQVVDDAPSKSAEDQSTDGANATGKSNNRGIRKTRGRAPRRQTQKLNEAASAEEMAQRQTLEPPLPSGRVEQTTAATAKKNVEDVKSSTAETTDNSTETSTGGPTTPPVLIVEVENIKQPVYKQTEEVKALTQEIIKTLRDIITMNPLYRESLQQMLHQNQRVVDNPIYLCDLGASLSAGEPSELQKILEETDIPQRLLLALALLKKELELSRLQQKIGREVEEKVKQQHRKYILQEQLKVIKKELGIEKDDKDAIGEKYREKLKDKTVPESIKTVIDEELTKLNFLESHSSEFNVTRNYLDWLTSLPWGVISPENLCLDKATEILNNDHYGMDDIKKRILEFIAVSSLKGTTQGKILCFHGPPGVGKTSIAKSIARALNREYFRFSVGGMTDVAEIKGHRRTYVGAMPGKLIQCLKKTKTENPLVLIDEVDKIGKGYQGDPSSALLELLDPEQNANFLDHYLDVPVDLSRVLFICTANVVDTIPEPLRDRMELIEMSGYVAEEKVAIARQYLIPQAMKDCGLTEKQVNITEDALNMLIRSYCRESGVRNLQKQIEKVIRKVAFRLVKKEGDEFPVNADNLTTFLGKQVFSSDRMYNVTPAGVVMGLAWTAMGGSSLYIETSRRHIRAEKPESTAGVLHLTGNLGDVMKESAQIALTVARNFLYTYDPKNKFLEQEHIHLHVPEGSTPKDGPSAGVTIITALVSLATGKPVRPDVAMTGEVSLKGKVLTVGGIKEKTIAARRSGVTCLILPADNKKDFEELPSFITDGLEVHFASEYEDVYKIAFSDPDFTSTKNETSSTTEAMRVKIPTAATAAAKPTSS

SEQ ID NO: 3185 - DNA, 2886 bp, Drosophila persimilis
  CDS (1)..(2886)
atggtgatggctcaacgcttctacagtcgcaaacgcgattatcccgattacaagaaagctcaagcggtaacagaattgctgtccgaccaaaattctaacctgcctgccacagtggccgtgcccgacgtatggccacatgttccgctgctagccatgcgtaagaatcccttgtttccgcgattcatgaagattgtggaggtatccaacccaattgttataaatctgctgcgtcgcaaagttagccttcatcagccctacgttggggttttcctcaagaaagtcgacggggaagaggaggtcgtccagagtctggatgaagtccatcacctgggcacttttgcacagatccaagaggttcaggatttgggcgacaagatgcgcatggtggtggtggcccatcgtcgcatacgcatcacaggacaggtgatcgaggatctaccacctccaaaaaagccagtgaaaacgacaaccatcaacgaatcatcgatatcgacaaggccactgtcgtcaagagaacgccgcaaagcacgacgcgcgatttggcagaaattacaagagtctgcagcttccgctgacgctgacagtgaatttgatttggaagagcattcgcatatttcagaaaaatttaaagctgcatccaaagccgcaatcgaagcggaagagagtacatcagctatccccgttgcagagtctgctgcaccagctgcatcaccgcccgtgctcattgtagaggttgagaatgtgaagctaccagtttacaaacaaaccccagtggtcaaggcgctaacacaagagattatcaagactctacgcgacattatcaccatgagtcccctgtatagggagagtctccatcaaatgctgcatcagaatcaacgagttgtggacaaccccatctacctatgcgacttgggtgcctccctgtcgaccggagacccagaggagctgcaaaatatcctggaggaagaagatatcccaaaacgtctgcagctgtccctcacattactcaaaaaagagcaggagctatcgagactgcaggcgaaaataggacgcgaggtagaggaaaaagtcaagcagcagcaccgaaaatacatactgcacgaacagttgaaggttatcaaaaaggagctgggcattgaaaaagacgacaaggatgccatcggtgaaaattatatggaaatgctccaggacaaaatcgttccagaaaatattcagcaggtcatcgccgaggaactgaccaaactgaacttcctggagagtcatagcgctgaatttaatgtaacccgcaactacctcgactggctcacctcgctaccctggggcgtcatgagcactgagaatctctgcctggacaaagccaacgagatcctaaactatgatcactacggcatggaggatatcaagaagcgcatcctagagtttatcgccgtcagtgctctgaatggcaccacgcagggcaagatcttgtgcttccatggaccgcctggtgtaggcaagacgagcatagccaagtccattgctcgggccctgaatcgcgagtacttccgctttagtgtgggcggcatgacggatgtggctgagatcaagggacatcgtcgcacctacgtgggcgcaatgcccggcaagctgatacagtgcttgaaaaaaaccaagactgagaatcctctagtgctcattgatgaggtggacaagattggcaagggctatcagggagatcccagctcggcgctgttagagctactcgatcccgagcagaatgccaatttcctggaccactatctggacgtaccaatcgatctgtctcgtgtgctattcatttgcacggccaacgtgattgataccataccagagccgctgagagatcgcatggagctgattcagatgtccggctatgtggccgaggagaaggtggccattgcccgccagtatctaataccgaagtcgatgaacgactgtggcctgaccgacgagcatatcagcataaccgagaaagccctgaatatgctgatacgcaactattgccgcgagtccggagtgcgcaacttgcagaaacagatcgagaaggttatgcgcaaggtggccttccttttggtcaagaaagagggcaccagcttcccagtggatgccgaaaatctgaccacattcctgggcaagcagatctttacctcggatcgcatgtacgagacgacgccgccgggcgtggtcatgggcctggcctggacggccatgggtggctcatcgctgtacattgagacatcggagcggaacagatataaaagcctgggccccaaatcagaagacagtggtgtaagcggaggtggcactttgtatatcaccggaaaccttggagatgtgatgaaggaatcgggccaaatagccctgagcgtggcgcgaaactttattcacattcgagatcctggcaatcagtacctagaacttgcaaacatccaccttcatgttcctgagggggccgtaccaaaggatggacccagtgccggcgtcaccataatcaccgccctaatttcgttggccaccaacaagcctgtgcgtaatgatgtggccatgacgggcgagatatcgctgaagggcaaagttctgcccgtaggaggcatcaaggagaaggccatagccgcacgtcgcagtggcgtccactgtctcatcctgcccgcggacaacaagaaggacttcgaggaattgcccaagttcataaccgaaggcctggatgttcactttgcggccaactacgaggatgtctacaacattgcattttccgaacccaccaaaaacgaggccgaggcccaagtattgccagcgtcggatcaggagcccgagctcgaggtgtccagcgtagactgcgcggccggcgcaatgccattcaggccttaa

SEQ ID NO: 3186 - protein, 961 aa, Drosophila persimilis
MVMAQRFYSRKRDYPDYKKAQAVTELLSDQNSNLPATVAVPDVWPHVPLLAMRKNPLFPRFMKIVEVSNPIVINLLRRKVSLHQPYVGVFLKKVDGEEEVVQSLDEVHHLGTFAQIQEVQDLGDKMRMVVVAHRRIRITGQVIEDLPPPKKPVKTTTINESSISTRPLSSRERRKARRAIWQKLQESAASADADSEFDLEEHSHISEKFKAASKAAIEAEESTSAIPVAESAAPAASPPVLIVEVENVKLPVYKQTPVVKALTQEIIKTLRDIITMSPLYRESLHQMLHQNQRVVDNPIYLCDLGASLSTGDPEELQNILEEEDIPKRLQLSLTLLKKEQELSRLQAKIGREVEEKVKQQHRKYILHEQLKVIKKELGIEKDDKDAIGENYMEMLQDKIVPENIQQVIAEELTKLNFLESHSAEFNVTRNYLDWLTSLPWGVMSTENLCLDKANEILNYDHYGMEDIKKRILEFIAVSALNGTTQGKILCFHGPPGVGKTSIAKSIARALNREYFRFSVGGMTDVAEIKGHRRTYVGAMPGKLIQCLKKTKTENPLVLIDEVDKIGKGYQGDPSSALLELLDPEQNANFLDHYLDVPIDLSRVLFICTANVIDTIPEPLRDRMELIQMSGYVAEEKVAIARQYLIPKSMNDCGLTDEHISITEKALNMLIRNYCRESGVRNLQKQIEKVMRKVAFLLVKKEGTSFPVDAENLTTFLGKQIFTSDRMYETTPPGVVMGLAWTAMGGSSLYIETSERNRYKSLGPKSEDSGVSGGGTLYITGNLGDVMKESGQIALSVARNFIHIRDPGNQYLELANIHLHVPEGAVPKDGPSAGVTIITALISLATNKPVRNDVAMTGEISLKGKVLPVGGIKEKAIAARRSGVHCLILPADNKKDFEELPKFITEGLDVHFAANYEDVYNIAFSEPTKNEAEAQVLPASDQEPELEVSSVDCAAGAMPFRP

SEQ ID NO: 3187 - DNA, 3015 bp, Drosophila sechellia
  CDS (1)..(3015)
atgttagcccgcgctatccgagtgcgccccatggtgcggggcatcgcctcggcgtcagtgtggacccggaatcgtcccgtccagagttccctgatgcaatactgccgggatcggtcgttgcgtctccagcggttccacggagccaatttgatggtgcagcgcttctacagccgcaaacgggatgattccaacggagatattattatgggacccgatcttatgtcggagcaagatccccatcttccggcaactgtggcggtgccggacgtgtggccacatgtcccgctgttggccatgcgcaaaaatcctctctttccccgcttcatgaagatagtggaggtatccaatcccatcatcatggatctgctgcgtcgcaaagtcaagctgaatcaaccttacgtgggtgtcttccttaaaaaaactgatggcgaagaggagcttatcaccaatttgaatgatgtttacaatctcggaacatttgcccaaatccaagagctgcaggatctcggtgataagctgcgtatggtagtggtggcacaccgtcgtattcgtataacaggtcaggtggtagaggacgtgccaactcctaagcccgctgaagatcaaagcactgatcaagcggatgcggcacctataaaatcaaggtccgacccagcacgaaagccccgtggccgaattcccaggagtcggaccggaaaatcacgtgaatcggcggctgctgaagaacttgtacaaaaccagactctggagccgccactgaaatcaggcaaagtcgagtcatcgagtttgccaaagcctccaacagaagaaaagatagtggaacctgagaatggagcggaagaaaatgttaatcaatctgcgtccagcgcccaacctgttcttattgtagaagtggagaacgttaagcaaccgatttataaacaaacggaagaggtaaaggcattaactcaggagataatcaagactctacgggacataatcacaatgaatcccttgtatagggagagtctacagcaaatgctgcatcaaaatcaacgagttgtcgacaaccccatatatctgtgtgatttgggagcatccctttccgctggagaaccagctgagctgcaaaaaatccttgaggaaaccgatatcccagaacgtctgcagttggccttaactttactcaaaaaggagttggaactctccagactgcaacaaaaaattggacgcgaagtagaggaaaaagtcaagcagcaacatcgcaaatatatactccaggagcagttgaaagtcatcaaaaaagaactgggcatcgaaaaagacgacaaggatgccattggtgaaaagtaccgcgaaaagttgaaggataaggtggttcccgaagctattatgacggttattgatgaagagctcaccaagctgaacttcttggagagtcacagttccgagtttaatgtaactcgcaattacctcgactggcttacttcgctaccttggggcgtcatcagcaccgaaaatctctgcctggagaaggccactgaaacactaaacgacgatcactacggaatggaggatatcaagaagcgtattttagaatttattgccgtcagttccctcaagggctctacacagggcaaaatcttgtgcttccatggaccacctggtgtgggcaagacaagcatagcaaagtccattgcgcgcgctttgaaccgcgagtacttccgctttagtgtgggcgggatgacagacgtggccgagatcaagggacatcgccgcacatacgtgggcgccatgccgggtaaactgattcagtgcctgaagaagaccaagattgaaaatcctctggtactcatcgacgaggtggacaagatcggcaagggctatcagggagatcctagctcagcattgttggagctactagatcccgagcagaatgcgaatttcctggaccactacctcgatgtgccggtggatctctcgcgagtgctctttatctgcactgctaatgtgatcgacacaattcccgagccgttaagagatcgcatggaattgattgagatgtctggctatgttgccgaagaaaagatcgccatcgctcgtcagtatctgatgccacaagcaatgaaggactgtggattgacggacaagcatatcaacatttccgaggatgccctaaacatgctgattcgcagttattgccgggaatccggggtgcgaaacctgcaaaagcatatcgagaaagttattcgcaaggttgccttcaaagtggttaaaaaagaaggcgagcactttccggttaacgctgataacctgaccacattcctgggcaagcaaatcttcagctcagatcgcatgtacacgacaacaccggtgggtgtagtcatgggtctggcctggacagccatggggggttcatcgctttacatcgaaacctcaaggcgtcacatacgccagggggcaaaaacagatccgaacactgtcgccggatcgctgcacatcaccggaaatttgggagatgtcatgaaggagtcggcccaaatagccttaacggtggcgcgcaactttttgtattcgctggaatccaataatctgttcttagagcaagaacacattcacctccatgttcctgaaggtgccacaccgaaagacggtcccagtgctggcatcaccattattacagctctcgtttcgttggccactggaaagccggtgcgccaagacatcgctatgacgggtgaagtatccctgaagggaaaagtgctacccgtgggtggtattaaggaaaagacgattgcagcacgtcgtagtggggtgaattgtctaattctgcctgtggataacaagaaggacttcgaggagttgcccacgtacattacagatggtctggaggttcactttgccaccacctacgaggatgtctacaaggtagcgtttaccgatgtaactgaaacgacaaccaacaatgttgaagagcaggagccgctgcagaagctctccagtgcggccgctgctaagtcggacacgtggccttag

SEQ ID NO: 3188 - protein, 1004 aa, Drosophila sechellia
MLARAIRVRPMVRGIASASVWTRNRPVQSSLMQYCRDRSLRLQRFHGANLMVQRFYSRKRDDSNGDIIMGPDLMSEQDPHLPATVAVPDVWPHVPLLAMRKNPLFPRFMKIVEVSNPIIMDLLRRKVKLNQPYVGVFLKKTDGEEELITNLNDVYNLGTFAQIQELQDLGDKLRMVVVAHRRIRITGQVVEDVPTPKPAEDQSTDQADAAPIKSRSDPARKPRGRIPRSRTGKSRESAAAEELVQNQTLEPPLKSGKVESSSLPKPPTEEKIVEPENGAEENVNQSASSAQPVLIVEVENVKQPIYKQTEEVKALTQEIIKTLRDIITMNPLYRESLQQMLHQNQRVVDNPIYLCDLGASLSAGEPAELQKILEETDIPERLQLALTLLKKELELSRLQQKIGREVEEKVKQQHRKYILQEQLKVIKKELGIEKDDKDAIGEKYREKLKDKVVPEAIMTVIDEELTKLNFLESHSSEFNVTRNYLDWLTSLPWGVISTENLCLEKATETLNDDHYGMEDIKKRILEFIAVSSLKGSTQGKILCFHGPPGVGKTSIAKSIARALNREYFRFSVGGMTDVAEIKGHRRTYVGAMPGKLIQCLKKTKIENPLVLIDEVDKIGKGYQGDPSSALLELLDPEQNANFLDHYLDVPVDLSRVLFICTANVIDTIPEPLRDRMELIEMSGYVAEEKIAIARQYLMPQAMKDCGLTDKHINISEDALNMLIRSYCRESGVRNLQKHIEKVIRKVAFKVVKKEGEHFPVNADNLTTFLGKQIFSSDRMYTTTPVGVVMGLAWTAMGGSSLYIETSRRHIRQGAKTDPNTVAGSLHITGNLGDVMKESAQIALTVARNFLYSLESNNLFLEQEHIHLHVPEGATPKDGPSAGITIITALVSLATGKPVRQDIAMTGEVSLKGKVLPVGGIKEKTIAARRSGVNCLILPVDNKKDFEELPTYITDGLEVHFATTYEDVYKVAFTDVTETTTNNVEEQEPLQKLSSAAAAKSDTWP

SEQ ID NO: 3189 - DNA, 3045 bp, Drosophila virilis
  CDS (1)..(3045)
atgttcacacgagtcatacgtgttcgctcaatgctgcgcggcttatccacggcagttgcctgcacacgcaatcgtcatacccaaaattgcatggtggaatactttaacgaggtgcgattgctgcgatacaagggagctgtgtctgtgatgcagccacatcgcttctttagccgaaaacggggcgataacgaagatgacctaatgggcgagcccgaacttttggctgatcaccgtgactcgcaacagctgccggcgaccgttgccgttccggatgtgtggccgcacgtgccaatgttggcgatgcgacgaaatcctctatttccgcgtttcatgaagatcgtcgagatctcgaatccgattataatggatctgttgcgtcgcaaggtgaagctaaatcagccgtatgtaggcgttttccttaagaaatccgacggagaagaggagatcatacacaagctggacgatgtctattctgtgggcacatttgctcaaatccaggagctacaagatttgggcgataagctgcgcatggtggttgtcgctcatcgacgtattaaaataaccggccaagttgtggatgaagtgcagccacccactaaaccagctgaagatcaatcgactggtgcggctgatgcaacagcaaaatcagccagtcgaagtgcgcgcaagacccgcggacgcaccccacggcgacaagcacacaaaataaacgatgcagccagtgctggggagcttgcgcagcgccaaacgctggagccaccgctgcccagtggacgtgtggaatcaacggaaccacctaaaccgaccaagccactggaagatcttacaaaaccaccaccaacagctgataatgctggtaagagcacggaaacgtctacagccgctccgcctactgcgccgcccgttctcattgtggaagtggagaatgttaagcagccggcgtataagcaaaccgaagaggtcaaggctctgacacaggagattatcaagactttgcgcgatattatcaccatgaatcctttgtacagagaaagcttacagcaaatgctgcatcagaatcagcgagtggttgataatcctatatacctttgtgatttgggcgcctcattgtccgctggcgaaccagccgaactgcagaaaattctggaagaaacagatataccacaacgtcttctgctcgcactggcgctgctcaaaaaagaattggagctgtcgcggctgcagcaaaagattggacgcgaagtggaagagaaggttaagcagcagcaccgaaaatacatactccaggagcagctgaaggtcattaaaaaggagttgggtattgagaaagacgataaggatgccattggcgaaaaatatcgcgaaaaactcaaagacaaaactgtgccggaaagcatcaaaactgttattgacgaagagctgaccaagttaaatttcttggaaagtcacagctcggaatttaatgttacacgaaactatttagactggctcacctcattgccttggggcgtcataagtcccgagaatttatgccttgaaaaggccaccgaaattttaaacaacgatcactatggcatggaagacattaagaaacgtatcttggagttcattgctgttagctctctcaagggtactacgcaaggcaaaattttatgcttccatgggccgccaggcgttggcaaaacgagcatagcaaagtctatagcacgcgccttaaatcgcgagtacttccgcttcagcgtcggtggcatgacggatgtggcagagattaagggtcatcgtcgcacctatgtgggcgccatgcctggtaaacttatacagtgcctgaaaaagaccaaaacggaaaatccgttggtgcttatcgatgaggttgacaagattggaaaaggttatcagggagatcctagctctgcactgttggagctgttagatcccgaacaaaactccaattttctcgaccattatttggatgtgcccgtggatctgtcgcgtgtgttatttatttgcacagcgaatgtgatagataccatacccgaacctctacgcgatcgcatggaactcatcgaaatgtccggatacgttgctgaagagaaggtggcaattgcgcgacaatacctgataccacaggctatgaatgactgtggtctaaccgaaaagcagatcaacattacagaagatgcgcttaacatgctgatacgcagctattgccgtgaatctggtgtgcgtaatttgcagaagcagatcgagaaagtcatacgcaaggtggcgttccgcctggtcaagaaggagggcgaagagtttcccgtaaatgccgataatttaacaacgtttttgggcaagcaagtcttcagttccgatcgcatgtacaacgtaaccccagctggtgttgtaatgggcttggcctggacagcaatgggcggttcgtccttatacattgaaacctccaggcgtcatatacgagctgagaagcctgaaaccaacgccggagtgttacatttgactggtaacttgggcgatgtgatgaaggaatctgcacaaattgctttgaccgtggcacgaaactttttgtatacgcatgactcaaagaacaagttcctggagcaggaacacattcacctgcacgtgcctgaaggatctacgccaaaagatggacccagcgctggtgttaccataatcacggccctaatttcactggccaccgggaagccagtgcgtccggatgtggcaatgacgggtgaggtctccttgaagggcaaggtcttaacagtgggcggaattaaggagaagaccattgcggctcgtcgtagcggcgtcacttgccttattttgccagctgacaataagaaggactttgaggagctgcccagcttcataaccgatggcttggaagtgcactttgccagcgaatacgaggatgtctataagattgcctttggagacgcaaagttaacggcattgcaaagcgaacctgacagtacatctgagacggcgcgtattaagataccaagcgcagccacagcgactgcaaaacctcacagcacatag

SEQ ID NO: 3190 - protein, 1014 aa, Drosophila virilis
MFTRVIRVRSMLRGLSTAVACTRNRHTQNCMVEYFNEVRLLRYKGAVSVMQPHRFFSRKRGDNEDDLMGEPELLADHRDSQQLPATVAVPDVWPHVPMLAMRRNPLFPRFMKIVEISNPIIMDLLRRKVKLNQPYVGVFLKKSDGEEEIIHKLDDVYSVGTFAQIQELQDLGDKLRMVVVAHRRIKITGQVVDEVQPPTKPAEDQSTGAADATAKSASRSARKTRGRTPRRQAHKINDAASAGELAQRQTLEPPLPSGRVESTEPPKPTKPLEDLTKPPPTADNAGKSTETSTAAPPTAPPVLIVEVENVKQPAYKQTEEVKALTQEIIKTLRDIITMNPLYRESLQQMLHQNQRVVDNPIYLCDLGASLSAGEPAELQKILEETDIPQRLLLALALLKKELELSRLQQKIGREVEEKVKQQHRKYILQEQLKVIKKELGIEKDDKDAIGEKYREKLKDKTVPESIKTVIDEELTKLNFLESHSSEFNVTRNYLDWLTSLPWGVISPENLCLEKATEILNNDHYGMEDIKKRILEFIAVSSLKGTTQGKILCFHGPPGVGKTSIAKSIARALNREYFRFSVGGMTDVAEIKGHRRTYVGAMPGKLIQCLKKTKTENPLVLIDEVDKIGKGYQGDPSSALLELLDPEQNSNFLDHYLDVPVDLSRVLFICTANVIDTIPEPLRDRMELIEMSGYVAEEKVAIARQYLIPQAMNDCGLTEKQINITEDALNMLIRSYCRESGVRNLQKQIEKVIRKVAFRLVKKEGEEFPVNADNLTTFLGKQVFSSDRMYNVTPAGVVMGLAWTAMGGSSLYIETSRRHIRAEKPETNAGVLHLTGNLGDVMKESAQIALTVARNFLYTHDSKNKFLEQEHIHLHVPEGSTPKDGPSAGVTIITALISLATGKPVRPDVAMTGEVSLKGKVLTVGGIKEKTIAARRSGVTCLILPADNKKDFEELPSFITDGLEVHFASEYEDVYKIAFGDAKLTALQSEPDSTSETARIKIPSAATATAKPHST

SEQ ID NO: 3191 - DNA, 3012 bp, Drosophila willistoni
  CDS (1)..(3012)
atgttggcacgcgtcttacgagtgggtccactgatgcgaactcggatcggactggcctcctccaccttatatacacgtaacactcactgccatacacagatgaggcagttgatcaaaaatgtccccgagttaagattaacgaagccctgggaacgtctaaatgggagagcatcacttgtgatggcctcccgtttttatagccgtaggcgtgatgactctgatgaagatatcatggctgatcaaccgacggaattattgtccgatcgggatgcacaattgccggcaacagtggctgtgccggatgtttggcctcatgttcctctactcgcaatgcgtcgaaaccctttatttccacgattcatgaagattgttgaggtttcaaatcctgtcatcatggatttactgcgacgtaaggtcaagctgaatcaaccgtacttgggcgtgtttcttaaaaagaatgacggcgaagatgagcttgtctataatctcgatgaggtctatagccttggcagttttgctcaaattcaggaactgcaagacttgggcgacaaactgcgtatggttgtagtagcccatcgtcgaatccgtatcaccggccaagtggtggaagatgtacccgcgccaaaaccagctgaagatcagtcgtcgacgtcagaggataaaccgactactggacgttcatctaaatcccggaaatcacgtggacgtttaccccatcatcatcgaaaaagacaccaggaaaaaaccaatgaactcctggaagccgaggaacttgtgcagcaacaaactttagaagaacccctaaaatctggaaagttagacaccaagaatgttgagtctccaagttatgcagaagccgaagagagcgattctgttaaggataagcctacacctgtgctcattgttgaagtggagaatgtgaagcagccaacgtacaaacagaccgaggaggtcaaggccctcactcaagagattattaagactttgcgggacatcatcacaatgaatcctctttatagagagagtctccagcagatgctacaccaaaatcaacgcgttgttgacaatcctatttatctttgtgatctgggcgcttcactatccgccgccgaaccaggagaactccagaaaattcttgaagaagttgatataccacaacgcctgcagctatcattgacgcttcttaagaaagaactagagctatcacggcttcagcaaaaaattggacgtgaggtggaggagaaagtaaaacagcagcatcgcaaatacatactgcaggagcagttgaaagtgatcaaaaaagaattgggcattgagaaggacgataaggatgccattggcgagaaatatagagaaaagctgaaagataaaaccgtgcctgaagccattaagaatgttatcgacgaagagctgaccaaactcaatttccttgagagccacagctcagagtttaatgtcacacgcaactacctcgactggctgacctctttgccatggggcgtaatcagcacagagaatctttgccttgataaggccacagatattctaaacaacgatcactatggcatggaggatattaaaaagcgcatactcgagttcattgcggttagctcactgaagggcacaacgcaaggaaaaattctatgcttccatggtcctcctggtgtggggaaaacaagcatagcccgatccattgcacgtgccctgaatcgtgaatatttccgattcagtgtcggtggtatgacagatgtcgctgaaatcaagggacatcgccgcacctatgttggtgccatgccaggaaagttaattcaatgcttgaagaaaacgaaaacggagaatccattggttcttatcgacgaagttgataaaattggcaaaggctaccaaggcgatccaagctctgctctgctggaattgcttgatcccgagcaaaatgccaacttcctagatcattatttagatgtgccagtagatctatcgcgtgtactttttatttgcacggccaatgtgatcgacacgattcccgaaccattgcgagatcgcatggaactcatcgaaatgtccggctatgtggcagaagaaaaagttgccatcgcccgccagtatttaatcccgcaagccatgagcgattgcggcttgactgatgagcaactaaatataaccgaagattctttaaacatgctcatccgcagctattgtcgcgaatcgggtgtgcgcaatctgcagaagcacatcgaaaaggtcattcgtaaagtggctttccgcctggttaaaaaggagggagatcatttccacattagtgctgataatctgaccaaattcttgggcaaacagattttcagtactgatcgtatgtatgccactacaccccctggtgtggtaatgggcctagcctggacagccatgggtgggtcatcgctatacattgagacttcgaagcggcttgtacgacgaaacaataaacctgatgctgcacctggtgcactcaatattaccggaaatctgggcgatgtcatgaaggagtcggcacaaattgctctcacagtggcgcgaaactttatagccaccattgaccccagcaataatttcctagagcaagaacacattcatttgcatgtgccagaaggcgcaacccctaaagatggacccagtgctggcgttacaataatcacagccttagtttccttggccctaaacaagccggtgcgtcaagatatagccatgactggcgagatttcccttaagggcaaagtcttgactgtcggcggtattaaggagaaggccattgcagcacgacgcagcggagtaacctgtctaattcttcctaatgacaataaaaaagattttgatgagctaccagactttataaccgaaggcctagaggttcattttgcaaccaattatgaggatgtctaccaaatagcttttgaagacgatacaaatgaggagacatcagaggacgcggcaccgattccgcgacgtgagaaaatttccgctgcagccgcgccttag

SEQ ID NO: 3192 - protein, 1003 aa, Drosophila willistoni
MLARVLRVGPLMRTRIGLASSTLYTRNTHCHTQMRQLIKNVPELRLTKPWERLNGRASLVMASRFYSRRRDDSDEDIMADQPTELLSDRDAQLPATVAVPDVWPHVPLLAMRRNPLFPRFMKIVEVSNPVIMDLLRRKVKLNQPYLGVFLKKNDGEDELVYNLDEVYSLGSFAQIQELQDLGDKLRMVVVAHRRIRITGQVVEDVPAPKPAEDQSSTSEDKPTTGRSSKSRKSRGRLPHHHRKRHQEKTNELLEAEELVQQQTLEEPLKSGKLDTKNVESPSYAEAEESDSVKDKPTPVLIVEVENVKQPTYKQTEEVKALTQEIIKTLRDIITMNPLYRESLQQMLHQNQRVVDNPIYLCDLGASLSAAEPGELQKILEEVDIPQRLQLSLTLLKKELELSRLQQKIGREVEEKVKQQHRKYILQEQLKVIKKELGIEKDDKDAIGEKYREKLKDKTVPEAIKNVIDEELTKLNFLESHSSEFNVTRNYLDWLTSLPWGVISTENLCLDKATDILNNDHYGMEDIKKRILEFIAVSSLKGTTQGKILCFHGPPGVGKTSIARSIARALNREYFRFSVGGMTDVAEIKGHRRTYVGAMPGKLIQCLKKTKTENPLVLIDEVDKIGKGYQGDPSSALLELLDPEQNANFLDHYLDVPVDLSRVLFICTANVIDTIPEPLRDRMELIEMSGYVAEEKVAIARQYLIPQAMSDCGLTDEQLNITEDSLNMLIRSYCRESGVRNLQKHIEKVIRKVAFRLVKKEGDHFHISADNLTKFLGKQIFSTDRMYATTPPGVVMGLAWTAMGGSSLYIETSKRLVRRNNKPDAAPGALNITGNLGDVMKESAQIALTVARNFIATIDPSNNFLEQEHIHLHVPEGATPKDGPSAGVTIITALVSLALNKPVRQDIAMTGEISLKGKVLTVGGIKEKAIAARRSGVTCLILPNDNKKDFDELPDFITEGLEVHFATNYEDVYQIAFEDDTNEETSEDAAPIPRREKISAAAAP

SEQ ID NO: 3193 - DNA, 3015 bp, Drosophila simulans
  CDS (1)..(3015)
atgttagcccgcgctatccgagtgcgccccatggtgcggggcatcgcctcggcgtcagtgtggacccggaatcgtcccatccagagttccctgatgcaatactgccgggatcggtcgttgcgtctccagcggttcaacggagccaatttgatagtgcagcgcttctacagccgcaaacgggatgattccaacggagatattattatgggacccgatcttatgtccgagcaagatccccatcttccggcaactgtggcggtgccggacgtgtggccacatgtcccgctgttggccatgcgcaagaatcctctctttccccgcttcatgaagatagtggaggtatccaatcccatcatcatggatctgctgcgtcgcaaagtcaagctgaatcaaccttacgtgggtgtcttccttaaaaaaactgatggcgaagaggagcttatcaccaatttgaatgatgtttacaatctcggaacatttgcccaaatccaagagctgcaggatctcggtgataagctgcgcatggttgtggtggcccaccgtcgtattcggataacaggtcaggtggtagaggacgtgccaactcctaagcccgctgaagatcaaagcactgatcaagcggatgcggcacctataaaatcaaggtccgacccagcccgaaagccccgtggccgaattcccaggagtcggaccggaaaatcacgtgaatcggcggctgctgaagaacttgtacaaaaccagactctggagccgccactgaaatcaggcaaagtcgagtcatcgagtttgccaaagcctccaacagaagaaaagatagtggaacctgagactggagcggaagaaaatgttaatcaatctgcgtccagcgcccaacctgttcttattgtagaagtggagaacgttaagcaaccgatttataaacaaacggaagaggtgaaggcattaactcaggagataatcaaaactcttcgggacataatcacaatgaatcccttgtatagggagagtctacagcaaatgctgcatcaaaatcaacgagttgtcgacaaccccatatatctgtgtgatttgggagcatccctttccgctggagaaccagctgagctgcaaaaaatccttgaggaaaccgatatcccagaacgtctgcagttggccttaactttactgaaaaaggagttggaactctcaagactgcaacaaaaaattggacgcgaagtagaggaaaaagtcaagcagcaacatcgcaaatatatacttcaggagcagttgaaagtcatcaaaaaagaactgggcattgaaaaagacgacaaggatgccattggtgaaaagtaccgcgaaaagctgaaggataaggtggttcccgaagctattatgacggttattgatgaagagctcaccaagctgaacttcttggagagtcacagttccgagtttaatgtaactcgcaattacctcgactggcttacttccctaccttggggcgtcatcagcaccgaaaatctctgcctggagaaggccactgaaacactaaacgacgatcactacggaatggaggatatcaagaagcgtattttagaatttattgccgtcagttccctcaagggctctacacagggcaaaatcttgtgcttccatggaccacctggtgtgggcaagacaagcatagcaaagtccattgcgcgcgctttgaaccgcgagtacttccgatttagtgtgggcggcatgacagacgtggccgagatcaagggacatcgccgcacatacgtgggcgccatgccgggtaaactgattcagtgcctgaagaagaccaagattgaaaatcctctggtactcatcgacgaggtggacaagatcggcaagggctatcagggagatcctagctcagcattgttggagctactagatcccgagcagaatgcgaatttcctggaccactacctcgatgtgccggtggatctctcgcgagtgctctttatctgcactgctaatgtgatcgatactattcccgagccgttaagagatcgcatggaattgattgagatgtctgggtatgttgccgaagaaaagatcgccatcgctcgtcagtatctgatgccacaagcaatgaaggactgtggattgacggacaagcatatcaacatttccgaggatgccctgaacatgctgattcgcagttattgccgggaatccggggtgcgaaacctgcaaaagcatatcgagaaagttattcgcaaggtggccttcaaagtggtcaaaaaagaaggcgagcactttccggttaacgctgataacctgaccacattcctgggcaagcaaatcttcagctcagatcgcatgtacgcaacaacaccggtgggtgtagtcatgggtctggcctggacggccatgggcggttcatcgctttacatcgaaacgtcaaggcgtcacattcgccagggtgcaaaaacagatccgaatactgtcgccggatcgctgcacatcaccggaaatttgggagatgtcatgaaggagtcggcccaaatagccttaacggtggcgcgcaactttttgtattcgctggaacccaataatctgttcttagagcaagaacacattcacctccatgttcctgaaggtgccacaccgaaagacggtcccagtgctggcatcaccattattacagcgctcgtttcgttggccactggaaagccggtgcgccaagacatcgctatgacgggcgaagtatccctgaagggaaaagtgctacccgtgggtggtattaaggaaaagacgattgcagcacgtcgtagtggggtgaattgtcttattctgcctgtggataacaagaaggacttcgaggagttgcccacgtacattacagatggtctggaggttcactttgccaccacctacgaggatgtctacaaggtagcgtttaccgatgtaaccgaaacgacaaccaacaatgttgaagagcaggagccgctgcagaagctctccagtgcggccgctgctaagtcggacacgtggccttag

SEQ ID NO: 3194 - protein, 1004 aa, Drosophila simulans
MLARAIRVRPMVRGIASASVWTRNRPIQSSLMQYCRDRSLRLQRFNGANLIVQRFYSRKRDDSNGDIIMGPDLMSEQDPHLPATVAVPDVWPHVPLLAMRKNPLFPRFMKIVEVSNPIIMDLLRRKVKLNQPYVGVFLKKTDGEEELITNLNDVYNLGTFAQIQELQDLGDKLRMVVVAHRRIRITGQVVEDVPTPKPAEDQSTDQADAAPIKSRSDPARKPRGRIPRSRTGKSRESAAAEELVQNQTLEPPLKSGKVESSSLPKPPTEEKIVEPETGAEENVNQSASSAQPVLIVEVENVKQPIYKQTEEVKALTQEIIKTLRDIITMNPLYRESLQQMLHQNQRVVDNPIYLCDLGASLSAGEPAELQKILEETDIPERLQLALTLLKKELELSRLQQKIGREVEEKVKQQHRKYILQEQLKVIKKELGIEKDDKDAIGEKYREKLKDKVVPEAIMTVIDEELTKLNFLESHSSEFNVTRNYLDWLTSLPWGVISTENLCLEKATETLNDDHYGMEDIKKRILEFIAVSSLKGSTQGKILCFHGPPGVGKTSIAKSIARALNREYFRFSVGGMTDVAEIKGHRRTYVGAMPGKLIQCLKKTKIENPLVLIDEVDKIGKGYQGDPSSALLELLDPEQNANFLDHYLDVPVDLSRVLFICTANVIDTIPEPLRDRMELIEMSGYVAEEKIAIARQYLMPQAMKDCGLTDKHINISEDALNMLIRSYCRESGVRNLQKHIEKVIRKVAFKVVKKEGEHFPVNADNLTTFLGKQIFSSDRMYATTPVGVVMGLAWTAMGGSSLYIETSRRHIRQGAKTDPNTVAGSLHITGNLGDVMKESAQIALTVARNFLYSLEPNNLFLEQEHIHLHVPEGATPKDGPSAGITIITALVSLATGKPVRQDIAMTGEVSLKGKVLPVGGIKEKTIAARRSGVNCLILPVDNKKDFEELPTYITDGLEVHFATTYEDVYKVAFTDVTETTTNNVEEQEPLQKLSSAAAAKSDTWP

SEQ ID NO: 3195 - DNA, 3006 bp, Drosophila yakuba
  CDS (1)..(3006)
atgttagcccgcgctatccgagtgcgccccatgatgcggggcatcgcctcggcgtcagtgtggacccggaatcgtcccgtccagaatttcttgatgcaatacagccgggatcggtcgttgcgtttccagcgattccacggagccaatttgatggttcagcgcttctacagccgcaagcgggatgattctgacgaagatcttatgtcggagagtcagggacccgaacttatgtccgatcgggatccccagcttccggcaactgtggcggtgccggacgtttggccacatgtcccgctgttggccatgcgcaagaatcctctctttccccgcttcatgaagattgtggaggtatccaatcccataatcatggatctgctgcgtcgcaaagtcaagctgaatcaaccttatgtgggcgtctttcttaaaaaaactgatggcgaagaggagcttataaccaatttggatgatgtctacaatctcggaacatttgcccaaatccaagaactgcaggatctgggtgataagctgcgcatggttgtggtggcccaccgtcgtattcgaatcaccggtcaggtggtagaggacgtgccacctcctaagcccgctgaagatcaaagcactgatcaagcggatgctacgcctataaaatcagcccgaaagcctcgtggccgtatacccaggaatcggaccggaaaatcacgtgaatcgacggccgctgaagaaattgcacaaaaccagactctagagccgccactgaaatcaggcaaagtcgagtcatcgagttcgccaaagccttcaacagaaggaaaaaaagtggaacctgagacggaaggaaatgccagtcaatctgcgcctagcgctcaacctgttctaattgtagaagtggagaacgttaagcaaccgatttataaacaaaccgaagaggtcaaggcattaactcaggagataattaagacccttcgggacataatcacaatgaatcccttgtatagggagagtctacagcagatgctgcatcaaaatcaacgagttgtcgacaaccccatttatctgtgcgatttgggagcttccctttccgctggagaaccagctgagctgcaaaaaatcctggaggaaacagatatcccagaacgtctacagttggcattaactctactcaaaaaggagttggaactgtctagactgcaacaaaaaattggacgtgaagtagaggaaaaagtcaagcagcagcatcgcaaatatatactccaggagcagttgaaagttatcaaaaaagaactgggcatcgaaaaagacgacaaggatgccattggtgaaaagtaccgcgaaaagctgaaggataaagtggttcccgaagccattatgacagtaattgacgaagagctcaccaagctgaacttcctagaaagtcacagctccgagtttaatgtaacaagaaattacctcgactggcttacttccctaccttggggcgttatcagcaccgaaaatctctgcctggagaaggccactgaaatacttaacgacgatcactatggaatggaggatatcaaaaagcgtatattggaattcattgccgtcagttctcttaagggctcgacgcagggcaaaatcttatgcttccatggaccacctggtgtgggaaagacaagcatagcgaagtccattgcgcgcgctttgaaccgcgagtatttccgcttcagtgtaggcggaatgacagacgtggccgagatcaagggtcatcgtcgcacctatgtgggcgccatgccgggtaaactgattcagtgcctgaagaagaccaagattgaaaatcctctggtactcatcgacgaggtggacaagatcggcaagggctaccagggggatcctagctcagcattgttagagctactagaccctgagcagaatgccaatttcctggaccattacctcgatgtgccagtggatctctcgcgagtgctctttatttgcacagctaatgtgatcgacactatacccgagccattaagagatcgcatggaattgattgagatgtctgggtatgttgccgaggaaaagattgccatcgctcgtcagtatctgatgccacaggcaatgaaggactgtggcttaacggataagcaaatcaacatttccgaggatgccttaaacatgctgatccgcagttattgccgggaatccggggtgcgaaacctgcaaaagcatattgagaaagttattcgcaaagttgccttccgactggtcaagaaggaaggcgagcacttcccggttaacgctgataacctgaccacattcctgggcaaacaaatcttcagctcagatcgcatgtacgcgacaacacccgtgggtgtagtcatgggtctggcctggacggccatgggcgggtcatcgctttacatcgaaacctcaagacgtcacatacgccagggggcgaaaacagatccgaatgctgttggtggatcgctgcacatcaccggcaatttgggagatgtcatgaaggagtctgctcaaatagccttaacggtggcgcgcaactttttgtattcgctcgagcccaataatttgttcttagagcaagaacacattcacctccatgttcctgaaggtgccacaccgaaagacggtcccagtgctggcatcaccattattactgctctcgtttccttggccactgggaagccggtgcgccaagacgtcgctatgacgggcgaagtatccctgaagggaaaagtgctacccgttggtggtattaaggaaaagacgattgcagcccgtcgtagtggagtgaattgtcttatcctgcctgtggataacaagaaggacttcgaggagttgcccacgtacattacagaaggcctagaggttcactttgctactacctacgaggacgtatacaagatagcgtttactgatgtaactgaaacgacaaccaacaatgttgtggagcaggagccgctgcagaaggtttccagtgcggccgctgccaagtcgggaacatggccttag

SEQ ID NO: 3196 - protein, 1001 aa, Drosophila yakuba
MLARAIRVRPMMRGIASASVWTRNRPVQNFLMQYSRDRSLRFQRFHGANLMVQRFYSRKRDDSDEDLMSESQGPELMSDRDPQLPATVAVPDVWPHVPLLAMRKNPLFPRFMKIVEVSNPIIMDLLRRKVKLNQPYVGVFLKKTDGEEELITNLDDVYNLGTFAQIQELQDLGDKLRMVVVAHRRIRITGQVVEDVPPPKPAEDQSTDQADATPIKSARKPRGRIPRNRTGKSRESTAAEEIAQNQTLEPPLKSGKVESSSSPKPSTEGKKVEPETEGNASQSAPSAQPVLIVEVENVKQPIYKQTEEVKALTQEIIKTLRDIITMNPLYRESLQQMLHQNQRVVDNPIYLCDLGASLSAGEPAELQKILEETDIPERLQLALTLLKKELELSRLQQKIGREVEEKVKQQHRKYILQEQLKVIKKELGIEKDDKDAIGEKYREKLKDKVVPEAIMTVIDEELTKLNFLESHSSEFNVTRNYLDWLTSLPWGVISTENLCLEKATEILNDDHYGMEDIKKRILEFIAVSSLKGSTQGKILCFHGPPGVGKTSIAKSIARALNREYFRFSVGGMTDVAEIKGHRRTYVGAMPGKLIQCLKKTKIENPLVLIDEVDKIGKGYQGDPSSALLELLDPEQNANFLDHYLDVPVDLSRVLFICTANVIDTIPEPLRDRMELIEMSGYVAEEKIAIARQYLMPQAMKDCGLTDKQINISEDALNMLIRSYCRESGVRNLQKHIEKVIRKVAFRLVKKEGEHFPVNADNLTTFLGKQIFSSDRMYATTPVGVVMGLAWTAMGGSSLYIETSRRHIRQGAKTDPNAVGGSLHITGNLGDVMKESAQIALTVARNFLYSLEPNNLFLEQEHIHLHVPEGATPKDGPSAGITIITALVSLATGKPVRQDVAMTGEVSLKGKVLPVGGIKEKTIAARRSGVNCLILPVDNKKDFEELPTYITEGLEVHFATTYEDVYKIAFTDVTETTTNNVVEQEPLQKVSSAAAAKSGTWP

SEQ ID NO: 3197 - DNA, 2973 bp, Ciona intestinalis
  CDS (1)..(2973)
atgagaactatggctctccgttgtcacttaggttcaaataaacaattccaaatactgcgaagtaatatgaattttgcaagaactgtcacgcacagtaaacaatgtcttaatggcttgttacagaaccatacaaggacacttcatatttattccaacttgcaacaatcaactataaatggaaaacatgatattggccacttacacaaaacgcatttatcacaaactagactcaaacataaagtgcttggtaattcatttaccaattccttgctttttaatccttcaaagtcaaattggaattttaatctgacaagaagttttgcgaatttttcctcctcttcaagtgggaataatgaagatgatggcaaagaagacgatgatgataagcctgttaccaatgagaataatgaacaagaagttgagcaagaggaaaataaacgtccagaagtaatttactcagggttggggaactctaactcagtagctttgagtgcgttaaccgttcctgacaattttccaaatgttccaattattgctgtgaacaggaaccctgtgtttccgaagtttattaaaatgattgagataaaagatccgaaattaatggaagttctaagaagaaagatttctctctctcttccatatgctggtgtctttgtgaaaaaagatgacaataatgaagtggatgttgtggatgatctggagcgtgatctttactccgtgggaaccttcgtgcagatccatgagatgcacgatatgggcgacaaagttagaatgatagtaatgggacataggaggatcaagttatgtgaggccatgagcatagaagaagacatccttattgatcagaagccggaggatgaaggatcaaagaaagaagacaaaaatgaagtgaagccaaatgaggagaatcaagtcacgaagggaatattgatgggaaaagtggaaaatattccaaaccccgagattcccacttcagaggatatcaaggcactaactgctgaagttgtgaagacaatccgggacattatttctctcaatcctttatacagagaatcagtggctcaaataatacaggctggacagcgagtaatggacaaccccgtgtacttaagtgacatgggagcagcactgagcagcggcacaacagatgaactacaagatgtattagaggaaatgaatgtaagagagaggttatacaaatcgctttcgttgcttaagaaggaactcgaactaagtaagttgcagcaaagacttggccgagaggttgaggataaagtgaaagccacacacaggaaatatatgttgcaggaacaactaaaaatcatcaagaaagaactcggtttggaaaaagatgacaaagacgcgatcgaagagaaatttcgatctcgattaaaagaactgactgtaccacaacatatacaagaagtcattgatgaagaattgaataaacttggtttccttgacaaccattcatctgagtttaatgtaacacgaaactacttggattggttaacttccataccatggggaaaatcaagtgaggataacgtggatataaagaaagcaaaagagatcctcgaaaacgatcactttggaatggatgacgttaagaaccgtatccttgagttcatagctgtcagcatcctccgatcccatactcatgggaagatcctttgcttccatggtcctccaggtgttgggaagacaagcatagcgagatcaatcgctcgtgctcttaatcgagagtacttcaggtttagtgttggaggaatgcatgatgttgcggagattaagggacataggaggacatatgtgggtgcaatgcctggaaagatgatacagtgtttaaagaagacaaagacggagaatccacttgtgttaatagatgaggtagacaagataggcagaggataccaaggtgatccttcatctgctttgttggaacttctcgaccccgaacaaaatcataactttctggatcattacctggatgttactgtggacttatcaaaggttctcttcatatgcacagccaacgtactagatacaataccagatccacttaaagatagaatggaaatgattcaagtgtcaggttacgtcgccgaggaaaaaacggcgattgcccggaaatacctgatcccacaaacccatgagcaatgcggtctcaacgaggacaaagcgtttgtagaggacgaagcgttggaccttcttattaagaattattgtcgtgaaagtggagtacgtggcttgctacaacaaatagaaaagatccaccgtaaagctgcattcaaacttgtaaacgaacaatccgaagatcgtgttgttgttaaccaatcaaatctagaggatttcgtggggaaacccccgtttacgtcaaaccgcatgtatgacgtcacgccaccaggtgtcgtcatggggttggcttggacggctatgggcggctcgactctttacatcgagtgttgtgaacgtagcaggcgtgacgtcaaagaaggtggtgacgttactgtggaacttactggaagacttggtgacgtcatgaaagaatctgcgaggatcgcgtcaacttttgcgcgaagttttcttgcaagaaagaagccggaaaaccattttttcgatggagctaacctgcatttgcatgtgccagagggcgccactcccaaggacggcccaagtgctggttgtacaatggtcacgtccctactttccttagcccttaatcaacccataagacaagatattgcgatgactggcgaactgtcgctcacaggcaaggtacttcctgttggtggaattaaggagaaaacgctggcggcgaagcgggcgggggttagctgtctcatattcccgcgggagaacgcaaaggacttcaacgacctcgctgagtacatcaaagctggcgttgaaacccacttcgtggagcattactctgaggtttttgagattgctttcggacaacccatcagctaa

SEQ ID NO: 3198 - protein, 990 aa, Ciona intestinalis
MRTMALRCHLGSNKQFQILRSNMNFARTVTHSKQCLNGLLQNHTRTLHIYSNLQQSTINGKHDIGHLHKTHLSQTRLKHKVLGNSFTNSLLFNPSKSNWNFNLTRSFANFSSSSSGNNEDDGKEDDDDKPVTNENNEQEVEQEENKRPEVIYSGLGNSNSVALSALTVPDNFPNVPIIAVNRNPVFPKFIKMIEIKDPKLMEVLRRKISLSLPYAGVFVKKDDNNEVDVVDDLERDLYSVGTFVQIHEMHDMGDKVRMIVMGHRRIKLCEAMSIEEDILIDQKPEDEGSKKEDKNEVKPNEENQVTKGILMGKVENIPNPEIPTSEDIKALTAEVVKTIRDIISLNPLYRESVAQIIQAGQRVMDNPVYLSDMGAALSSGTTDELQDVLEEMNVRERLYKSLSLLKKELELSKLQQRLGREVEDKVKATHRKYMLQEQLKIIKKELGLEKDDKDAIEEKFRSRLKELTVPQHIQEVIDEELNKLGFLDNHSSEFNVTRNYLDWLTSIPWGKSSEDNVDIKKAKEILENDHFGMDDVKNRILEFIAVSILRSHTHGKILCFHGPPGVGKTSIARSIARALNREYFRFSVGGMHDVAEIKGHRRTYVGAMPGKMIQCLKKTKTENPLVLIDEVDKIGRGYQGDPSSALLELLDPEQNHNFLDHYLDVTVDLSKVLFICTANVLDTIPDPLKDRMEMIQVSGYVAEEKTAIARKYLIPQTHEQCGLNEDKAFVEDEALDLLIKNYCRESGVRGLLQQIEKIHRKAAFKLVNEQSEDRVVVNQSNLEDFVGKPPFTSNRMYDVTPPGVVMGLAWTAMGGSTLYIECCERSRRDVKEGGDVTVELTGRLGDVMKESARIASTFARSFLARKKPENHFFDGANLHLHVPEGATPKDGPSAGCTMVTSLLSLALNQPIRQDIAMTGELSLTGKVLPVGGIKEKTLAAKRAGVSCLIFPRENAKDFNDLAEYIKAGVETHFVEHYSEVFEIAFGQPIS

SEQ ID NO: 3199 - DNA, 3024 bp, Drosophila pseudoobscura pseudoobscura
  CDS (1)..(3024)
atgatagctcacgctgtacgagggcggcacctaatgcgggccctgtccacgacaattgcatggacccgcccgggacaaagtgccttgactaggcactttagcgagaaggtttcgcgcctgcagagattcaatggcgcgacaatggttatggctcagcgcttctacagtcgcaaacgcgattatcccgattacaagaaagctcaagcggtaacagaattgctgtccgaccaaaattctaacttgcctgccacagtggccgtgcccgacgtatggccacatgttccgctgcttgccatgcgtaagaatcccttgtttccgcgattcatgaagatggtggaggtgtccaacccaattgttataaatctgctgcgtcgcaaagttagccttcatcagccctacgttggggttttcctcaagaaagtcgacggggaagaggaggtcgtccagagtctggatgaagtctatcacctgggcacttttgcacagatccaagaggttcaggatttgggcgacaagatgcgcatggtggtggtggcccatcgtcgcatacgcatcacaggacaggtgatcgaggatctaccacctccaaaaaagccagtgaaaacgacaaccatcgacgaatcatcgacatcgacaaggccactgtcgtcaagagaacgccgcaaagcacgacgcgcgatttggcagaaattacaagagtctgcagcttccgctgacgctgacagtgaatttgatttggaagagcattcgcatatttcagaaaaatttaaagctgcatccaaagccgcaatcgaagcggaagagagtacatcagctatccccgttgcagagtctgctgcaccagctgcatcaccgcccgtgctcattgtagaggttgagaatgtgaagctaccagtttacaaacaaaccccagtggtcaaggcgctaacacaagagattatcaagactctacgcgacattatcaccatgagtcccctgtatagggagagtctccatcaaatgctgcatcagaatcaacgagttgtggacaaccccatctacctatgcgacttgggtgcctccctgtcgaccggagacccagaggagctgcaaaatatcctggaggaagaagatatcccaaaacgtctgcagctgtccctcacattactcaaaaaagaacaggagctatcgagactgcaggcgaaaataggacgcgaggtagaggaaaaagtcaagcagcagcaccgaaaatacatactgcacgaacagttgaaggttatcaaaaaggagctgggcattgaaaaagacgacaaggatgccatcggtgataattatatggaaaagctccaggacaaaatcgttccagaaaatattaagcaggtcatcgccgaggaactgaccaaactgaacttcctggagagtcatagcgctgaatttaatgtaacccgcaactacctcgactggctcacctcgctaccctggggcgtcatgagcactgagaatctctgcttggacaaagccaacgagatcctaaaccatgatcactacggcatggaggatatcaagaagcgcatactagagtttatcgccgtcagtgctctgaatggcaccacgcagggcaagatcttgtgcttccatggaccgcctggtgtaggcaagacgagcatagccaagtccattgctcgggccctgaatcgcgagtacttccgctttagtgtgggcggcatgacggatgtggctgagatcaagggacatcgtcgcacctacgtgggcgcaatgcccggcaagctgatacagtgcttgaaaaaaaccaagactgagaatcctctagtgctcattgatgaggtggacaagattggcaagggctatcagggagatcccagctcggcgctgttagagctactcgatcccgagcagaatgccaatttcctggaccactatctggacgtaccaatcgatctgtctcgtgtgctattcatttgcacggccaacgtgattgataccataccagagccgctgagagatcgcatggagctgattcagatgtccggctatgtggccgaggagaaggtggccattgcccgccagtatctaataccgaagtcgatgaacgactgtggcctgaccgacgagcatatcagcataaccgagaaagccctgaatatgctgatacgcaactattgccgcgagtccggagtgcgcaacttgcagaaacagatcgagaaggttatgcgcaaggtggccttccttttggtcaagaaagagggcaccagcttcccagtggatgccgaaaatctgaccacattcctgggcaagcagatctttacctcggatcgcatgtacgagacgacgccgccgggcgtggtcatgggcctggcctggacggccatgggtggctcatcgctgtacattgagacatcgcaacggaacagatataaaagcctgggccccaaatcagaagacagtggtgtaagtggagatggcactttgtatatcaccggaaaccttggagatgtgatgaaggaatcggcccaaatagccctgagcgtggcgcgaaactttattcacattcgagatcctggcaatcagtacctagaacttgcaaacatccaccttcatgttcctgagggggccgtaccaaaggatggacccagtgctggcgtcaccataatcaccgccctaatttcgttggccaccaaaaagcctgtgcgtaatgatatggctatgacaggcgagatatcgctcaagggcaaagttctgcccgtaggaggcatcaaggagaaggccatagccgcacgtcgcagtggcgtccactgtctcatcctgcccgcggacaacaagaaggacttcgaggaattgcccaagttcataaccgaaggcctggatgttcactttgcagccaactacgaggatgtctacaaaattgcattttccgaacccaccaaaaacgaggccgaggcccaagtattgccagcgtcggatcaggagcccctcgaggtgtccagcgtagactgcgcggccggcgcaatgccattcaggccttaa

SEQ ID NO: 3200 - protein, 1007 aa, Drosophila pseudoobscura pseudoobscura
MIAHAVRGRHLMRALSTTIAWTRPGQSALTRHFSEKVSRLQRFNGATMVMAQRFYSRKRDYPDYKKAQAVTELLSDQNSNLPATVAVPDVWPHVPLLAMRKNPLFPRFMKMVEVSNPIVINLLRRKVSLHQPYVGVFLKKVDGEEEVVQSLDEVYHLGTFAQIQEVQDLGDKMRMVVVAHRRIRITGQVIEDLPPPKKPVKTTTIDESSTSTRPLSSRERRKARRAIWQKLQESAASADADSEFDLEEHSHISEKFKAASKAAIEAEESTSAIPVAESAAPAASPPVLIVEVENVKLPVYKQTPVVKALTQEIIKTLRDIITMSPLYRESLHQMLHQNQRVVDNPIYLCDLGASLSTGDPEELQNILEEEDIPKRLQLSLTLLKKEQELSRLQAKIGREVEEKVKQQHRKYILHEQLKVIKKELGIEKDDKDAIGDNYMEKLQDKIVPENIKQVIAEELTKLNFLESHSAEFNVTRNYLDWLTSLPWGVMSTENLCLDKANEILNHDHYGMEDIKKRILEFIAVSALNGTTQGKILCFHGPPGVGKTSIAKSIARALNREYFRFSVGGMTDVAEIKGHRRTYVGAMPGKLIQCLKKTKTENPLVLIDEVDKIGKGYQGDPSSALLELLDPEQNANFLDHYLDVPIDLSRVLFICTANVIDTIPEPLRDRMELIQMSGYVAEEKVAIARQYLIPKSMNDCGLTDEHISITEKALNMLIRNYCRESGVRNLQKQIEKVMRKVAFLLVKKEGTSFPVDAENLTTFLGKQIFTSDRMYETTPPGVVMGLAWTAMGGSSLYIETSQRNRYKSLGPKSEDSGVSGDGTLYITGNLGDVMKESAQIALSVARNFIHIRDPGNQYLELANIHLHVPEGAVPKDGPSAGVTIITALISLATKKPVRNDMAMTGEISLKGKVLPVGGIKEKAIAARRSGVHCLILPADNKKDFEELPKFITEGLDVHFAANYEDVYKIAFSEPTKNEAEAQVLPASDQEPLEVSSVDCAAGAMPFRP

SEQ ID NO: 3201 - DNA, 3261 bp, Gibberella zeae PH-1 (anamorph: Fusarium graminearum)
  CDS (1)..(3261)
atgattcctcgttcacgacactcgggacgcctcattctcgagcgctctctcgtccatgcaacacgagcctcttccgaagtcgccgctgcccgatgggcttcttctcccgcctatcgcaaccatcacatctgcggccgccggctccccgctatccagccgcggttagtcgctgcagctttttcaacatccgcccgagtcgcgaaagaaaaggataacagtgataagggcttcttcgagtctgccattgagcctttgaccgaacccttgtccgaggaggaggccaaggcgaacgtcgagaacaagcgcaaggaagccgatggaacgatattggccgagtcgaagaacccaggccctgactcaccagggtctggcaaaaacgacggcggtagtcaatcgcaggacgggaaggcaggtagcgccgcaggaggtgctggctcaggatcaggtggtgataactctggcggtgatggaagccgccgcggccgtaagccttcttctgagaaagctctccagaaacctgtagtgcctgaggtctatcctcaggttctagcgattcccatcgcccgaaggccgcttttccccggtttctataaggctattaccattaaggatcccgaggtggcaaatgcaatcaccgaatcgatcaagcgtggtcagccatatgttggagctttcttgttcaaggatgagaacgaggatgaggatgtgattcgaaaccctgaagacgtctacgacgttggtgttttcgctcaaatcacaagtgccttccctatccatggccaagaaggtgctttgactgccattctgtacccccaccgccgtatcaagctgtctagtctgctaccacctggtggccaagacactgctaagaagaccgactccaagaccgaaaccaaggccgaacctgtgccggaaccgattccccagaagcctgctgaagaggaagctacacccgagaagaagggggatgttgtcgccagcttcgaggagagtgccgttgagaagaagcctgatcaggttgctgagaagtacgagccaacatcattcctcaagagataccctgttagcttggtcaacgttgagaacctcgtcgatgagccctacgaccccaagagccccgttattcgtgctgtcaccaatgagattgtcaacgttttcaaggaggttgccacaatgaacaatctgttccgagaccaaatttctaccttttctatgagccagtctaccggaaacgttacgtcagaacccgccaagctggccgattttgctgctgctgtgtcttcaggcgagcagaaggagcttcaagaagtccttggatgcttaaatgttgaggagagaatgcaaaaggctctcgtggtactcaagaaagagcttatgaacgcccagctgcagtccaagattagcaaggatgtggagaataagattagcaagagacagcgagagtactggcttatggagcaaatgaagggtatccgccgtgaacttggccttgagtctgacggcaaagataagcttgtcgaaaagttcaaggaaaaggcaaacagccttgccatgcctgaagctgtacgcaaagtctttgatgaggagcttaacaagcttgctcatcttgaaaccgctgcctccgagttcaacgtgacaagaaactatctcgattggctcacccaaatcccctggggcaggaggagtgccgagaactttggcattcctcacgctgtcaagatcctggatgaagatcaccacggtctgaaggatgtcaaggaccgcattttagagttcatcgccgttggcaagcttcgaggcactgttgagggtaagatcctctgctttgtcgggcctcctggtgtgggtaagacaagtattggaaaatctattgctcgtgctctcaaccgagaatactaccgattcagtgtcggtggcctcactgacgtcgctgagatcaagggtcaccgaagaacctacgttggtgccctacctggtcgtatgattcaggctttgaagaagtgccagactgagaaccccctgatcctgatcgatgagatcgacaagattggcagaggttaccagggtgatccctcatctgctctgctcgagttactcgaccctgaacagaacagctccttcttggatcactacatggatgtgcccgtggacctgtccaaggttctgttcgtctgcactgccaacatgacagacactatccctcgccctcttttggatcgaatggagctcatcaccctttcaggctacgtcgccgacgagaagatggccattgctcaacgctatcttgctcctgctgccaaggagactgctggacttcaaaacgccgatgtcactttgagcgaggaggctgttgaagaactcatcaagtcatactgccgtgagtccggtgtccgaaacctcaagaagcagattgagaaggtataccgaaagtctgccctcaagatcgtccaagagcttggcgaggaggttctacctgaagaggaggctctcaccgaggaaggcaaatctgctcttgaggaggccgagaagaagagcaaggtggaggctaccgcagaaggcaaggaggctaaggggtccagctcgaacgagactggcgccgctacggagaagcctcgcaaggctctcaaggttcctgactctgttcacgttgttattggcaaggataacctgactgactacgtcggcccacctgtcttcacctctgaccgtctctacgaggtcagtcctcctggtgtttccatgggtctcgcctggacgcaaatgggtggtgctgccatgtacatcgagtccattcttcaagcccctctccggccctctacacggcctcaccttgagattactggtaaccttaagaacgtcatgaaggaatccactaccatcgcctactcttttgccaagtcctttatggtcaagcaattccctgacaaccatttcttcgacaaggctaagatgcatctccacgtccccgatggagctgtctccaaggatggcccatctgctggtattaccatgaccacttcgctcctttcacttgctcttgatgctcctgtcaaccctacagttgccatgactggtgagatcacactcaccggaaagaacatcaaggagggccttgagggccatgccgtggcttggtaccctgaagtcttcgatcttgttttccccaacattgataaggagcaggccaacaagtgcaagatttgcgagtggaaggctcagcaaaagaagagtgatgccgagcctgctgaagaggaggactaa

SEQ ID NO: 3202 - protein, 1086 aa, Gibberella zeae PH-1 (anamorph: Fusarium graminearum)
MIPRSRHSGRLILERSLVHATRASSEVAAARWASSPAYRNHHICGRRLPAIQPRLVAAAFSTSARVAKEKDNSDKGFFESAIEPLTEPLSEEEAKANVENKRKEADGTILAESKNPGPDSPGSGKNDGGSQSQDGKAGSAAGGAGSGSGGDNSGGDGSRRGRKPSSEKALQKPVVPEVYPQVLAIPIARRPLFPGFYKAITIKDPEVANAITESIKRGQPYVGAFLFKDENEDEDVIRNPEDVYDVGVFAQITSAFPIHGQEGALTAILYPHRRIKLSSLLPPGGQDTAKKTDSKTETKAEPVPEPIPQKPAEEEATPEKKGDVVASFEESAVEKKPDQVAEKYEPTSFLKRYPVSLVNVENLVDEPYDPKSPVIRAVTNEIVNVFKEVATMNNLFRDQISTFSMSQSTGNVTSEPAKLADFAAAVSSGEQKELQEVLGCLNVEERMQKALVVLKKELMNAQLQSKISKDVENKISKRQREYWLMEQMKGIRRELGLESDGKDKLVEKFKEKANSLAMPEAVRKVFDEELNKLAHLETAASEFNVTRNYLDWLTQIPWGRRSAENFGIPHAVKILDEDHHGLKDVKDRILEFIAVGKLRGTVEGKILCFVGPPGVGKTSIGKSIARALNREYYRFSVGGLTDVAEIKGHRRTYVGALPGRMIQALKKCQTENPLILIDEIDKIGRGYQGDPSSALLELLDPEQNSSFLDHYMDVPVDLSKVLFVCTANMTDTIPRPLLDRMELITLSGYVADEKMAIAQRYLAPAAKETAGLQNADVTLSEEAVEELIKSYCRESGVRNLKKQIEKVYRKSALKIVQELGEEVLPEEEALTEEGKSALEEAEKKSKVEATAEGKEAKGSSSNETGAATEKPRKALKVPDSVHVVIGKDNLTDYVGPPVFTSDRLYEVSPPGVSMGLAWTQMGGAAMYIESILQAPLRPSTRPHLEITGNLKNVMKESTTIAYSFAKSFMVKQFPDNHFFDKAKMHLHVPDGAVSKDGPSAGITMTTSLLSLALDAPVNPTVAMTGEITLTGKNIKEGLEGHAVAWYPEVFDLVFPNIDKEQANKCKICEWKAQQKKSDAEPAEEED

SEQ ID NO: 3203 - DNA, 2988 bp, Apis mellifera (honey bee)
  CDS (1)..(2988)
atgcgttttatgacagcggtgaatttcaagattttgtctatttttcggcttcgtatgacgaatgttcgatcattctgcagaaatcatcaatcagattataaagagttgtcggtgcatatacgaccacaatttaaaagaataaaatttaatgatcatggaacgtttaccagaaatatccatagtcgtcgacaaactgcggccattatttcgattagatcatttgctacaaaacgattcaatgataaagattcacctaatggaaataatgaagatgatattggagatccagcttcattaccagccacagttgttgtgcctgaagtatggcctcatgttcctgttatagcaattaatagaaatccagtatttccaagatttataaaactcatagaacttagtaatccaattctcatggatttaattcgcagaaaagtcaaactaaatcaaccatatgttggaatatttttaaaaaaattagaagaaaacgaagcagagattgtacaaaatttagatgatatttactctgttggaacatttgcacagatacatgaagtacaagatttaggaaatcgattaaggttagttgtaatggcacatagaagaattaaaattgttggtcaaatcttagaagaacttccgaaacctactcatgacgattcaatttctggtggcaaaccaagccgtaggtcattaattcgtaaaaaaacagaaaacaaagtgccagaacaagataaactacagaaaattgaggaaattaatatatcagaaaataagatcacagaaggaatacaggaaaaggtggaagaaaaacttaatcctccaaatcctccagattctacagcacaaactaacactcaacctttgttaatggtagaagttgtaaatatcacccatgagaaatttagacaaactgaagaaattaaggctttgacacaagaattaataaaaactattagagatataataagtatgaatccattataccgtgagtctttacaacaaatgttacatcaaggacagagagttgtagataatccagtttatttaagtgatttgggtgcagctttgacaggagcagatgcacaagaattacaacaagtattagaagaaatggatattttgaaaagattaagattatcattggcacttttaaaaaaagaatatgaattaagtaaacttcaacaaaaaattggtagagaagttgaagaaaaagtcaaacagcaacatagaaaatacattcttcatgaacaattaaaagttattaaaaaagaactgggacttgaaaaagatgataaagatgctataggagaaaaatatagagaacgtataagagaaaaaacagttccaaaaacagtaatggatgtgcttgaagaagaattaaacaaattaaatttcttagaaagtcacagtagcgaatttaatgtgacaagaaattacttggattggcttacttctatgccatggggtgtaactagtacagaaaatttaaatcttcagcaagcaattgaaattttggataaagaccattatggaatggaagatataaaaaaacgaattttggaatttattgctgtcagtcaattaaaaggttcgacacaaggaaaaatattatgtttccatggtccaccaggtgttggaaaaacatcaatagctaaatcaatttctcgtgcacttaatagagagtatttcagatttagtgttggtggaatgacagatgtagcagaaatcaaaggtcatagaagaacttatgtgggtgctatgcctggtaaaattattcaatgtttaaaaaaaaccaaaactgaaaatccgcttgttcttatcgatgaagttgataagattggaaaaggacatcaaggtgatccagcatcagctcttttagaaatgttagatccagaacaaaatgcaaactttttagatcattacttagatgttcccgttgatttatcaaaagtgctttttatttgcactgcgaatgtgattgatacaattccagaacctttaagagatcgtatggaaatgatagatatgtcaggttacgtcgcagaagaaaaacttgcaattgctaaacagtatttagtaccgcaagcgatgaatgattcaggtctcaataatggacagatcaatataaatgataatgcacttcatgcattaattaaatcttactgtcgggaatcaggagtaagaagtcttcaaaaacatatagagaaagtgcatcgaaaagttgcattcaaagttgttaagaaagaagcggaaaaggtagatgtaactatggacaatttacatgaatttgttggaaaacctgtatttacacatgacagaatgtatgaaattacacctcctggagtcgttatgggtcttgcatggacagctatgggaggttctactttgtttattgaaacaagaattagaaaaccttctaccggcaaaaaatcggaaggtactttagaattcaccggtcatttaggtgacgtgatgaaagaatctattcatatagcgatgacagttgcaagaaactttttgaatcaagaagatccatctaatagttttctgatcgattctcatttgcatttgcacgtacctgaaggtgctactccaaaagatggtcccagcgcaggtattactatcgcaatagcattcatttcgcttgcaaaaaatcaaccaattagacaaaatgttgcaatgactggtgaacttagtctcatgggtagagttcttcctgttggcggtattaaagaaaaaacgattgctgcaaaacgagttggtgtaaactgtgtaattctacccgaagaaaataaaaaagattataatgatcttcctaaatatattacggatggtttagaagttcattttgcttcgacttttgaagatgtatatcgtatatgctttacaccacagaaaaaaactagtactgttcatcatcaaaaaagcttagatcttgatatttcaccaccgcaaaccgcaccacttttgagtaaaaatattgactga

SEQ ID NO: 3204 - protein, 995 aa, Apis mellifera (honey bee)
MRFMTAVNFKILSIFRLRMTNVRSFCRNHQSDYKELSVHIRPQFKRIKFNDHGTFTRNIHSRRQTAAIISIRSFATKRFNDKDSPNGNNEDDIGDPASLPATVVVPEVWPHVPVIAINRNPVFPRFIKLIELSNPILMDLIRRKVKLNQPYVGIFLKKLEENEAEIVQNLDDIYSVGTFAQIHEVQDLGNRLRLVVMAHRRIKIVGQILEELPKPTHDDSISGGKPSRRSLIRKKTENKVPEQDKLQKIEEINISENKITEGIQEKVEEKLNPPNPPDSTAQTNTQPLLMVEVVNITHEKFRQTEEIKALTQELIKTIRDIISMNPLYRESLQQMLHQGQRVVDNPVYLSDLGAALTGADAQELQQVLEEMDILKRLRLSLALLKKEYELSKLQQKIGREVEEKVKQQHRKYILHEQLKVIKKELGLEKDDKDAIGEKYRERIREKTVPKTVMDVLEEELNKLNFLESHSSEFNVTRNYLDWLTSMPWGVTSTENLNLQQAIEILDKDHYGMEDIKKRILEFIAVSQLKGSTQGKILCFHGPPGVGKTSIAKSISRALNREYFRFSVGGMTDVAEIKGHRRTYVGAMPGKIIQCLKKTKTENPLVLIDEVDKIGKGHQGDPASALLEMLDPEQNANFLDHYLDVPVDLSKVLFICTANVIDTIPEPLRDRMEMIDMSGYVAEEKLAIAKQYLVPQAMNDSGLNNGQININDNALHALIKSYCRESGVRSLQKHIEKVHRKVAFKVVKKEAEKVDVTMDNLHEFVGKPVFTHDRMYEITPPGVVMGLAWTAMGGSTLFIETRIRKPSTGKKSEGTLEFTGHLGDVMKESIHIAMTVARNFLNQEDPSNSFLIDSHLHLHVPEGATPKDGPSAGITIAIAFISLAKNQPIRQNVAMTGELSLMGRVLPVGGIKEKTIAAKRVGVNCVILPEENKKDYNDLPKYITDGLEVHFASTFEDVYRICFTPQKKTSTVHHQKSLDLDISPPQTAPLLSKNID

SEQ ID NO: 3205 - DNA, 3081 bp, Candida glabrata CBS 138
  CDS (1)..(3081)
atgctgggcactcgggttactagagcggtctatacccgtgcgcctctcaaattacaactgagggcgctgggcttacatcgaaggtatgtgcataatggcagcaagaatgatgaggggagctctacaagcacgactacaaataaagaagagaacgataaaaaactgccagatgtctatccacaaatgctagccctacctatatcgagaaggcccttgtttcccggtttttataaagctgtagtgatttcagagccaagagtaatgaaggcaatcactgatatggttgagagacagcaaccatacattggtgcgtttatgcttaaggatagtaataatgacacagacattatacacgatataagtgaggtgcatgaattgggtgtgctagctcaagttacctcagcatttcccagcaaggatgagaaaactggtaaggaaaccatgaccgcattactatatcctcataagcgtataaagattgatcagttaatcccaccaaaagatgtgaaaatagaagatattgtagtcgaaaaagtagtggataatgaagtagcatctgaagagacaaaggacgaagaaacagttgataaaactgaatcagcgactgataaagtaagtgaagaaattactgaagagattgctaaagcaccttctacagaagtaacagaagatccagataattatgagaatccgacggatttcttgaaagattataatgtcactttagtgaatgtttctaatctggaagatgaaccatttgatatcaaatcaccaatcattaatgcattaacatcagaaatccttaaagtattcaaggaaatttcacaactgaactccatgttcagagagcaaattgcgactttctctgcatctattcaatctgcaaccactaatatatttgaggagcctgctaaattggcagattttgcagcggctgtatctgcgggtgaagaagaagaattacaagaggtcctggagtctttgaatatagagcaaagattggaaaaatctttgttggtacttaagaaggaattgatgaatgctgaacttcaaaacaaaatatcgaaagatgtagagacaaaaatacaaaagagacagaaagaatattacttgatggaacagttaaaaggtattaagagagaacttggaattgatgatggccgtgataaacttgttgatacttataaaaaaagagtagaaaagctaaatcttccagaaaatgttcagaaaacttttgatgaggaaataacaaaactagcaaccctagaaacatctatgtccgaatttggtgttatcagaaactatttagattggcttacatcgcttccatggggaattaactccaaagaacaatactctattccaagagctcgtaagatcttagatgaagatcattatggtatgaaagatgttaaggaccgtattctagaatttattgccgtaggaaagcttcttggaaaagttgatggtaaaatcatatgttttgtgggtccaccgggtgtgggtaaaacgtccatcggtaaatcgatctcaagagctttgaaccgtcaattcttcagattttctgtcggtggtatgactgatgttgctgaaatcaaaggtcatagaagaacgtacattggtgctctaccaggtagaattattcaagcactgaagaaatgtcaaactcaaaatcctttgattttaattgatgagatagacaaaattggtcatggtggtattcatggtgatccttctgctgcacttctcgaagttcttgatcctgaacaaaacaacagtttcttggataattacttagacatcccaattgacttatctaaggttttgtttgtttgtaccgctaactctttagatactataccaagaccattacttgatcgtatggaggttattgaacttactggttatgtggccgaagataaaattaaaattgccgagcagtatttagttccaagcgctaaaaaaactgcaggtttgcaaaatgctactgtatccatggatgaagaagcaatcaatgcgctaatgaaatattattgtagagagagtggtgttagaaacttaaaaaagcatattgagaaaatctatcgtaaggcagctttagaagttgttaaaaagatgagcatcgaggatacagaacctctagtctcaacttctgaggaaccacaattatctcaaacaaatcaaaatatatcgtcaagttctgctgaggattctactacggatcttgaagatagtgtcaatccagatactgccaaggaagcatcaaagcccaataattcgcaagaaggtgcatcagtagaagaaaccaagaaggctgtgaaaacagaagaggaagaagacacttctatgattgttccagaagatattaaagttgaaattactccagaagatttgaaaaagtatgttgggccaccaatctacactactgacagattatatgaaactactcctcctggtgtgatcatgggattggcttggactaatatgggaggctgttccctatatgttgaatctgtactggaacagccattacacaactgtaaacatgcgaatttagagagaacaggtcagcttggtgatgtcatgaaagagtcatcgcgtctagcctactctttctcaaagatgtacctgtcaaagaagttccctgaaaatagattctttgaaaaggcagctattcacttgcactgtcctgaaggtgcaacaccaaaggacggtccatctgctggtgtcacaatggcaacttcattcctatcacttgcattaaacaagcctgttgatccaactgtagcaatgactggtgaattaacattaaccggaaaagtattgcgtattggtggtttaagagaaaaggttgtggctgctaagagatctggtgccaagactgtaattttccctaaggataacttaaacgactgggaagagcttccagagaatgtgaaagaaggcatggagccactggctgctgattggtatgatgacatttacaaaagactgttttctggtgtcaagaaatcagaaggtaataacgtctggaaatcagaatttgagctaatcgataagaagaagaaagaaaacgattag

SEQ ID NO: 3206 - protein, 1026 aa, Candida glabrata CBS 138
MLGTRVTRAVYTRAPLKLQLRALGLHRRYVHNGSKNDEGSSTSTTTNKEENDKKLPDVYPQMLALPISRRPLFPGFYKAVVISEPRVMKAITDMVERQQPYIGAFMLKDSNNDTDIIHDISEVHELGVLAQVTSAFPSKDEKTGKETMTALLYPHKRIKIDQLIPPKDVKIEDIVVEKVVDNEVASEETKDEETVDKTESATDKVSEEITEEIAKAPSTEVTEDPDNYENPTDFLKDYNVTLVNVSNLEDEPFDIKSPIINALTSEILKVFKEISQLNSMFREQIATFSASIQSATTNIFEEPAKLADFAAAVSAGEEEELQEVLESLNIEQRLEKSLLVLKKELMNAELQNKISKDVETKIQKRQKEYYLMEQLKGIKRELGIDDGRDKLVDTYKKRVEKLNLPENVQKTFDEEITKLATLETSMSEFGVIRNYLDWLTSLPWGINSKEQYSIPRARKILDEDHYGMKDVKDRILEFIAVGKLLGKVDGKIICFVGPPGVGKTSIGKSISRALNRQFFRFSVGGMTDVAEIKGHRRTYIGALPGRIIQALKKCQTQNPLILIDEIDKIGHGGIHGDPSAALLEVLDPEQNNSFLDNYLDIPIDLSKVLFVCTANSLDTIPRPLLDRMEVIELTGYVAEDKIKIAEQYLVPSAKKTAGLQNATVSMDEEAINALMKYYCRESGVRNLKKHIEKIYRKAALEVVKKMSIEDTEPLVSTSEEPQLSQTNQNISSSSAEDSTTDLEDSVNPDTAKEASKPNNSQEGASVEETKKAVKTEEEEDTSMIVPEDIKVEITPEDLKKYVGPPIYTTDRLYETTPPGVIMGLAWTNMGGCSLYVESVLEQPLHNCKHANLERTGQLGDVMKESSRLAYSFSKMYLSKKFPENRFFEKAAIHLHCPEGATPKDGPSAGVTMATSFLSLALNKPVDPTVAMTGELTLTGKVLRIGGLREKVVAAKRSGAKTVIFPKDNLNDWEELPENVKEGMEPLAADWYDDIYKRLFSGVKKSEGNNVWKSEFELIDKKKKEND

SEQ ID NO: 3207 - DNA, 3336 bp, Kluyveromyces lactis NRRL Y-1140
  CDS (1)..(3336)
atgttaagaagtagtagatcccgccttgtgaccaggaacatccttttgcgtcaattcaagaatggtaacaacgtcaggttgatgaatgcaacgaggttccagcataatggcatagttggtaacgaaaagttagcttcggattctcagaagtttgtggatgagtcttatcactggatgcaatatcggaaacagatgaacgaccctgtttcaagacagagacttgaacagttggaatcccaatgggtaaaaagcatacagttgaagcaggatgataagggcaaggatatagatcagccagaatctgaaaacaggaagaaagaagaggaacaagtccctactgaagaaaaggacaacgatactgcaaaggaatcggaaacatctcagcaacgggattctgttgcagagactcagggcccagctagcacttctggaggagcatcgggtaacggagaatcatcaggtaatggaagcggtgatgatggtaacaatggaagtggtaatggaaaaccttccaagaacgctaaacaaccgttccccgaagtttatccccaagtgatggcattaccaatatctcgccgtccattattccctggtttttacaaagcagttgtaatttcagatgaaagagtcatgaaagcgattaaagatatgtcagatcgtcaacaaccatacattggtgcatttttgttgaaggattctactgttgataccgatgtgattcataaagctgatgaagtttacaatgtcggtgtcttcgcccaagttacaagcgcattcccaagtaaagacgaaaagactggtgctgaaacgatgaccgctctattatacccacacagaagaatcaaattggatgaattgatcccaccaacttctgaacaaaacctgaaggatgaatcagatgtatccaagagcgaaggtgtcgaaaataatgaacaagaggtagttaaggcctctttacaaaagatggaaaatatgaaggatgttgaagaagatgacgatgagaatttgaccgggttcttgaaagattatgatgtttcattggtcaatgtatccaatttggctgacaaagaatttaatccgaattcccccgtcatcaatgcgttgacctctgaaattttgaaagtgtttaaagagatttctcaattgaataccatgttcagagaacagattgcaactttttcagcatcaattcaatctgccaccacaaatattttcgaagagccagcaagattggctgattttgccgctgccgtttctgctggcgaagaagaggaattacaagaaatccttgaatccttggacattgagcaacgtcttgaaaaggcattgacagtgttaaagaaagagttgatgaatgctgaactacaaaataaaatctctaaagacgttgaaactaagattcaaaagaggcagagagagtattatctaatggaacaattgaaaggaatcaagagagagttgggtatagatgatggtcgtgataaattaattgaatctttcaaagatcgtgtatctaagctacaattaccggaaacagttcaaaaagtatttgatgacgaaatcactaaattagcgactctcgaaacttcacaatctgaatttggtgtgattagaaactacttggattggatcacttccctaccttggggtattatatctaaagaacagtacagtataccaaaggcgaaaaaaatcttagatgaagatcactatggtatgaaggacgtcaaagatcgtattcttgagttcatcgccgttggtaagcttctcgggaaggttgatggtaagatcatctgttttgttggaccacctggtgtgggtaagacatccattggtaagtccattgctcgctctttgaacagacaatttttcagattctcagtaggtggtatgactgatgtggctgaaatcaaaggtcacagaagaacctatattggtgctttgccaggtagagtcatccaagctttaaagaaatgtcaaactcaaaacccgttgattttgattgacgaaattgataagattgggcacggcggtatccatggggaccccgccgcagcgctattagaattattagacccagaacaaaacaatagtttcttggacaactatatggatattccaatcgatttgtctaaagttttattcgtttgcaccgctaattctttagaaactatcccaagaccattgttggaccgtatggaagtcattgaactaactggttatgttgctgaagaaaaggttaagatcgcagaaaattatctatcgccaagtgcaaagaaatctgctggtttagataatgctaacgtcaacattaccgagaatgctattgtttctttgatgaagcattactgcagagaaagtggtgttagatcattgaaaaagcacattgagaaaatctaccgtaaggctgcgttgaacgtcgttaaacaattgagcatagacgataaacctatggaaaatgaagaagtgaaggatcaaaaggatataaaggtcaagcaatccgaaaacaaatctagtgctgaagcatcgaccgtagaatccactactgaagaaaatgaactgatcaagacccaaaaatctcacgataacaagggttccttagaagtaccggaaactgtttctgtgactgtagacgaaaacaacctaaaggattacgtaggtccaccaatcttcactactgatagattatacgaatctactcctcctggtgttgtgatgggtcttgcatggactagcatgggtggatgtgcaatgtacgtagagagtgttttagaacagcctttgacacattcaactcaacctactttagaacgtaccggccaacttggagatgtaatgaaggaatcctctagactagcatactctttctcaaagatgtacttggccaagaagttcccagaaaatagattctttgaagttgcaaagatccatttgcattgccctgaaggtgctacaccaaaggatggtccatctgcaggtgtgacaatggcctcttcattcttatcactggctttgaataagggtcttgacccaacagtggctatgaccggtgaattgactttgactggtaaagttttgaggatcggtgggttaagagaaaaggccgtagcagccaagagatctggtgccaagactatcattttccccaaagacaatttgtcagactgggctgagcttccagagaatgtgaaggaaggattggaacctttggccgcagactggtacgaagatgttttccaaagactattcggagacgtagacactaacaagggtaacaccgtttggtcagaagacttcaagaagattgatgaaaaacgcaacaaggaaactaaataa

SEQ ID NO: 3208 - protein, 1111 aa, Kluyveromyces lactis NRRL Y-1140
MLRSSRSRLVTRNILLRQFKNGNNVRLMNATRFQHNGIVGNEKLASDSQKFVDESYHWMQYRKQMNDPVSRQRLEQLESQWVKSIQLKQDDKGKDIDQPESENRKKEEEQVPTEEKDNDTAKESETSQQRDSVAETQGPASTSGGASGNGESSGNGSGDDGNNGSGNGKPSKNAKQPFPEVYPQVMALPISRRPLFPGFYKAVVISDERVMKAIKDMSDRQQPYIGAFLLKDSTVDTDVIHKADEVYNVGVFAQVTSAFPSKDEKTGAETMTALLYPHRRIKLDELIPPTSEQNLKDESDVSKSEGVENNEQEVVKASLQKMENMKDVEEDDDENLTGFLKDYDVSLVNVSNLADKEFNPNSPVINALTSEILKVFKEISQLNTMFREQIATFSASIQSATTNIFEEPARLADFAAAVSAGEEEELQEILESLDIEQRLEKALTVLKKELMNAELQNKISKDVETKIQKRQREYYLMEQLKGIKRELGIDDGRDKLIESFKDRVSKLQLPETVQKVFDDEITKLATLETSQSEFGVIRNYLDWITSLPWGIISKEQYSIPKAKKILDEDHYGMKDVKDRILEFIAVGKLLGKVDGKIICFVGPPGVGKTSIGKSIARSLNRQFFRFSVGGMTDVAEIKGHRRTYIGALPGRVIQALKKCQTQNPLILIDEIDKIGHGGIHGDPAAALLELLDPEQNNSFLDNYMDIPIDLSKVLFVCTANSLETIPRPLLDRMEVIELTGYVAEEKVKIAENYLSPSAKKSAGLDNANVNITENAIVSLMKHYCRESGVRSLKKHIEKIYRKAALNVVKQLSIDDKPMENEEVKDQKDIKVKQSENKSSAEASTVESTTEENELIKTQKSHDNKGSLEVPETVSVTVDENNLKDYVGPPIFTTDRLYESTPPGVVMGLAWTSMGGCAMYVESVLEQPLTHSTQPTLERTGQLGDVMKESSRLAYSFSKMYLAKKFPENRFFEVAKIHLHCPEGATPKDGPSAGVTMASSFLSLALNKGLDPTVAMTGELTLTGKVLRIGGLREKAVAAKRSGAKTIIFPKDNLSDWAELPENVKEGLEPLAADWYEDVFQRLFGDVDTNKGNTVWSEDFKKIDEKRNKETK

SEQ ID NO: 3209 - DNA, 3240 bp, Debaryomyces hansenii CBS767
  CDS (1)..(3240): transl_table=12
atgcttagaccaaggacttacgtacgtaagttggcttggagatgcccaagaaagtcacaattagggctaagattagctacgagtgtatctagtcataaatcattgccacttccaatgaattttgatatatcacattcacaatctgcatttagagcgtatcaggatattatacatagaaataaaagtgtgggtgatgatgaaccttcacaaaggtcagaaaacgaaaataacccgtctgagtcggacaaggattccaatcaggatccggagacgccaaagaaagacaaggaactggaaaatgacaaagaaccggagaaagagaaagatattgagaacgataataaggtgtcgtctgaatctaatgaaaatgttacattggcgtcgtcgaatacaggtggggccgctccacccaacggcaacaataatggggatgatccagacgattcgaaccctctgcttccagttgatcctgtgactgggttgtacccaccattattggccattcctatgaaggatcgtcctccacttcctgggcgtccattcgcaattaatgtcacagatcccgaggtgattagatcgatatacacaatcatcgataaacgggaaccatattttgtattgtttcatgtaaaggattctaatgagccggatacggacgtcataaataagaaagactcggtgtatgatataggggtccattgtcaaattattagacacacgacacctagacctggggtatttaatgttttaggttaccctcttgaaagatgtaaattagaagaattaacgacgccaagtagtgaaaaggaggctaaatctgaagaaccttcaaaagaagatgcggaaagtttcccaacatcttatttgaagggtctcaatgtttcatatgcaacagttaaaccggttgaagatgaaccttatgataaatcttctgcagaaattcgttcgttagtggaatcattaaagacattattaagtaaaatgggtggtaaaaatccactcgaaaagctccaaattaaagaaggaacggacttaatcagtgatccatctaaatttgcggattttgttggttcaaccatacacggtgatccaaagaaaattcaagaaatattagaaacgttgaatattgagaccagattatctagggcattagaattattgaaagtcgagcttaaagccagtttaattaaagaaagcactatacataatttaagtaccaaggctgatgaataccaaactcgacttttcataaaggagtttattaaggaattgcaaaagcgtgctggtatttccgaatcggaagataaaaaaacctcaaagtttgatgaaagacttaaacatttgaaactaacggaggaagctatggaagcatataatgctgaaaaggctaagatggaaaaccagaatgaacactctagtgaattaggtgttagcgaaagatatttagattggttgacatcgattccctggggtgtttactccaaagatcacttcaatattaaacaggcaagagaagttttagagcgtgatcattatgggttgaaggatgttaaagaccgcattttggaattcatttctttaggtaaggtttctggtaaagttgatggtaagattctatgcttggcgggtcctccaggtacaggtaaaacatctattgctaaatccattgcagaatcattgaatcgtaaatatgtgagaattgctatgggaggtatacaggatgttcatgaagttaaaggacatagaaggacatacgttggttctattccaggtcgtattatttctgctttgaaacaagccaaaacttcaaatcctttgatgttgatcgatgaaatcgataagcttgacttaagtcgtggtggtggtgctgcttcagcattcttggagatcttagatcctgaacaaaacaattcatttgtagataattacattgacgttaaggttgatttatcaaaggttttattcgtttgcactgcaaattacttaggaaatattccagctcctttgagagatcgtatggaaattattgacgtctctggttataccaataatgagaagattgaaattgctaaaagacatttgattcctgaagccagtaaaaaagctggtttagaaacaaaccatgtctctattaccaacgaaacaatttctagattgattgaaaagtactgtcgtgaaagtggtcttagaaatgttaaaaagttgattactaggattttcagtaaggcctctcttaagattgtggaagaaattgaagctaaggaagcgcttgattcttctaaagaaaaggaaggagttactgctagttccgaagaggcgaacgttaatagtgaatctacgaaatcgaatacatctcaagcagaacctgttgctgaaagttctacagatattctgacaaaatctaaagttgcttctgaaaaaatcgagacaaaagaaaagaaggaaaccaataaagaaaatggtcagtcggaagaggaccaacagcctgaaccaaaatttgttattcctgaagacattaaattagaaatcacaccagcaaatttaaaagattatgtgggtccagaaatttacacaagagaccgtgtatatgaattcccaccaccgggtgttgcaactggtctttcttatagtacttcaggtaatggtgatgctctttacattgaatcgatcttaacacattctattggatctggatctggagttccaggtatgcatgtcactggtagtttgaaggatgttatgaaagaatctgcctctatagcttattcttttactaagctgttcatggcaaagaattatccagataataggttctttgaagcagctgatattcatgttcattgtcctgatggtgcaattccaaaggatggtccttctgcaggtatttcatttacgtcttcgttggtttcattagcaatcaatgaatcgttgcctccaactgttgccatgacaggtgaaatcactgtcacaggtagagtattaccagtaggtggtttaagggaaaagatattaggtgctaaaagatatggctgtgatactataatcttccctaaagatattgaaaacgagcttgaagaaatcccagatgaagtcaaagacggcgtcacatttattccagtggagtggtatcaagaggtctttgataagatcttccctaacgccaccgctcaaaagtgtaacgaagtatggaaagaagaatttgctaaattggacctgaaaaagaagaacaaaaagaaatga

SEQ ID NO: 3210 - protein, 1079 aa, Debaryomyces hansenii CBS767
MLRPRTYVRKLAWRCPRKSQLGLRLATSVSSHKSLPLPMNFDISHSQSAFRAYQDIIHRNKSVGDDEPSQRSENENNPSESDKDSNQDPETPKKDKELENDKEPEKEKDIENDNKVSSESNENVTLASSNTGGAAPPNGNNNGDDPDDSNPLLPVDPVTGLYPPLLAIPMKDRPPLPGRPFAINVTDPEVIRSIYTIIDKREPYFVLFHVKDSNEPDTDVINKKDSVYDIGVHCQIIRHTTPRPGVFNVLGYPLERCKLEELTTPSSEKEAKSEEPSKEDAESFPTSYLKGLNVSYATVKPVEDEPYDKSSAEIRSLVESLKTLLSKMGGKNPLEKLQIKEGTDLISDPSKFADFVGSTIHGDPKKIQEILETLNIETRLSRALELLKVELKASLIKESTIHNLSTKADEYQTRLFIKEFIKELQKRAGISESEDKKTSKFDERLKHLKLTEEAMEAYNAEKAKMENQNEHSSELGVSERYLDWLTSIPWGVYSKDHFNIKQAREVLERDHYGLKDVKDRILEFISLGKVSGKVDGKILCLAGPPGTGKTSIAKSIAESLNRKYVRIAMGGIQDVHEVKGHRRTYVGSIPGRIISALKQAKTSNPLMLIDEIDKLDLSRGGGAASAFLEILDPEQNNSFVDNYIDVKVDLSKVLFVCTANYLGNIPAPLRDRMEIIDVSGYTNNEKIEIAKRHLIPEASKKAGLETNHVSITNETISRLIEKYCRESGLRNVKKLITRIFSKASLKIVEEIEAKEALDSSKEKEGVTASSEEANVNSESTKSNTSQAEPVAESSTDILTKSKVASEKIETKEKKETNKENGQSEEDQQPEPKFVIPEDIKLEITPANLKDYVGPEIYTRDRVYEFPPPGVATGLSYSTSGNGDALYIESILTHSIGSGSGVPGMHVTGSLKDVMKESASIAYSFTKLFMAKNYPDNRFFEAADIHVHCPDGAIPKDGPSAGISFTSSLVSLAINESLPPTVAMTGEITVTGRVLPVGGLREKILGAKRYGCDTIIFPKDIENELEEIPDEVKDGVTFIPVEWYQEVFDKIFPNATAQKCNEVWKEEFAKLDLKKKNKKK

SEQ ID NO: 3211 - DNA, 3534 bp, Yarrowia lipolytica CLIB122
  CDS (1)..(3534)
atgattgataacaaggtttctgtatgcagtgttggaaaggtggttatcactgaagtcgccacctttgcatcccatcctctgtacattgacaggaaaaccgctttgaccatgattagatcaacgcgagcggcctctcggcttcggctaggagctcgttactatgcgtcacacgccccctatggcgtgctttccgaacatttgaagcgcacccctcgaaccaactctcaacactactatcctcctcctcaaggagcccacgaccttcccaaggtgtccagcatgggagattccatcgcgagcattgttcgaggacgagagttgtgggtccaggaaaaggacaagtccgacaagccagagaaatctgacaagcccgacaagactgataagaccgacaaggacaagcctgagaaacaggacaaagacaagaccgacaagcccgagaagaccaaggtgagccacaccccgtcatccactgcatccaccggagccggagaagctgctgctcctccttctgcgcctccctcgggctcgggatcatcgtcttcttctggaggagggtctccacctgccaagaagaagaagagccctgcccagacctatcccgagattttggcggtgcccatcagcgaccggcctctgcttcctggatttcatcgagccctggtcatccgagacccgaacgtgatgaaggctattgacgagatgatcacccgaggcgagccatacctggcatgcttcttcctcaaagagttttccaacgcagacgtgatccaggacgcctccgaggtacacgacattggagttattgctgagatccagatccagtcgcaggaccacaagcgatccaccgtcgacgcctccaacgagcctgtctatgtgctcatactctacccccacaagcgagtacgactcaactcgcttaaaaaccctccttccagcggcggagctgtgtcctatgcctctgtgtccgaagacgtggctgaggacggagagctgctgctgactagcaaggatctggaggggtactcggaggagtttctggaggcccgagaggaagccaagaaagctaagagtggcaagactgaggattccaagcacgattccaaggttacttccaaggacggcaaggagaccaccgaaaagtacgactcttcaactcttcaggagtccccttactcttttctgtccacctacgatgtgtctacagctgccatttctctaattgaggacaagccccacgacaagaacaacagggtcatcactacattgacaaatgagattctcaacgtgttcaagatgctgcgggctgaagacgccactcttcgagaacagctgtcgagtgtcgtgggcgatattctgcgaaccgagcctgcagttcttcaggagcccggtcggctggctgactttgccgcggctctgtgtgctggcgaaggaaaggagatccaggctgttctgaccgctctggatctcgagactcgtctcaaccgggctctgattttgctcaagcgagagcataccaatgccaagctgcagcagaagattgcacgggatgtggagaacaagctcaacagcaagcacaaaaagttcctgctgaccgagcagatgaaggccattaagaaggaactcggggttgacgacggcaaggagaagctggtggagaagttcaacgagcgggccgagaagctggacatgcccgaaaacatccagaaggtgtttgaggaggaaatgacccggctgcaatccatggagccctcgtccagtgagtactcggtgacccgaaactacctggactggatcacccagatcccctggaacaagacgaccgaggaccggttcaacctgccccaggccaaggatgtgctggattccgagcattatggcatgaaggaagtcaaggatcgcattttggagtttattgccgtgtcgcgcatgaagggcggtcttactggtaagattctgctgctgcagggtcctcccggtgttggaaagacctccattggaaagtccatcgccaaggcactcaatcggcagttctaccgattctctgtcggaggaactaacgatgcctctgaagtcaagggtcatcgacgaacatacgtcggagctatccctggtcgacttgttcaggctctcaagcagacacagacagaaaatcctctgattctgattgatgagattgacaagctatcgtcttcgcgaactcagggagaccccggagctgctcttctggaggctctggaccccgagcagaacaacgcatttctggaccactacctggacgttcccattgatctgtccaaggtgctgttcgtgtgcacctctaacgatctgtctacaatcccctggccgctgctggaccgaatggaggtaattgagatgagtggatatgtgcccgacgagaagctcaacattgccaaccagtaccttgtcccccagtccaagaaggagactggtctggagaatgttaacgttcaggtgaccgacgatgccatcaatgcccttaaccgacagtattgtcgagagtctggagttcgaaacctcaagaagcacatcgagaaaattttccgaaaggtggttgtcaagatcgtgggcgagtatggccaggacgaggttgctgctgaaaagattattgacgtggagcctgtggagaaggataaggagtctgctgagaagaagaccacgaagtccaagtccaaggaggtcaacgaggaacctgctgccaaggaggagaaagacaaggcaactgaatctgctgagtcatctgagaccaaggtgggcacgaaggctcctcctgtcacggtccccgaggactacagcctgactatcgatgagaaggatttgtatgactatgtcaactctcccccttactcgtccgaccgaatgtttgaggatcctccccctggagtcgtcatgggtcttgcctactctcctcttggaggctctgctttgtacattgagtgtattctggatggaggtctttctgccgactcatctgctcgactctcgtcgactggtaacctgggtaacgtcatgaaggagtctaccaacattgcttactcgtttgcgaagtcgtttatgatccgaaacttccctgccaaccggttctttgagcgagctggcatccatctgcattgtccagctggcgccatttccaaggatgggccatcggccggatgtgccgttgtgactggtctgctgtctctggctctcaaccaccccattgactcttccatttccatgaccggtgagatttcgctgaccggtaaggtgatgaagattggaggtctccgagagaaggctgttggagctcactctgctggagccaagaccatcatcattcccaaggacaattctggagactgggacgagcttcctgacaccgtcaaggaaggtcttactcccgtgtttgccggcacctaccaggatgtgtatgacgttgttttccagggtctggataccaaggtggccgctgaggtgtggaagaagcaatttgatctgattgaccgaaagctcgacaagcgaggaagcaagtga

SEQ ID NO: 3212 - protein, 1177 aa, Yarrowia lipolytica CLIB122
MIDNKVSVCSVGKVVITEVATFASHPLYIDRKTALTMIRSTRAASRLRLGARYYASHAPYGVLSEHLKRTPRTNSQHYYPPPQGAHDLPKVSSMGDSIASIVRGRELWVQEKDKSDKPEKSDKPDKTDKTDKDKPEKQDKDKTDKPEKTKVSHTPSSTASTGAGEAAAPPSAPPSGSGSSSSSGGGSPPAKKKKSPAQTYPEILAVPISDRPLLPGFHRALVIRDPNVMKAIDEMITRGEPYLACFFLKEFSNADVIQDASEVHDIGVIAEIQIQSQDHKRSTVDASNEPVYVLILYPHKRVRLNSLKNPPSSGGAVSYASVSEDVAEDGELLLTSKDLEGYSEEFLEAREEAKKAKSGKTEDSKHDSKVTSKDGKETTEKYDSSTLQESPYSFLSTYDVSTAAISLIEDKPHDKNNRVITTLTNEILNVFKMLRAEDATLREQLSSVVGDILRTEPAVLQEPGRLADFAAALCAGEGKEIQAVLTALDLETRLNRALILLKREHTNAKLQQKIARDVENKLNSKHKKFLLTEQMKAIKKELGVDDGKEKLVEKFNERAEKLDMPENIQKVFEEEMTRLQSMEPSSSEYSVTRNYLDWITQIPWNKTTEDRFNLPQAKDVLDSEHYGMKEVKDRILEFIAVSRMKGGLTGKILLLQGPPGVGKTSIGKSIAKALNRQFYRFSVGGTNDASEVKGHRRTYVGAIPGRLVQALKQTQTENPLILIDEIDKLSSSRTQGDPGAALLEALDPEQNNAFLDHYLDVPIDLSKVLFVCTSNDLSTIPWPLLDRMEVIEMSGYVPDEKLNIANQYLVPQSKKETGLENVNVQVTDDAINALNRQYCRESGVRNLKKHIEKIFRKVVVKIVGEYGQDEVAAEKIIDVEPVEKDKESAEKKTTKSKSKEVNEEPAAKEEKDKATESAESSETKVGTKAPPVTVPEDYSLTIDEKDLYDYVNSPPYSSDRMFEDPPPGVVMGLAYSPLGGSALYIECILDGGLSADSSARLSSTGNLGNVMKESTNIAYSFAKSFMIRNFPANRFFERAGIHLHCPAGAISKDGPSAGCAVVTGLLSLALNHPIDSSISMTGEISLTGKVMKIGGLREKAVGAHSAGAKTIIIPKDNSGDWDELPDTVKEGLTPVFAGTYQDVYDVVFQGLDTKVAAEVWKKQFDLIDRKLDKRGSK

SEQ ID NO: 3213 - DNA, 3315 bp, Aspergillus nidulans FGSC A4
  CDS (1)..(3315)
atgctccgcggccagactctccgctggagagccgcgctccagacaccgcgatctctgattcttcggcctctttttgctccaggcgggtacaatgtcggcccccgatcagtcctagagacttcacgtcgtttccgctcgcttccgccgtcccttcgtaccttttcttccagcaccgctcgaaggaaagagaagcccccacctggagacgagaaggaggattcaaacaaaaaagagaacaaggataatgatgatggaaccgaggataaagaagtcgaacgcgatcctcgtcgcaagcaagcagattcgtctgggaagcatggttcttctgtagatccaggagctccgacatcgggcttcgcaaggcggagggagaaagcggccgatagagaccaacgtagcgtcaccgaagacgcaaagagagaagctgaagcgaaaggcaattcctcagacacaccatctgctattcccgtgagtgatagctcttcggaatctaagcccagcggttcgcataacggcggcgacgatggcggaaagaaaggaaagaagaacgacaaagctctgcaaaagccgtcagtacctgatgtatatcctcaagtcatggcaattcctatcgccaaacgcccgttattccccggtttctacaaggccattaccatccgtgacccaaatgttgccacagcgatccaagagatgatgaaacgcggacagccgtatgtaggcgcttttctgttcaaggatgaaaacgcagacggcgatgtgattgagagtactgacgatgtttacgacaccggtgtcttcgctcaagtcactgctgcatacccgcttcgtggcgagcaaagcggcgttacggccgtcctttatccccaccgacgtatcaagatctcttctctgattccgccgggtgattcaacgaaaagtgggaactcggaggataagactacagagaagcgtggtgacgttgtagcaagctttgaggagaacgcagcggagcttgtaacgaaggatcactacgagcctacctctttcttacggaaatacccggtcagcctggtaaatgtcgagaacctaacggaggagcctttcgataaaaagagcgccattatccgcgctgtgacaagcgagattgtcaatgtctgcaaggaaattgctactctcaatcccttgttccgcgatcaaatatctgctttctacactgaccaattccctggaaaccttagcgatgaacctgccaagctggcggatttcgcggccgccgtctctggtggagaactgcatgagcttcaggaggtccttgagtcaatgaatattgaggagagactgcccaaaggattggttgtgctgaagaaggagctgatgaacgcccagcttcaaacgaagatttcgaaggatgtggaagccaagattcagaagcgtcagcgggagtactggctgatggaacagatgaaggggatcaagcgagaactgggaattgagtctgacggcaaggacaaactcgtcgagaagttcaaggagaaggcagagaagttagcaatgcctgaagctgtgaagaaggtgtttgatgaggaactcaacaagctcgctcaccttgagccggctgcgtccgaattcaatgtcactcgaaactatctggactggttgacccagatcccttggggccagaagagtgtagagaactttggaatcagccatgcgacggatgtcctgaacgaagatcactacggtctgaaggatgtcaaagaccgaattctcgagttcatcgcagttgggaagctccggggaactgtggaaggaaaaatactctgtcttgttggccctcctggtgttggtaagacgagtatcggaaaatctatcgctcgggcactaaaccggcagtactaccgattctccgtaggtggattaactgatgtcgcggagattaaaggacaccggagaacctatgttggtgctcttcctgggcgtatcattcaagctctcaagaagtgccaaaccgagaatccccttatattgattgatgaagtggacaagatcggccgtggtcatcagggcgacccgtcgtccgcactgcttgagcttctggatcctgagcagaactcgtcgtttctggatcactacatggatgtacctgtcgacctttcgaaagttctgtttgtttgcactgccaatgtcactgacacgatacctcggccgttactagaccgcatggagcttattgagctatctggctatgttgcggacgagaaaatggccatcgctcaaaagtatcttgcgcccgctgccagagaactaactggcctcaaaaatgtggacgttactcttaccgaggaagccattgaagagcttatcaagtcgtactgtcgggaaagcggtgtgcgaaacttgaagaagcagattgaaaaagtgtaccggaaggcggccttcaagatcgtttcggatcttggggaagacgtattagcggaggacaaggctctcacagccgaggggaaggcggcgcaagaggagtcggagaaggagacaggccccattgaatcaacgagcgaacaggaaaaagccacaactgaaaacccacgggtggcactcaatgtacccgatagtgtacacctcagtattggtaaggacagcttgactgattacgttggcccgcctatcttcaccaccgaccgcctgtatgacacctttccgccaggtgtcaccatgggtctggcttggaccagcatgggaggtgcggctctctacgtcgagtccatcttggaaaatgcattgacacccgagtcacaacctggtcttgacatcaccggcaatctgcaaaacgtgatgaaggagtcaactcagattgcctactcgtttgtgaagtcggtgatggcgaagcagttcccggagaatagattctttgaaaaggcaaagctgcacatgcattgccctgagggtgctgtccctaaggatggtccatccgctggtatcactatggcgacatcccttctttcgcttgcattgaaccacccgcttgacccaacgatcgcgatgactggagaattgacagtgaccggaaaagtgctgcgcattggaggactgcgagagaagacggtggctgcgcgccgtgccggtgccaagacgattatcttcccagccgataacatgtccgactggctggagctacctgagaacattaaatcaggaatcgaaggccacgcagtgagctggtactctgaagtgtttgacatcctgtttgccgatctcgataagcaagctgcaaaccgcgtctggcagaagcagctgtcgaaggagcccaagaagtccaacgataaggacgaccactga

SEQ ID NO: 3214 - protein, 1104 aa, Aspergillus nidulans FGSC A4
MLRGQTLRWRAALQTPRSLILRPLFAPGGYNVGPRSVLETSRRFRSLPPSLRTFSSSTARRKEKPPPGDEKEDSNKKENKDNDDGTEDKEVERDPRRKQADSSGKHGSSVDPGAPTSGFARRREKAADRDQRSVTEDAKREAEAKGNSSDTPSAIPVSDSSSESKPSGSHNGGDDGGKKGKKNDKALQKPSVPDVYPQVMAIPIAKRPLFPGFYKAITIRDPNVATAIQEMMKRGQPYVGAFLFKDENADGDVIESTDDVYDTGVFAQVTAAYPLRGEQSGVTAVLYPHRRIKISSLIPPGDSTKSGNSEDKTTEKRGDVVASFEENAAELVTKDHYEPTSFLRKYPVSLVNVENLTEEPFDKKSAIIRAVTSEIVNVCKEIATLNPLFRDQISAFYTDQFPGNLSDEPAKLADFAAAVSGGELHELQEVLESMNIEERLPKGLVVLKKELMNAQLQTKISKDVEAKIQKRQREYWLMEQMKGIKRELGIESDGKDKLVEKFKEKAEKLAMPEAVKKVFDEELNKLAHLEPAASEFNVTRNYLDWLTQIPWGQKSVENFGISHATDVLNEDHYGLKDVKDRILEFIAVGKLRGTVEGKILCLVGPPGVGKTSIGKSIARALNRQYYRFSVGGLTDVAEIKGHRRTYVGALPGRIIQALKKCQTENPLILIDEVDKIGRGHQGDPSSALLELLDPEQNSSFLDHYMDVPVDLSKVLFVCTANVTDTIPRPLLDRMELIELSGYVADEKMAIAQKYLAPAARELTGLKNVDVTLTEEAIEELIKSYCRESGVRNLKKQIEKVYRKAAFKIVSDLGEDVLAEDKALTAEGKAAQEESEKETGPIESTSEQEKATTENPRVALNVPDSVHLSIGKDSLTDYVGPPIFTTDRLYDTFPPGVTMGLAWTSMGGAALYVESILENALTPESQPGLDITGNLQNVMKESTQIAYSFVKSVMAKQFPENRFFEKAKLHMHCPEGAVPKDGPSAGITMATSLLSLALNHPLDPTIAMTGELTVTGKVLRIGGLREKTVAARRAGAKTIIFPADNMSDWLELPENIKSGIEGHAVSWYSEVFDILFADLDKQAANRVWQKQLSKEPKKSNDKDDH

SEQ ID NO: 3215 - DNA, 3237 bp, Candida albicans SC5314
  CDS (1)..(3237): transl_table=12
atgattaaggcttccaaatgtaacaagcctcgggccttgtttttggttagagtttctatacctagaacatttataagaaatgctacatctgctgtaccaaccacgataaaattaaatgatttagcttcattgccaccaattaccaagtctctaccaacaaacttgccctttttgatgcctgatacattacaaagtttacttcgttttgattcagaaaaggaaaaacaaccttcaacggataagtcaaatgacaaagacaaacctagccgaaaagagaaaggtaaagacaaagaaaaggaaaatgaagagaagaaagatataaatatggatgaaaaatatgagattaatgaagaaacggatacaaaaccaaccattgatccaaacaatcctgtatcttctaagtctaatatatcgtccagtagtggtggtgataacaataataataacaacaacaacaacaacaataacgattcagatggcaaaaatgatgatggttcacccaaagataaagagttcttgtcacccctggactctggattgcacccaccatttttggctattgccatgaaagacagaccatttttaccaggtgcgacacgccatctccacgtttctgatcctgaagtaataaaatgtgtgaaccatatgattaacagtaacatcaagagtccatattttgttttatttcatgtccgtgacactaattctgaagatgctgctttagatgtaattaaggatagggattttgtccatgaagttggtacattatgtcaaattatcaaaacaactgggagcgaaattttggtgtatcctcattatagagtcaaattagtagatatcagtactccaaattctagaagtgaaagtattgagaaggaacaagacaattctcaaacgtcttatttaaagaagtttgaggtatcgtatgctgtaacacaacagttaaaggatgagccttacgacgagcaaagcataaccatcaatgcatggactcgaagaatcaaagagttgtatgaaaaacttgccccaaagtatgatcaacctgaaaacaaagaagagattatgagcaatccttccatgcttgctgattttattgcaagtaaagttcacgcaaagcctgaacagattcaagaaattttggaatcactgaatgttgagactaaattggagctttctttacaattgttgcaagtagaagcagacgccgatgaaatgagacaaacagctcttaaaaatataagagagcgtacagagaaagcttatgcacagagtttaatcaaagaatataccaaggaattgttgaaggcagctggtattggtgagaattcaaaagtgcacaagtttgatgaaagaatcaaacatctcaaaatgcccgaagaggcaatgaaagcgtacaaaacagaaaaggaaagattgggaacacaaagtgacatggagcaaaacgttgttgaaagatatttggactggttaacccagattccatttggtgtttacactaaagattcctttaatgtaaagaaggcccgtgaaattttggacagagatcattatggtttgaaagatgtgaaagaccgtattttagagtttatctctgtaggtaaaatttccgggaatgtcgatggtaagattttgtgtttggcaggccctcctggtacaggtaaaacttcgattgccaaatctattgctgaggcattaaacagaaaatacactagaatcgctgtcggtggtgttcaagacgtacatgatgttaaaggtcacaggagaacttatgttgcatctattcctggtaggattgtgactgcattgactcaagctaaaacttcgaatccattgatgttgatagatgaaattgataaattagatactacatcacatggtggtgctgcgagggcatttttggagattttagatcctgaacagaataattcttttgtcgataattttattgaagtgaaagtagatttatcaaaagttttatttgtttgtacagcaaattaccttggctccattccgggcccactaagagatcgtatggaaataattgaagttaacgggtacacaaagaatgacaagattgaaatcacaaagagacatttaattcctgcagccgcaaagaaggttggattggatgaaggtcgcgtagtgatccctgatgaaactatttccagattaattgacaagtactgtcgtgaaagtggtttgagacatatcaagtctttgatcaatagaattttcagtaaagcttccagaaaaattgtagaagaattggaagaaactgatgttgatagtcacaacaaagatacagtcgaaggaactcttgttgctaaagaaagtgagaaagtaatatccgacaaagccaagattgatactgaaaactcaccaatagaatatatccaaagcaatactgaagttaaagcagagacaacaacagaaagccaacaagaacaagaaaaagaaaaagaaaaagacgaagaaataaagaaattggatttgccagcagatttgaaaatagaagttaagccagagacattgaaggattttgttggaccagaaatttacataaaggacagactttacgaaactttgaatccaggtgtagcaactgggttggcctataatacatctggagatggtgatgcattgtatattgaatccattttaacagattccattagttccgaccttggaaatgccggattacatgttactgggtcattaaaggatgtgatgaaagaatctgcatctattgcatattcttttgccaagcagtttatggtaagacagttccctgataacagattctttgaagcagctcacattcatgttcattgtccaggaggagcaattccaaaagatggaccatcagctggtattgcctttacttcatcattggtttctttggctttgaacaaatcattaccaaacgatactgcgatgactggtgaaattacgttaactggtaaggtgttggctataggtggtttacgagaaaagtcgttaggtgccaaaagagctggttataccaaaatcatttttcctaaagattgtgaataccagttggatgagatcccagacgaagtaaaggaaggacttacttatatccccgtggaatggtacagcgaagtttttgaacatttgttccagggaatctctaaagaagaaggaaactcagtttggaaagaagagtttgccaaattagaagacaagaaaaagagtaaaaaaacaaataccaaataa

SEQ ID NO: 3216 - protein, 1078 aa, Candida albicans SC5314
MIKASKCNKPRALFLVRVSIPRTFIRNATSAVPTTIKLNDLASLPPITKSLPTNLPFLMPDTLQSLLRFDSEKEKQPSTDKSNDKDKPSRKEKGKDKEKENEEKKDINMDEKYEINEETDTKPTIDPNNPVSSKSNISSSSGGDNNNNNNNNNNNNDSDGKNDDGSPKDKEFLSPSDSGLHPPFLAIAMKDRPFLPGATRHLHVSDPEVIKCVNHMINSNIKSPYFVLFHVRDTNSEDAALDVIKDRDFVHEVGTLCQIIKTTGSEILVYPHYRVKLVDISTPNSRSESIEKEQDNSQTSYLKKFEVSYAVTQQLKDEPYDEQSITINAWTRRIKELYEKLAPKYDQPENKEEIMSNPSMLADFIASKVHAKPEQIQEILESSNVETKLELSLQLLQVEADADEMRQTALKNIRERTEKAYAQSLIKEYTKELLKAAGIGENSKVHKFDERIKHLKMPEEAMKAYKTEKERLGTQSDMEQNVVERYLDWLTQIPFGVYTKDSFNVKKAREILDRDHYGLKDVKDRILEFISVGKISGNVDGKILCLAGPPGTGKTSIAKSIAEALNRKYTRIAVGGVQDVHDVKGHRRTYVASIPGRIVTALTQAKTSNPLMLIDEIDKLDTTSHGGAARAFLEILDPEQNNSFVDNFIEVKVDLSKVLFVCTANYLGSIPGPLRDRMEIIEVNGYTKNDKIEITKRHLIPAAAKKVGLDEGRVVIPDETISRLIDKYCRESGLRHIKSLINRIFSKASRKIVEELEETDVDSHNKDTVEGTLVAKESEKVISDKAKIDTENSPIEYIQSNTEVKAETTTESQQEQEKEKEKDEEIKKLDLPADLKIEVKPETLKDFVGPEIYIKDRLYETLNPGVATGLAYNTSGDGDALYIESILTDSISSDLGNAGLHVTGSLKDVMKESASIAYSFAKQFMVRQFPDNRFFEAAHIHVHCPGGAIPKDGPSAGIAFTSSLVSLALNKSLPNDTAMTGEITLTGKVLAIGGLREKSLGAKRAGYTKIIFPKDCEYQLDEIPDEVKEGLTYIPVEWYSEVFEHLFQGISKEEGNSVWKEEFAKLEDKKKSKKTNTK

SEQ ID NO: 3217 - DNA, 3498 bp, Ustilago maydis 521
  CDS (1)..(3498)
atgaagaagctcgaaaagttgctcaaagacggcgagcagatcgacgaagaagagcacgacgggcacaaagagcacgagagtcgacgcgagccaggcgcgtttgaagcaaaatccgagtcttctggctcgtcttcttccacgggcagatcggctactggtggcacaccagcttctggcgccggcgccggctcaggttctggctccggtgcaagtggctccggctctggctctggctctggctctggctctggctctggctctggctctggctctgggtcaggaaacaactcaatcactcgttctacggtgccatccgtgtatccccaagtgcttgcacttcccatcacccgacgtccactcttccccggtttctacaaagccgtcgttatcaagaatcgggccgtatgcgctgccataaaagaatcgctcaagcgaggccagccatacattggtgccttcttgcttaaggacgaggaggaggatgctgatgtcatcactgacctcagcaaagttcataaggttggtgtctttgcccaggtcactagcgtctttcctgtccagggcggtggccaaacaggaagcagtaagaagggcaaggatggagaggaaaagtccgaagatgaagagggtatcaccgccgtcctctatccgcatcgccgcattcgcatcgacgaactcatcacccccacaggtgaaactattccttcgcccccaccaggctctgagggcgccggtcctgccaaccccataagcgatgaggcggccaatgaagccgtcaaagctgcttccatcgccagggtcgacgatattcagcaagaggctcgagacgatgggattctacctgaagtcaacgatgcctctgcagctcatctgcagcaaaatgcaccgccttcgcctcctgcagctgtcgacggagaatctgtcgctaactctgacggcacagctatcgaaggtcaagacatgccctctcactctgcgcctttccagacatcgttccttcaggactacgcggtctcgctcgtcaacgtcaccaaccttgctgccgctccccacgacaagcgcaacgaccagtacatccgtgccgtcatgtccgagttgatcagtgttttcaaggacattgctcagcttaatccgctcttccgcgaccagattgccaacttttcaatctcgcagggcgcaggcaacgtgttcgaggaacccgagaagcttgccgattttgctgctgctgtctcgaccggcgaagtgggcgagctgcaggccgtactcgaggctctcgacattcgtgaacgccttcaaaaggccctcgtcgtgctcaagaaggagctcatgaatgctcagctgcagagcaagatcagcaaagatgtcgagtccaagatccagaagcgacagcgcgagtactacctcatggaacagctcaagggcatcaagaaggagctcggcatcgagagcgacggtaaggacaagatggtcgaaaaattccgcgaaaaggctgcccaactcaacatgcctgaagccgtccgcaaagtgttcgatgaggaactcaataagcttcagactctcgagcctgccgcaagcgaattcaatgtcactcgcggctatctcgactggctcaccagcattccgtggggcgtccactcgcctgagaactattcaatctctaacgcgactggtgttcttgacgaagatcactacggactttccgacgtcaaggatcgcatcctcgagttcctagccgttggtaagctcaagggcactgtagaaggcaagatcatctgccttgtcggacctcctggtgtcggaaagacttcgatcggcaagtcgatcgcacgtgccgtcgagcgtcaattcttccgcttcagcgttggaggtctcagcgacgtagccgaaatcaagggccaccgaaggacctacgttggtgccatgccaggtaaggccatccaggcgctcaagaaggttggcaccgagaacccgctcatcctcatcgatgaggttgacaagatcggacgaggtcacaacggtgatccctcttcggctctgcttgaaatgctcgaccccgaacagaacggctcgttcctggatcattacatggatgttcccgttgatctctcgcgagtcttgttcgtttgcaccgccaacacgctcgagaccatcccacagcctttgctggaccgtatggaggtcatggaggtgtcgtcatacacagctgacgagaagcgacacattgcgcgcggctacttggctcctcaagccaaggaggcttctggcctgcaggatgccaacattgaacttccagacgagacgattgatttcctcatcaagcatcacgctcgagagagtggtgtgcgtggtcttcgaaagctgctcgaaaaggtctatcgcaagattgcattcgacattgtcaagcagcacggcgagtcggtgttcccggagcccaaggagggcgagctggccagcgccaagaaggatgctgttcccagttcgcacgccgctgcaggctctgccgacagcaccgcccagtcagtgaccccacctcatgttgacagtcagccggcggagggcagcgagacgctatcgccattcactgagccatcagcctcttcgggtgaggcaacaccagacagtcagcccaagcaggacggaaaattgcctggcaaggaagccgctggcgaggcgcctgctaaggtgacaacggagaagcgtcaacccatggcggtgcccaaggacgtaaaggtggtgatcaccatcgacagcctgcgcaagtatctcggacctcccgtctaccacaaagaccgtctgtacactagcgccatgcctgctggtgtgtcgacgggactcggctaccttggcaacggttccggctcgctgatgcctatcgagacaaccatcatgccaggcaagggtggcttacaattgacgggtaagctgggtgacgtgatcaaggagtcagcttccattgctctctcttggatgaagaccaacgcgtttgaccttggcattgtcaaggatgccaacgacaatttgctcgacaacaaggatgtgcatctgcacatgcctgagggtgcgattggcaaagaaggaccctctgccggtgttgcctttactgtttcactcacatcactgttgaccaaccgaccggtagcgccaacgctggccatgacgggagaagtgtcgcttcgtggaatggtgttgcctgtgggcggattgaaggagaagttgcttgctgctcaccgtgctggtatcaccaaggtgatcttgcccgcccagaaccagcccaacgtcgaagctgatgtaccgaaggcggtgctcgatgacctcgaggttcattacgtgaacaacgtctggagcgctctcaaccacgcattcggccaaggtccttggtcgtccaaggcgaaggagatggaggaaatggaaagtcaagagttgatcgcgcaatcttcaccccgaaaggagaagatcaaggaggacgatggtgctagccaggatcaaccagtcaactag

SEQ ID NO: 3218 - protein, 1165 aa, Ustilago maydis 521
MKKLEKLLKDGEQIDEEEHDGHKEHESRREPGAFEAKSESSGSSSSTGRSATGGTPASGAGAGSGSGSGASGSGSGSGSGSGSGSGSGSGSGSGNNSITRSTVPSVYPQVLALPITRRPLFPGFYKAVVIKNRAVCAAIKESLKRGQPYIGAFLLKDEEEDADVITDLSKVHKVGVFAQVTSVFPVQGGGQTGSSKKGKDGEEKSEDEEGITAVLYPHRRIRIDELITPTGETIPSPPPGSEGAGPANPISDEAANEAVKAASIARVDDIQQEARDDGILPEVNDASAAHLQQNAPPSPPAAVDGESVANSDGTAIEGQDMPSHSAPFQTSFLQDYAVSLVNVTNLAAAPHDKRNDQYIRAVMSELISVFKDIAQLNPLFRDQIANFSISQGAGNVFEEPEKLADFAAAVSTGEVGELQAVLEALDIRERLQKALVVLKKELMNAQLQSKISKDVESKIQKRQREYYLMEQLKGIKKELGIESDGKDKMVEKFREKAAQLNMPEAVRKVFDEELNKLQTLEPAASEFNVTRGYLDWLTSIPWGVHSPENYSISNATGVLDEDHYGLSDVKDRILEFLAVGKLKGTVEGKIICLVGPPGVGKTSIGKSIARAVERQFFRFSVGGLSDVAEIKGHRRTYVGAMPGKAIQALKKVGTENPLILIDEVDKIGRGHNGDPSSALLEMLDPEQNGSFLDHYMDVPVDLSRVLFVCTANTLETIPQPLLDRMEVMEVSSYTADEKRHIARGYLAPQAKEASGLQDANIELPDETIDFLIKHHARESGVRGLRKLLEKVYRKIAFDIVKQHGESVFPEPKEGELASAKKDAVPSSHAAAGSADSTAQSVTPPHVDSQPAEGSETLSPFTEPSASSGEATPDSQPKQDGKLPGKEAAGEAPAKVTTEKRQPMAVPKDVKVVITIDSLRKYLGPPVYHKDRLYTSAMPAGVSTGLGYLGNGSGSLMPIETTIMPGKGGLQLTGKLGDVIKESASIALSWMKTNAFDLGIVKDANDNLLDNKDVHLHMPEGAIGKEGPSAGVAFTVSLTSLLTNRPVAPTLAMTGEVSLRGMVLPVGGLKEKLLAAHRAGITKVILPAQNQPNVEADVPKAVLDDLEVHYVNNVWSALNHAFGQGPWSSKAKEMEEMESQELIAQSSPRKEKIKEDDGASQDQPVN

(The sequence listing continues in the following parts.)

1. A method for producing a plant with increased yield as compared to a corresponding wild type plant, whereby the method comprises: increasing or generating in a plant or a part thereof one or more activities of a polypeptide selected from the group consisting of 26S proteasome-subunit, 50S ribosomal protein L36, Autophagy-related protein, B0050-protein, Branched-chain amino acid permease, Calmodulin, carbon storage regulator, FK506-binding protein, gamma-glutamyl-gamma-aminobutyrate hydrolase, GM02LC38418-protein, Heat stress transcription factor, Mannan polymerase II complex subunit, mitochondrial precursor of Lon protease homolog, MutS protein homolog, phosphate transporter subunit, Protein EFR3, pyruvate kinase, tellurite resistance protein, Xanthine permease, and YAR047c-protein.

2. A method for producing a plant with increased yield as compared to a corresponding wild type plant whereby the method comprises at least one of the steps selected from the group consisting of:
(i) increasing or generating the activity of a polypeptide comprising a polypeptide, a consensus sequence, or at least one polypeptide motif as depicted in column 5 or 7 of table II or of table IV, respectively;
(ii) increasing or generating the activity of an expression product encoded by a nucleic acid molecule comprising a polynucleotide as depicted in column 5 or 7 of table I; and
(iii) increasing or generating the activity of a functional equivalent of the polypeptide of (i) or the expression product of (ii).

3. The method of claim 1, comprising
(i) increasing or generating the expression of at least one nucleic acid molecule;
(ii) increasing or generating the expression of an expression product encoded by at least one nucleic acid molecule; and/or
(iii) increasing or generating one or more activities of an expression product encoded by at least one nucleic acid molecule;
whereby the at least one nucleic acid molecule comprises a nucleic acid molecule selected from the group consisting of:
(a) a nucleic acid molecule encoding the polypeptide shown in column 5 or 7 of table II;
(b) a nucleic acid molecule shown in column 5 or 7 of table I;
(c) a nucleic acid molecule that encodes a polypeptide comprising the sequence depicted in column 5 or 7 of table II and confers an increased yield to a plant cell, plant, or part thereof as compared to a corresponding non-transformed wild type plant cell, a plant, or part thereof;
(d) a nucleic acid molecule having around 80% or more sequence identity with the nucleic acid molecule sequence of a polynucleotide comprising the nucleic acid molecule shown in column 5 or 7 of table I and conferring an increased yield to a plant cell, plant, or part thereof as compared to a corresponding non-transformed wild type plant cell, plant, or part thereof;
(e) a nucleic acid molecule encoding a polypeptide comprising a sequence having around 80% or more sequence identity with the amino acid sequence of the polypeptide encoded by the nucleic acid molecule of (a) to (c) and having the activity of a nucleic acid molecule comprising a polynucleotide as depicted in column 5 of table I and conferring an increased yield to a plant cell, plant, or part thereof as compared to a corresponding non-transformed wild type plant cell, plant or a part thereof;
(f) a nucleic acid molecule which hybridizes with the nucleic acid molecule of (a) to (c) under stringent hybridization conditions and confers an increased yield to a plant cell, plant, or part thereof as compared to a corresponding non-transformed wild type plant cell, plant or part thereof;
(g) a nucleic acid molecule encoding a polypeptide which can be isolated with the aid of monoclonal or polyclonal antibodies made against a polypeptide encoded by one of the nucleic acid molecules of (a) to (c) and having the activity represented by the nucleic acid molecule comprising a polynucleotide as depicted in column 5 of table I;
(h) a nucleic acid molecule encoding a polypeptide comprising a consensus sequence or one or more polypeptide motifs as shown in column 7 of table IV and having the activity of a nucleic acid molecule comprising a polynucleotide as depicted in column 5 of table II or IV;
(i) a nucleic acid molecule encoding a polypeptide having the activity of a protein depicted in column 5 of table II and conferring increased yield to a plant cell, plant, or part thereof as compared to a corresponding non-transformed wild type plant cell, plant, or part thereof;
(j) a nucleic acid molecule which comprises a polynucleotide which is obtained by amplifying a cDNA library or a genomic library using the primers in column 7 of table III and has the activity of a nucleic acid molecule comprising a polynucleotide as depicted in column 5 of table II or IV; and
k) a nucleic acid molecule which is obtained by screening a suitable nucleic acid library under stringent hybridization conditions with a probe comprising a complementary sequence of a nucleic acid molecule of (a) or (b) or with a fragment thereof, having around 50 nt or more of a nucleic acid molecule complementary to a nucleic acid molecule sequence characterized in (a) to (c) and encoding a polypeptide having the activity of a protein comprising a polypeptide as depicted in column 5 of table II.

4. A method for producing a transgenic plant with increased yield as compared to a corresponding non-transformed wild type plant, comprising:
i) transforming a plant cell, plant cell nucleus, or plant tissue with a nucleic acid molecule comprising a nucleic acid molecule selected from the group consisting of:
(a) a nucleic acid molecule encoding a polypeptide shown in column 5 or 7 of table II;
(b) a nucleic acid molecule shown in column 5 or 7 of table I;
(c) a nucleic acid molecule that encodes a polypeptide sequence depicted in column 5 or 7 of table II and confers an increased yield to a plant cell, plant, or part thereof as compared to a corresponding non-transformed wild type plant cell, plant, or part thereof;
(d) a nucleic acid molecule having at least around 95% sequence identity with the nucleic acid molecule sequence of a polynucleotide comprising the nucleic acid molecule shown in column 5 or 7 of table I and conferring an increased yield to a plant cell, plant, or part thereof as compared to a corresponding non-transformed wild type plant cell, plant, or part thereof;
(e) a nucleic acid molecule encoding a polypeptide having at least around 95% sequence identity with the amino acid sequence of the polypeptide encoded by the nucleic acid molecule of (a) to (c) and having the activity of a nucleic acid molecule comprising a polynucleotide as depicted in column 5 of table I and conferring an increased yield to a plant cell, plant, or part thereof as compared to a corresponding non-transformed wild type plant cell, plant, or part thereof;
(f) a nucleic acid molecule which hybridizes with a nucleic acid molecule of (a) to (c) under stringent hybridization conditions and confers an increased yield to a plant cell, plant, or part thereof as compared to a corresponding non-transformed wild type plant cell, plant or part thereof;
(g) a nucleic acid molecule encoding a polypeptide which can be isolated with the aid of monoclonal or polyclonal antibodies made against a polypeptide encoded by one of the nucleic acid molecules of (a) to (e) and having the activity of the nucleic acid molecule comprising a polynucleotide as depicted in column 5 of table I;
(h) a nucleic acid molecule encoding a polypeptide comprising a consensus sequence or one or more polypeptide motifs as shown in column 7 of table IV and having the activity of a nucleic acid molecule comprising a polynucleotide as depicted in column 5 of table II or IV;
(i) a nucleic acid molecule encoding a polypeptide having the activity of a protein as depicted in column 5 of table II and conferring increased yield to a plant cell, plant, or part thereof as compared to a corresponding non-transformed wild type plant cell, plant or part thereof;
(j) a nucleic acid molecule which comprises a polynucleotide, which is obtained by amplifying a cDNA library or a genomic library using the primers in column 7 of table III and has the activity of a nucleic acid molecule comprising a polynucleotide as depicted in column 5 of table II or IV; and
k) a nucleic acid molecule which is obtained by screening a suitable nucleic acid library under stringent hybridization conditions with a probe comprising a complementary sequence of a nucleic acid molecule of (a) or (b) or with a fragment thereof, having at least around 400 nt of a nucleic acid molecule complementary to a nucleic acid molecule of (a) to (c) and encoding a polypeptide having the activity of a protein comprising a polypeptide as depicted in column 5 of table II; and
ii) regenerating a transgenic plant from said transformed plant cell nucleus, plant cell, or plant tissue, wherein said transgenic plant has increased yield relative to a corresponding wild type plant.

5. The method of claim 2, wherein the one or more activities increased or generated is of a polypeptide selected from the group consisting of 26S proteasome-subunit, 50S ribosomal protein L36, Autophagy-related protein, B0050-protein, Branched-chain amino acid permease, Calmodulin, carbon storage regulator, FK506-binding protein, gamma-glutamyl-gamma-aminobutyrate hydrolase, GM02LC38418-protein, Heat stress transcription factor, Mannan polymerase II complex subunit, mitochondrial precursor of Lon protease homolog, MutS protein homolog, phosphate transporter subunit, Protein EFR3, pyruvate kinase, tellurite resistance protein, Xanthine permease, and YAR047c-protein.

6. The method of claim 1 resulting in increased yield in a plant compared to a corresponding wild type plant under standard growth conditions, low temperature, drought or abiotic stress conditions.

7. An isolated nucleic acid molecule comprising a nucleic acid molecule selected from the group consisting of:
(a) a nucleic acid molecule encoding the polypeptide shown in column 5 or 7 of table II B;
(b) a nucleic acid molecule shown in column 5 or 7 of table I B;
(c) a nucleic acid molecule, that encodes a polypeptide sequence depicted in column 5 or 7 of table II and confers increased yield to a plant cell, plant, or part thereof as compared to a corresponding non-transformed wild type plant cell, plant, or part thereof;
(d) a nucleic acid molecule having at least about 95% sequence identity with the nucleic acid molecule sequence of a polynucleotide comprising the nucleic acid molecule shown in column 5 or 7 of table I and conferring increased yield to a plant cell, plant, or part thereof as compared to a corresponding non-transformed wild type plant cell, plant, or part thereof;
(e) a nucleic acid molecule encoding a polypeptide having at least about 95% sequence identity with the amino acid sequence of the polypeptide encoded by the nucleic acid molecule of (a) to (c) and having the activity of a nucleic acid molecule comprising a polynucleotide as depicted in column 5 of table I and conferring increased yield to a plant cell, plant, or part thereof as compared to a corresponding non-transformed wild type plant cell, plant, or part thereof;
(f) a nucleic acid molecule which hybridizes with a nucleic acid molecule of (a) to (c) under stringent hybridization conditions and confers increased yield to a plant cell, plant, or part thereof as compared to a corresponding non-transformed wild type plant cell, plant, or part thereof;
(g) a nucleic acid molecule encoding a polypeptide which can be isolated with the aid of monoclonal or polyclonal antibodies made against a polypeptide encoded by one of the nucleic acid molecules of (a) to (c) and having the activity of the nucleic acid molecule comprising a polynucleotide as depicted in column 5 of table I;
(h) a nucleic acid molecule encoding a polypeptide comprising a consensus sequence or one or more polypeptide motifs as shown in column 7 of table IV and having the activity of a nucleic acid molecule comprising a polynucleotide as depicted in column 5 of table II or IV;
(i) a nucleic acid molecule encoding a polypeptide having the activity of a protein as depicted in column 5 of table II and conferring an increased yield to a plant cell, plant, or part thereof as compared to a corresponding non-transformed wild type plant cell, plant, or part thereof;
(j) a nucleic acid molecule which comprises a polynucleotide which is obtained by amplifying a cDNA library or a genomic library using the primers in column 7 of table III and has the activity of a nucleic acid molecule comprising a polynucleotide as depicted in column 5 of table II or IV; and
(k) a nucleic acid molecule which is obtained by screening a suitable nucleic acid library under stringent hybridization conditions with a probe comprising a complementary sequence of the nucleic acid molecule of (a) or (b) or with a fragment thereof, having at least 400 nt, of a nucleic acid molecule complementary to the nucleic acid molecule of (a) to (c) and encoding a polypeptide having the activity of a protein comprising a polypeptide as depicted in column 5 of table II.

8. The nucleic acid molecule of claim 7, whereby the nucleic acid molecule of (a) to (k) differs by at least one nucleotide from the sequence depicted in column 5 or 7 of table I A and encodes a protein which differs by at least one amino acid from the protein sequences depicted in column 5 or 7 of table II A.

9. A nucleic acid construct which confers the expression of the nucleic acid molecule of claim 7 and comprises one or more regulatory elements.

10. A vector comprising:
(a) the nucleic acid molecule of claim 7; or
(b) a nucleic acid construct which confers the expression of said nucleic acid molecule and comprises one or more regulatory elements.

11. A process for producing a polypeptide, wherein the polypeptide is expressed in a host nucleus or host cell comprising the vector of claim 10.

12. A polypeptide encoded by the nucleic acid molecule of claim 7 or a nucleic acid molecule depicted in table II B, whereby the polypeptide differs from the sequence shown in table II A by one or more amino acids.

13. An antibody which binds specifically to the polypeptide of claim 12.

14. A transgenic plant cell nucleus, plant cell, plant tissue, propagation material, pollen, progeny, harvested material, or plant comprising:
(a) the nucleic acid molecule of claim 7; or
(b) a host nucleus or host cell comprising said nucleic acid molecule.

15. A transgenic plant cell nucleus, plant cell, plant tissue, propagation material, seed, pollen, progeny, or plant part, resulting in a transgenic plant with increased yield after regeneration as compared to a corresponding wild type plant; or a transgenic plant with increased yield as compared to a corresponding wild type plant; or a part thereof; wherein said transgenic plant cell nucleus, plant cell, plant tissue, propagation material, seed, pollen, progeny, plant part, or plant comprises:
(a) the nucleic acid molecule of claim 7; or
(b) a nucleic acid construct which confers the expression of said nucleic acid molecule and comprises one or more regulatory elements.

16. The transgenic plant cell nucleus, transgenic plant cell, transgenic plant or part thereof of claim 15 derived from a monocotyledonous plant.

17. The transgenic plant cell nucleus, transgenic plant cell, transgenic plant, or part thereof of claim 15 derived from a dicotyledonous plant.

18. The transgenic plant cell nucleus, transgenic plant cell, transgenic plant, or part thereof of claim 15, wherein the corresponding plant is selected from the group consisting of corn (maize), wheat, rye, oat, triticale, rice, barley, soybean, peanut, cotton, oil seed rape, canola, winter oil seed rape, manihot, pepper, sunflower, sugar cane, sugar beet, flax, borage, safflower, linseed, primrose, rapeseed, turnip rape, tagetes, solanaceous plants, potato, tobacco, eggplant, tomato, Vicia species, pea, alfalfa, coffee, cacao, tea, Salix species, oil palm, coconut, perennial grass, forage crops, and Arabidopsis thaliana.

19. The transgenic plant cell nucleus, transgenic plant cell, transgenic plant, or part thereof of claim 15, wherein the plant is selected from the group consisting of corn, soy, oil seed rape, canola, winter oil seed rape, cotton, wheat, and rice.

20. A transgenic plant comprising one or more plant cell nuclei, plant cells, progeny, seed, or pollen produced by the transgenic plant of claim 14.

21. A transgenic plant, plant cell nucleus, plant cell, or plant part comprising one or more transgenic plant cell nuclei, plant cells, progeny, seed, or pollen derived from or produced by the transgenic plant produced by the method of claim 6, wherein said transgenic plant, plant cell nucleus, plant cell, or plant part comprising one or more of said transgenic plant cell nuclei, plant cells, progeny, seed, or pollen is genetically homozygous for a transgene conferring increased yield to a plant cell, plant, or part thereof as compared to a corresponding non-transformed wild type plant cell, a plant, or part thereof.

22. A process for the identification of a compound conferring increased yield to a plant cell, plant, or part thereof as compared to a corresponding non-transformed wild type plant cell, plant or part thereof comprising:
(a) culturing a plant cell, transgenic plant or part thereof expressing the polypeptide of claim 12 and a readout system capable of interacting with said polypeptide under suitable conditions which permit the interaction of said polypeptide with said readout system in the presence of a compound or a sample comprising a plurality of compounds and capable of providing a detectable signal in response to the binding of a compound to said polypeptide under conditions which permit the expression of said readout system and of said polypeptide; and
(b) determining whether the compound is an effective agonist by detecting the presence, absence, or increase of a signal produced by said readout system.

23. A method for the production of an agricultural composition comprising:
(a) obtaining a compound from the method of claim 22 that is an effective agonist by detecting the presence, absence, or increase of a signal produced by said readout system; and
(b) formulating said compound in a form acceptable for an application in agriculture.

24. A composition comprising:
(a) the nucleic acid molecule of claim 7;
(b) a nucleic acid construct that confers expression of the nucleic acid molecule of (a) and comprises one or more regulatory elements;
(c) a vector comprising the nucleic acid molecule of (a) or the nucleic acid construct of (b);
(d) a polypeptide encoded by the nucleic acid molecule of (a) or a nucleic acid molecule depicted in table II B, whereby the polypeptide differs from the sequence shown in table II A by one or more amino acids;
(e) a compound conferring increased yield to a plant cell, plant, or part thereof as compared to a corresponding non-transformed wild type plant cell, plant, or part thereof, wherein the compound is identified in a process comprising:
(i) culturing a plant cell, a transgenic plant, or a part thereof expressing the polypeptide of (d) and a readout capable interacting with said polypeptide under suitable conditions which permit the interaction of said polypeptide with said readout system in the presence of a compound or a sample comprising a plurality of compounds and capable of providing a detectable signal in response to the binding of a compound to said polypeptide under conditions which permit the expression of said readout system and said polypeptide; and
(ii) determining whether the compound is an effective agonist by detecting the presence, absence, or increase of a signal produced by said readout system;
and/or
(f) an antibody that binds specifically to the polypeptide of (d); and optionally an agriculturally acceptable carrier.

25. The polypeptide of claim 12, or a nucleic acid molecule encoding said polypeptide, wherein the polypeptide or nucleic acid molecule is selected from yeast or E. coli.

26. (canceled)

27. A method for identification or selection of a plant with increased yield as compared to a corresponding non-transformed wild type plant comprising utilizing the isolated nucleic acid molecule of claim 7 as a marker.

28. (canceled)

29. A method for the identification of a plant with increased yield as compared to a corresponding wild type plant, comprising
(a) screening a population of one or more plant cell nuclei, plant cells, plant tissues, plants, or parts thereof for an activity of a polypeptide selected from the group consisting of 26S proteasome-subunit, 50S ribosomal protein L36, Autophagy-related protein, B0050-protein, Branched-chain amino acid permease, Calmodulin, carbon storage regulator, FK506-binding protein, gamma-glutamyl-gamma-aminobutyrate hydrolase, GM02LC38418-protein, Heat stress transcription factor, Mannan polymerase II complex subunit, mitochondrial precursor of Lon protease homolog, MutS protein homolog, phosphate transporter subunit, Protein EFR3, pyruvate kinase, tellurite resistance protein, Xanthine permease, and YAR047c-protein;
(b) comparing the level of activity with the activity level in a reference;
(c) identifying one or more plant cell nuclei, plant cells, plant tissues, plants, or parts thereof with increased activity compared to the reference; and
(d) optionally producing a plant from the identified plant cell nuclei, cell, or tissue.

30. A method for the identification of a plant with an increased yield as compared to a corresponding wild type plant, comprising:
(a) screening a population of one or more plant cell nuclei, plant cells, plant tissues, plants, or parts thereof for the expression level of a nucleic acid coding for a polypeptide conferring an activity from a polypeptide selected from the group consisting of 26S proteasome-subunit, 505 ribosomal protein L36, Autophagy-related protein, B0050-protein, Branched-chain amino acid permease, Calmodulin, carbon storage regulator, FK506-binding protein, gamma-glutamyl-gamma-aminobutyrate hydrolase, GM02LC38418-protein, Heat stress transcription factor, Mannan polymerase II complex subunit, mitochondrial precursor of Lon protease homolog, MutS protein homolog, phosphate transporter subunit, Protein EFR3, pyruvate kinase, tellurite resistance protein, Xanthine permease, and YAR047c-protein;
(b) comparing the expression level with a reference;
(c) identifying one or more plant cell nuclei, plant cells, plant tissues, plants, or parts thereof with the expression level increased compared to the reference; and
(d) optionally producing a plant from the identified plant cell nuclei, cell, or tissue.

31. The plant of claim 14, wherein said plant shows an improved yield-related trait relative to a corresponding wild type plant.

32. The plant of claim 14, wherein said plant shows an improved nutrient use efficiency and/or abiotic stress tolerance relative to a corresponding wild type plant.

33. The plant of claim 14, wherein said plant shows an increased low temperature tolerance relative to a corresponding wild type plant.

34. The plant of claim 14, wherein said plant shows an increase of harvestable yield relative to a corresponding wild type plant.

35. The plant of claim 14, wherein said plant shows an improved yield relative to a corresponding wild type plant, wherein yield increase is calculated on a per plant basis or in relation to a specific arable area.

36. A method for increasing yield of a population of plants, comprising:
(a) checking the growth temperature(s) in the area for plantings;
(b) comparing the temperatures with the optimal growth temperature of a plant species or a variety considered for planting; and
(c) planting and growing the plant of claim 14 if the growth temperature is not optimal for the planting and growing of the plant species or the variety considered for planting.

37. The method of claim 36, comprising harvesting the plant or a part of the plant produced or planted, and producing fuel with or from the harvested plant or part thereof.

38. The method of claim 36, wherein the plant is useful for starch production, comprising harvesting a plant part useful for starch isolation and isolating starch from this plant part.
